United States Patent Application Publication US 2020/0377945 A1 - sequence listing, part 40

SEQ ID NO: 7704 - DNA, 27156 bp, Unknown
  gut microbiota DNA sequence
atacgccgtagtcaacattatgcagtgcaactgttccatggtgatcaccgatcccaaaggggaacttctgcggaaaaccggagggctgctggaacgggaagggtatgaagtgcgggtgtttgatctgattaacccggagacatccttttgttataatccctttgcttatgtgcgggatgacaaggatgtgctaaaactcatcaataacctgatccgaaataccaccccgaagggggcgcagagttcggatccgttttgggagaaaagcgaaaccgcgctgttgcaggcactgatgctgtatctgttacatgaagcgccgccggaggaacaaaacttctccatgattatggaaatgttaggttctgcccaggtgaaagaggacgatgaggaataccagtctccgctggatatcctgtttgaacggttggagatgcgaaatccggaaagcattgcagtcaagcagtatgccatttacaagcaggcggcaggaaagaccgcaaagtccatcctgatctccgtaggcgtccgtctggctgcgttcaatttaaaacagatcgccaatctgacctgtaccgatgaactggatctttacagcatcggggagaaaaaggtggcgctgttttgctgtatcccggatgcggataccagcctcaattatctggtgggcatgatctacagtaacctctttcaaaccctttactatgtggcggaccggaaataccatggaaaacttcctatcccggtacactgcattatggatgagtggccaaacgtggcgctgccggatgattttgacaagcttctggcaaccatgaggtcgcgcgcaatttcctgcagcatcatcatccagaacattgcgcagatgaaagccttgtttaaggatagctgggaaagtctcatagggaattgcgacgaatttttatatctgggcggcaatgaaaaagaggggcataaatatgtctcggaactattggggaaagaaacactggataccaatacctatgggcagaccaagggaaggggtggaagctattctgtgaatttccagcagtcaggaagggatgtgccatacttgttcgtgaagagttcagttgccttgaatttatcatgaacagggacacgatcaactggattctgaaaaaattgaatacaggaggtcgaacatggagcatttaccaaagaaaatccaccacaacggcatcggctacacgctgatgggagactactacatccccgacctgaaactgccggaggaaaaacgccccatcgggcggtgggggcggatgcacaaggcgtttctgcaagaacactgccccggccagtacaatgaactgcttctgtcgggaaaactctggacatatcttgctgacctgaacgagcaggccgatgaccggctggcgtgtatcatctcgcagatgcaggatgcggagggcgtcaccgaggaactgaaagcctgtgaccagcttgcatgggtcggagccatgaacagcatccgcagtcgggcagaggaaatcatcctctctgagatgatttttgcctgagggaggtggacgcatgattctggaagaaatgtttaacggcaggttctatccttgtgaaacggtggtcgctgattcactgaggttcaagcaggccaccaaagccagtgcagctctgatggatactttatcggaacacctgagcaaagaggactatgctctggttgaagaactgcgggagcaaatggcaatcgctcagtgcgaggaaaacgaaagccacttcaaatacggcttttcggcggggctacttgtccaaaaggaagcctatgagcaagtggcgcagagagaaaaagagtagcatccccattgtagccgttctcattttgagtacggctactttactcccataaagtggtggtggacaaaatgaccactcctacttcattggagtaaagtggtggtttccattttgagaactaccaaaatcgaaacaacatcggcttttggctgtgcccattttgggcacaaccaccacaacagaatacagcttcataaaggtcatttaccgctcaaccggtggatggccttttttgctgcccttacagccgccaaccgtgacaaacacgcccggtagctgtactacaagtcactctgattccgccgtgtccagacctatactttttattgtcggaagcgaataccgagtgatggactatgtctacaagacatagcgaactgcgtctgcaagggactctggaaccggcgtttcttccgctaaactggaaaatacagacagggatacacataaagccgataccggcagacttacttctgcttgcgcctggccttgcggttgagcgggatggggctggtctttcccctcatattgttgggatttttgagtatcttggacaggctcagtatccgcaggaacgccgagaagtcctccgaggaaatcttctcaaagggtatctgcaacttatcgcaaaattcgtggatcagcatttctatatcgctgccctgatggatggcctgctcaaatttttccttcacgtcatccagcgtgggctgcgggtcggcggtggtcttgtccttgcggtgtgcttcccggatgtcccggacgatgctgtccagatcatcgtgtatgacgtggctgtaataatcgctttcctgcacctgccccagttccagcgtccgcatatagaggtcatcttctccgggcgcatacttgctgaggacggcctgccgggtggcttccatcaccagattcatctgctccacccgcatattggcgatttggtcgatacagatttccatatccaccatcagccgccggaagttcgggtgtgtagccagttcgcagagaagccgattgttgattttgccgctccgtaaaagttcaatcatttcatcgttcaaatggagcgactgtacatcggcgttgggaacctctttattatcggtcagtcccatcagatagtcggcggacacgccgtaaaaatccgccagcgtcgcaatcgcaaatgggctgatgtccttgtagtcatcggtttcgtatttccccagcgcagatttagacaggccggtctgctccgccagttgttccagcgtcaggtgcttgtccaccacccgcaggtctttgagccgctccgggattgtcagctttgcgtacatccaaagccccctctctcgttatggtttttcagtgattacacccattatagcacgattccataagcgtggaaatatgcggatttcaagcgtttttccgacgttttggatatacgggaaagggcctcttttttcggtaaactggttcttgcagacaggcactgaaccttgaaaattgaatgaccggctgcaaggggtatggcctccggggaagtgacgccacgacagaaatcgagcgcaccaaagaggccgatacgccgggagaaattccgggcaggagcggcttgcaggcagaccggcggacagaaacaagtttatcatgcggggcgcatggctccgcagcaaagaaatggaggaatatcattatgaaactgagcatgaaagaaaagaagattctctacgcttacggctgtcccagccaccacaatacggtgacacggctgaaatggctgacggccctgacggttgacccggaggccaaacgccggatgctggggttggcccgtaaggtggagacggaggtggacgaaagctggtacgaggatttttaccaccatctgcgcatggagatggacgagtaccgccgtctaaagcgcagcctgcgagtgctgaaatcttacactgattatgaggaggatttatatgaggaagctgtctaaatatgagaaagaaaccatcatcaactggaacgaggcggagaaccttgccagcgtctacaccttcaacgccagcttgaagcgcaggctggcggagttcagccggaagtacccgctgctgtgccggttggagcgcagtacgccggagggcagcgtgacctatgtactggacaagtcccggctgtcgatccggttcatcccgccgtacagtgaggaacggaaagccgccgccagtgcctacgcaaaggagcatggctttcaggtggtaggggcggaagaaaaaatagcctgaaatcggggagattacggtcaaaatgccggggctgcacctgatgttttgaccggcaatccccgcaggcgtattccgtatccacttccagccgaaaggcgtaaatgtgtggatgtggagccggtgaaactggcggcaaccgcttctgcggcggaagccagcttcgccggtgcgggagtacagagggcggcgagccctctgtggcggggtgcaggggcggcagcgcactgctggggtcaaggggcaacgcccattgggcgggtacagggcggcagcgcctgtgcggagtgtagaggcggcgagcctttactccggtgtccagaggtggaaaacctcggcccagggaaagttgatgcctgcgtcaacttgtactgggtattacctgacgcagactttcgcaggatttgcggcttcgccgcccttccccggccccggaacatcttcgcaggaaggagggaaattgtttgaaactgacacgacacaacgggcgctccggcaagcatggcacctacaatccccgccacaatgaccgccggtttgatgtggagaacagcgaacacatcgacgcagagcgggccaggcaaaacatctactgggactgctaccggggcttcaccacacacgagttccgggagaacccggagcagccggatttcagctttgaggaaatcgagcggatgtactactacgagtattattctgaccatgtggaggcgcagaacgcccggaatgagaaaacccggcacaccgagcgcaaccgcaccgtggaggacttgctgaaaaacaacaagacctgcccggaggaaagcatctaccagatcggcacactggaagaatccgtcccgccggaaacgctctttcgcatcgtcaacgagttctatgaggaattcgagcgccgcttcggttcccatatccacattttagattgggcgctccatctggacgaggggacgccccacatccatgagcgccatgtgttcgactgtgagaaccgctacggggaactgtgtccccagcaggagaaggcgctggaggaactgggcatccctctcccgaacccggacaagccaaaaggcaggcacaacaatcggaaacagaccttcgatgcggtctgccggacgattttgtttgacatcacaaagcggcatgggctgcatctggatcaggagccgtcctacggcggacgggagtatctggaaaagcaggactatatcctgatgaagcagaaggagcagctgacggcgcaggagcagaagctggaagaactgacgctcaaaatcgaggacgtggagacgctgctggatgatgtttccgatgtggcctatgacaaggcggtggaggtggtgaccgatactgtccggcaggagacacacaaagaagatattcgtttgattgaggaaacaaaaaagtgggtactttcgccggagcggaaggccccgcagaaggagcgtgactacgccgccgcccggctggatggagtgattaccaaaatcaaacgtgtcatgcagagtgccctggcaaaaatccagaaaacgcttatgcagccggaggtcaagaaggccggtaaggagcagatcaaggagaaagccagagaatccatccgggataagctggcgaaagacaagctggacgctgaccgggataaccgggaacgctgggaacgtgaggggcggatcgctccgactaagaaacacgatatggagttatgaggcatctgattttctgcggaaaccaggtgtctttttctctgtctggaggtgagaaaatcgaatgtatttgaagcggtgaaggagtctgtcaccacaaggcaggctgcggaatattacggggtgcaggttggcaggaatgggatggcctgctgtcccttccacgatgacaaacatcccagcatgaaggttgaccgccggttccactgcttcggctgtcaggcggacggggatgtgattgattttaccgcccgcctgtttggtctgagcggtaaggaagcggctctgaagctggcggaggatttctctgtccgctatgacgccaaaggccatgacccgccccgcaggaggccggtcaaacggaaaatcagcgaggaactgcgctaccggcaggcggagcagaaatgtttccgggtactgtgcgattacctgcatctgctggaacgctgggagaagaaatacgctccgcaaacgccggaggaagcatggaatccgctgtttgtggaagcactgcaaaagaaagcacacacggagtatctgctggatgttctcctgtccggcagcatggaggaacgggcttccgttgtcgcccagtacggaaaagaggtgaggaagattgagcagcgaatatcagagtttgccgccagccacccggcaggccgccatgagcgcagccgaagccttagcgccggagcagagcgcctctgaggtgcgggaaagcctctccgtcaccgagaagggccagcccgccaacaccatcggcaactgccggacggtgttctgccatgaccctctcctgcgcggggcgatccggctgaacctcctgactgaccgggtggacattgtgcgggatttgggctggcgcaggaataccagcgccctgacggatacagacgtgaagtatctgcttctctattttgagcagaactatggcctgaccagcgagaaaaagatgacagcggcgctctctatcgtggcgaatgaaaactgctaccatcccatacaggacgtgctgaacggccttgtctgggacgggacgccccgcatccgctcctgtctccatcacttcttgggtgcggacgagagcgactatgtggaggaaatgctgaaacacttcctgctgggggctatccggcgggtattccggcccggctccaaatatgaggaaatgctctgtctggtaggcggtcagggcgctggcaaatccagcttcttccgcctgctggcgatccgggacgagtggttttccgatgacctgaaaaagctggatgatgaccgggtgtttttgaaactgcaaggacactggattattgagatgtcggagatgctggctaccagcagcgccaaaagcattgaagaaatccgctcattcatcagccgccagaaggaaacctaccggacgccctatgaagcccagcccaaagaccggctgcggcagtgtgtgttcggcggttcatccaacacgctggacttcctgccccttgaccgggccgggaaccggcgctttttgccgatcatgatttacccggagaatgcggaggttcacattttggaggacgaggacgcctccagagcctatcttttgcaggtctgggcggaggccatgacgatttaccgcagcggccactactctatgaagttcagcaagtccatccagcgccagctggtggaggtacagaaggatttcatgccggaggacacggaggccgggcagatacagggctttctggaacactacaccggcagcatggtctgctccaaacagctgttcaaggaggcgctgggccacacctatgacgagccgaaacggtggcagctgcacaatatcaacgagatcatgaacacggtggtgacgggctggaagccgttctccaatccgaggatgttcgccgggtatggcaggcagaggggctgggaacgggacgtttccggcaacgaactgcccggcaacgaagatggatttgtggagctgaccgaggaagaatgccgccagctggaacttcccaaagagtggatcgcataaaaatagcggtctgttgccgggatggttgtcacttggttgccgggttcgttgccggggattttccggtctggatacggaaaaagcctgtaaataaggcattttctaatatctatctctatctccggcaacgaaagcaacgagatttttcaagaaaatttagaaagtaagatttgcaggccagacggtagtttacaggtttttggaggttcgttgccggacttcgttgccggtgtgctattgtctggcctgccactctatggaggtagcctatggaaaaaagcaagcagcagaaaaataaagtccgttttatggtggtgcgggagttctccggggagaaatccatgcgggaagcctttgagcaactgatcgagcgccagacctgcgaacacttcgaggaatggctggaacagcgtgagatggcggagaacgctgcgtaaaaacggttgattcagggacaggggcatggtatgataatggtatcgtgtccctgttcatagaaggagaacgctatgagcaggaaaaaacaagtctatgagaaaatcaccgctctctactgccgtatctctctggatgacggcggcgacaatgagagcatgagcatcagcaaccagaaaatcatgcttcgggactttgctgaaaagcatgggatgttccagtatgagtattatgtggatgacggctatacgggccgcaatttcaaccgccctgccttccagcgtatgatcgctgacattgaggcagggaagatcggctgcgtcatcaccaaagacctatccagacttggtaggaattatattgaagctggcagctatatcgaaatctttttccccaaacacaatgtgcgctatatcgccatcacggacggcgtggacagcctgacccgtcaggagatggacattacgcccttcaagaatatcctgaacgatatgtatagccgggatatttctaaaaaggtgctggcgggcatcacgacccgctcccggcagggaaagttctgcggagggacgccgcccttcggcctgatgcgtgacccggaggacaaagggcatcttatcattgacccggagacagcgccgatcatccgtaaaatctatgactatgcccttgacgggctgggctgcatgaggatttccaaacggctgatggaagaaaaaatccccatcacccatgtcaaggccaatacggagtttgacgccaactattactcttggggcggcgcaaggatcagccatatcctgcggaatcccttttataagggcgcacatctggtctttcggacacaccagaagggcatccgctccaacacttatgacattatcccccgtgaccagtgggaagtgatcgagggctgccatgaggcgattgtgacgccggaggaatgggaacaggtacaagctatcattgaccgcaaaccacctatcatgaaaggcaatgcctgccccttttataatctgttccacgggctggtctactgcgctacctgcgggaagtccatgcaggtgcggtatgaaaaggtcggcagaaccgggaagaaccggttcaccggcgagatgcgggaaccgattgacaaggcgtactatatctgccagacttataaccgcatgggatgcaaggtctgctccagccacaagatcgaggccagagatttatacaatctggtgctgaaagacattcaggagctggcggcgcaggccatgaaggacgccgatgcgttctatcagcacctcagcagccggatggagcgccggtatctggtagacgcttctcagaccgagaaggaacggaaacggctggaagcccggaatcaggaaattgatgtgatgtttttaagcctgtacacggataaggcaaaaggcatcctgaccgaacagcggtttatgaaactgacggcggcgctggaacaggagcaggaatccaaccagaagcgtctgcatgacctggcgatgatgcagagccgggcggacgcacaggaaagcgaagtccgtacctttatcaaggaaatccggcgctattccgctattgaggaactggacgaggcaatgctgaaccggcttatcagccggattctgattggcgaggtcaagaaggtggacggacagaaggtgcagaaagtcaaaatcgtttataactttgtcggggaaatcccggagattgcagcataaagacagtacagccctccccgtaccggggaggactttttgatatttggaaaagataaaaatgtatgtgttatttatagcatcctaaaaggccattgtttccaaaataccggttttaagattttgagcagcagcgctcaatggacgtttcctgtcatataccatacaaatctgacgttcagggattgtttcccgcagatgaatctggacgatctcacgttgctgaagtgcttccttcgccattggttctggaagaaaagctagccctaattccgcttttaccaaaggtaaaatctgatctgtggtagctgcttccgtgtctggtatcaactccaacccgtgggacaggaacaatttatgataaaaattccaggtcatagtttcttttccgaggcaaatcaacggataattttttagttcggcaagtgtcagctcctggctgcccagtgccgtaaaagttttgccgcccacaagaatttcacggaagggccgcaaatgcaattccttcaaagaggtatccacgttggtcggcgttgatacaacagcaaaatcaacttcaccgtttttaacagagcggatggcttgcggagtggaatggttatatattttcaagcgaataccgggatgcttcatgtgaaagggcttcaatatatccagcaggtagatattcaatgcggtttcgctggctccgattgaaatacttccatgctccaaaccactgtgcgcatttagttcggtttcggctgtttgtatctgagaaatggcagcttcgacatgagtgaacaacatttctccttctggggtcagttgaacacctcgattggtgcgtataaataacgtacagtgcgtttgctgctccaggcagttcatggcgcgggtaacgttgggctgtccgctgcccagtgcatgagccgcttttgtgaaattcttgtatttggctacataataaaaaaccttgtaatattcaaagttgacatccatccaggcatcctctttctgatatgctaattgctgatgatcactatatcaataatactttttacatattcctgcctgtccagtataatagattttggttccaaaaacaagtgaaggagtgctttagtatgagtgaaatcaaaaaagttgtgctggcatattccggtggtctggatacctccgttattatcccgtggctgaaagaacactatgacaactgtgaagtgatcgctgtctgtggaaatgttggacaagacgatgaattggatgatttgaaacagcgagcagtggcttctggagccagcaaactttatgtcgaggatttaacggatgagtttgttaatgagtttgttattcctactatgcaggcgggagctgattatgaagggtatttattgggaaccagccttgcccgccctattctggctaagcgtgtcgtggaaattgcaaaggcagagggggcggatgctgtttgccacggcagcaccggaaagggcaacgatcaggtgcgatttgagctggccattatgcactttgcgccggaaatgaaaatcattacaccgtggcgggaatgggatattcaaagccgcaatgaggagattgattacgccgaagcccatcatattcctttgaaaataaatcgagaaaccaattactcaaaggataaaaatctttggcatctttctcatgagggattggatttggaggacccaggtaatgagccgcagtatgaaaaagaaggttttctggaaatgagcgtttctccactgaaagcgccggatactcctacatatgtggagctggactttgaaaaaggcgtacctgttaagttgaacggcaaggcaatgaaatcatcagacattatttctaagctaaacgagattggcggctgtaatggtattggcctgtacgatgtggtggaaaaccgtctggttggtatgaaaagccgaggagtgtacgagacaccgggcggaaccattctgtatagagcgcatgagatattagaaacactgacattggacaaaaaaactgcccataagaaaaaagaattgtctatttgcttcggtgagttggtttacgacggacagtggttttctccgctgcgcaaagcgttgtctgcatttgtgacagagacgcagcagaccgtcaccggaaaagtacgtctgaagttatataagggcaacattatcaattcaggtgtgtggtccccatattctttgtatagcgaggatattgtcacatttaatgaaggagagggctatcagcagtccgatgctactggcttcatccgtcttttggggctgcctacccgtatacaggcgtctgtaaatgcccgaaatagaagggaggcagaaaaatgctgactgcggtgacaggtatcaagtggggggatgaagggaaaggacgggttattgatctgctggcagagcgggcggatattgtcgtgcgttaccaggggggaaataatgccgggcatacggtcgtaaccaaacagggaaaatttattctgaatctgctaccatccgggattcttcatcccaatgtggtgtgtgttcttgcggatggtatggtagttgatttagagcatctctccaatgaaattgccgatattcgcggcaaaggggtgtctgtaacacctcaaaatttcaaactgtccgctcgtgcaaccatctccatgccgtggcatcggatacaagatgatttggaggaagaacgtcttgcgcagagcggagttgctttcggctctactcgcaggggaattgcttatgcctacagcgataagtatcgcaaaaaaacattgcgtttaggtgatctgcttcatttagatgagccatatatacaggttcgtctaaaaaccatgctggaagcaaaaaatttggaactggcaggctgctatcatcaggagccaatgtcttatccggccctgcttgcctggtgccagaagcaggcaaaggagtttttaccctatatctgtgataccggaaattatttggatacagcgttatcgtcaggaaaacagatggttttggaagcgcagcttggcgctatgcgtgatattgactatggcattttcccctacacttccagttctacaacgattgcggcctatgggccgattggagcgggaattcctggcgtgcagcctgaccatgtggtcggtgtgttaaaggcttattcaacgtgcgttggtgcaggcccatttgtggccgagaacgctatgcctgaagaatggaaggaatccctgcgcaaggccggcggtgaatatggcgctgcaacaggccgcccacgccgggttgggccatttgatgcggttgcaagccggtacggcctaaaatgccaacgcgctgacaaaatcgcattgactaagttagacgtactcagttatatgcaggaaattcccatcattacgggatatttgtacaaaggcaaagaaacagacacctttgttcctacggaaaatctggaagaatatcaaccggttatcagcttcattcccggctggaaacaggacatttccgcttgccgtcgctgggaggaactgccggatgctgcaaaaaattatatcaaaacgctggaaaaattacttgatcacgagatccagtttatctctgtcggcgcaaagcgcgaagaatatctgataaagggggaatggctgtgagacacctgattgaaccaaccgatttcaatgacgatgaaacgatggcagtcctggatttggctgatcgaattgccgccgctccggagatgtatgcgcatgtggctgacggcaaaaagctggcgaccttattttatgaacccagtacgagaacccggctttcttttgaatctgccatgctaagtctgggcgggcagacgctcggcttctccggagcagaacagtccagtgcaaccaaaggagaaacggttgctgatacagctcgcgtagtcagctgctattccaatattatagctatgcgccacccaaaagaaggtgctccgcttcgcgcttccatgttttccaaagttcctgtcataaatgctggtgacggaggccataatcatcctacacaaactttaattgatttgctgacgattcgccagcgcatgggacggttggatcatctgaccgttggtttttgcggtgatctgaagttcggccggacagtgcattctttggtcaacaatcttgttcgttttttaggaaatcagttttattttatctcgccagaggaacttcgcattcccgaatatttgaaggaggatacattgcacccggcaaattccttatattgggaggtcagcagtttggaggacacactccctaagctggatgtgttatatatgaccagagtgcagaaagaacgtttttttaatgaggaagattacattcggctaaagagcatctacacgcttgaccctgaaaaaatgaaattggctaggccggatatgcctgtgttgcatccactgcctcgtgtcgatgaaattactcggacggtagatgatgatccccgtgccgcttattttgatcaggtgcagaatggcgtttatgttcgcatggcactaattatggctctgttgggaattgccgatcctgtgactggagagaaggtgttaaaatgctgaaggtagaacccattcaaaatggtgtggttattgaccatatccccgctgggcgcggtatggaaatttaccggctgctccatctggagagcaaacatcaggcggttgcgctgctgcaatctgtgcgcagtgagaaatatggaacaaaagatctgattaagatcgaaggttcaaaccttccggagcggctggagattttaggctatctggatcggcgaattacactaatctatatcaaagacggagtagtggagcgaaaatgtcagcctgatatgccagagatattgcgaaatgtggttaaatgcacaaacccacgatgtattaccagtattgaggcaggatgcgaccatattttcaaactgtctccttctgggaagtaccgctgcctttactgtaatcaggaactgccggtacagaggtgataccatatggatttttctgcatacgaaaaaggcaatccttttatgtcttataaccatattcaaatatgcaaagttgacccggattgctgtgtggtaaaggtaaacttggttgccgaatctatgaatcttcatggacacgtacatggaggattgttatatgcaatggcagattgcgtggcgggaatttttgccagaatggatggtagagattatgtaacgcaaagcgcacatatcaatttcctgcataacgtacagtcagggacaatctttgcaaaagctgaaatcataaagcgcggtaagcacatggcttactttcatatcagcattaccgatcaagatgatcatcttctttgtgatggtatggttgatatgtattgtatttcaggatgccaaacatagtcaggcttctgctattttgagaatacatacatagaggtatctttagttatacatcaaggagtgaacacatttgcatggaattataaaatgccagcatcagggacaaatgtccgaatctttcccaactgccgcatttttgtcaatatcaggcggcctgcaagatgcctatacctatgtgttccggggcaaggtgttcgccaatgctcagaccgggaatatcgtattacttagtcaaaacatctgtgagcgtaattggttgcagagcgcacactactttgttccgttggcagcatttgcaataggcatcattgttgcagagcagatacggggaaaatatcagaatgtgcagaatatccactggaggcagattgtcctgctactggaaatgattctgctgtttttggtaagctttcttccgcaaagtcttgatatgctggctaatgcactggtatctttttcctgcgctatgcaggtgcagacattccgaaaggtgaatggttacgcgtttgccagcaccatgtgtatcggaaatatgcgtagcggcatggaagcactttctgcatacatcagaacacatgatagaaatgttttagggaaagctttgcgctattgggaaatcattttcctatttgctgttggcgctggaatcggcggtcaatttgttgttctgttcggagcgcatacgatctggttttcctgcctgcttctattggtcagtttttgcctgatgtttatcagagaagaaatgaaagaacacccggaaattagcgtcgaggaagaaacgatacagaaagatctgtgggacattgaaaagcagataaagaatataggtcaccaggtcggggaagatatatcggttatgaaatcaccgcataataaagattctcaataacaaattaaatcgcggcgtcgaatgaataaaactccgacgtcgcgatttttacagaaaaatttagccccagacttcctcagcaatctctttaaccagcgccagtttcgcccattgctcttcttcagtcagcttattgccgatctcgcaggaagcaaaaccgcactgcgggctgagatacaacctgtcaagagggatgtactttgcagcttcatggattcgggcaatcacggcctctttattctccaactgcggctgctttgtggtaatcagtccgagaaccactttctgtccgcttccgatttttgcaagaggcgcaaagccaccggagcgttcatcatcaaactccagataataggcacttacattttcttcgccgaacaaaacgtcggccacggagtcataggggccactgctggcataagttgaatggtaattgcccctgcagacatgggtggtgatgttcatcccctctggcgctccgttaatcacctggttgttaatatctttataggcattctggacggccaaaagcccttctttcgttgcggcgtgcatttcctgtccatttttatccgccagcattccccatgtgcaatcgtcaaactgcacattcctgcagcctgcatcgtacagctgatgcagtacagcaatgtaagcctgtgcaatgtcgtccatcagcggcttggcagaactgtaaaaggcctctgtgtgttttctggcaaagggcatccagaattgtgccagcgtctgagcaggggcggggattgtctgttttgctatagtcttttcgtcctccagcgccttcacataccgaaaatgatccacaaagggatgctcaccggacaatccgatcctgccggtcacaaaagtatcatcgatcatcgccgcctctccgtggaagggaaggccggtgttcgttttcttatggccgacgccgtcgaatccccacataaaatccagatgccaggtagcgcggcggaactcgccgtcagtaataacatggtatccggccgctttctgcttcgccaccagttcggtaatgcactgatcctccacagctttgagctgatcggcggtaatggctcctgcttcataatcggcgcgggcctttttcagttctgccggacgaagaaagctgcccacgtagtcgtaacggaacggtgcgtataaattactcatatcaaatgtctcctttgcattcgtttcttatatttttcgccgcctggaccatatttttcaaactggcaacggtttcggtttcccctctggtttttaatccgcagtctgggttgacccataaatgatctgccgggatcttgtccagcatcagccggagggcggcttcaatttcttctacactcggaatgcggggggaatggatgtcgtagacgccgggacccacctccgtttcaaaatgatgcgccatcaggctgtccagaatcgtaagtttggaacgggacgcctcaaaggtaatcacatcggcgtccattgcgtcgatttccgggataatgtcctcaaactcgctgtagcacatatgggtgtgaatctgcgtttccggttttacctttgcgtggcagagacggaatgccttgatcgcaaagttcagatagtcgctatgccagtcggcgcggcggagcggcagcttttcccggagcgcggcttcgtcaatctgaataatacggacgcctgcagcttccagttccagaacctcttcccggattgcaaggccgatctgatacatcatctcctgcgtggaaatatcttctctggggaacgaccagttcaaaatcgtgactggtcctgtcagcattcccttcacatccttatccgtcagggaattggcataacggatataatcggtagtaatggacttcttgcgtttgacgtccccgaacacaatcggcggctttacgccccgtgtaccgtaagactgtacccaaccgcctatggtaaacacataaccagacagattttcgccaaaaaattccaccatgtcgttgcgttcaaattcgccatgcaccaagacatccagaccaatgttttcctgtaaagcgatgcaatcccggatgaatccctttgcattatttcggtattcttcttcgctgatttcgccttttcggaattttgttcggttctgcatgacttcctttgtctgcgggaaagagccaatcgttgtcgtgggcagcagcgggagattcagcagttctttctgcgttgcctgccgttcctttctgggcaccctgcgggtaaaatccgattcagtaagtgccgcaacctgtttctgtacctctgtgtcggttctcagctcactggtttggaacagttcctgattttgcagatagcgccggtcacaggaatagtctgcaagttcagccaggcagcaaagctcacgcagttcatccagcttttcatacgcaaaggaaaaatgccggataatttcggtggaaagctgcggctcattctttacagtatacggcacatggagcagggagcaggatgtactgagtacaatgtggtcacagcagcttttcaaaccggcgattcgctccagtacgtctttataattagtacgccagatgtttttcccatttacaagtcccgcaaacaggattttatccttcgggaaaccgtttgctgctacaagtgctgcggtctgctttccttccacaaagtcaaggccaatgccgtcaaagggcagttcacatagctgccggtaacaatcccgcacatcgccaaaataagtttggagcagcaccttcactgtgcctttttgttccagcagcgtttggtacagcttgcggaaaagggcaacatcccccattgttaaatccatgaccagatacggctcgtcaacttgcagccattccacgccgttttctccacaccgcttcaaaatatctgcataggcaaacagaatatcatctacaaaatcagtggcggatttattgccggtacagcgggccagcttcaaaaaggtaaacggtccggcgaccacgggctttgtctgaatgcccagagaacgcgcctgatgaaagccatccagaaaagcatctgagcggagcttcaactccatatcatcatccagctctggtaccatgtagtggtagttcgtattgaaccactttttcatggtaaatgctttgacatctccctgcgccccctgatacccacgggccatggcaaagtatgtgtctatatcggaaagcctcagatcggcataccgccttggaatggcgttcagcatataagcggtgtccagcatcccgtcataaagggaaaaatcattggacgggataaagccggcacctgcgtccctctggcgtgtccactgctccattctctgctgagagacaacccgtttcaactcatcggcatctatttcgctgcgaaaatacgcttctgttgcgaactttaattctcggtggatcccgatacgcggaaatccaataattgaatagtccataatgtgtcctccttgggtatgatcgttctttttcagtatacctgcgggaaagggttctgtaaaatacggaaaagcagcggtttgccatagattgaatctatagcagaccgctactttatgttctgtcattcctgtgcggaagcatatcgtttcagagcttcgatatacagagttccaaatttacccggtccgaccttgctgtgagtgatgtagccgatttccatgtaatcatccacagcaagggggacagcaacaatatttttcccatttagttcttcgttgataacgccgctgcaaatggtgtacccgttcagaccaatcaggagattgaacagcgtggcccggtcagaaaccataatgtctttcttgctttccaacgtacttaaaatttcctcagagaagtagaaggaattgtgttctccctgctcataggacaatctcggataggttgccagctcatccaattcaacaattttcttctttgccagaggactgaacgtactgacaaaaacgtgaggctttgcgataaataaacgatgaaatttcaaatcattttcccgcatggtcttgcgcaggacagcttcattgaaactattaaggtaaagcacacccacctcgcttcgcagctttgccacatcttcaatcaactcataggtctgcgtttcacggatgcggaagtcgtattcttcaccgccatactgtttcaaaagctcaacaaatgcttctaccgcaaaagaataatgctgcgtggacacacagaactgatgcttgacaggggtcttccctaagtatcgttcttcaatcagatttgtctgttcaatcacttgacgggcatatcctaaaaattcttctccctccgccgaaagcaggatgcctttattggtacgtttgaaaatagtaattcccagttcattttccagttccttgattgcggaagtcaggctgggctgggcgatataaagctgttttgccgcctcgctgatcgttccggccgcagcaaccgtcacaatgtatttcagttgtaaaagggtcattcgtcatcctcctgatctggatatggaattgccgcaaggatttctccatagcgttccgtaattacaccataattctcccgcagatggggaaacagacagcggctgcagtccttgtatccgttgggaaggtaggcaaactttccgccgcagcgatctcccaatacatacagagggcaatagcagaataggcaattaaaattttccgggtcggcacccttatggcaggggaaatattcacattcccggttgcagaaataagcatagtgcttattttcccaatactgattacgcatgaaaagactccttgcaaaaaagggatttattttatacataggaaccgtaagaaaaaagcgcatccaaacagacacgctcaacaaagcacagcttcctgcgcctaaaaaacgtgcttccggttccggcagaagcaccatacgctcccacgtatctgacttacctttccctcaggaaagtttcacagtgatcgactcgccgggacttgcacccgattccatgttccgtctttgcggatggagcgatatgatgattcaattttcatctatcattataatccaaacacataacgttgtcacgtgctgctttatgcgtaagtgccaaattctcaaagtaatttgaattcatcacttgacattgtggcaaagaacttttgacccccgatgaagtacgccttttggataaccggaaggcagtgcttctggtgcgtggagaacgccccattctggatgagaaatatgatctgcataaacatgtgaatgtgaaatatacggaggatggaggggcgccgccttatgattatgcgaaggctcccctgtcccatgaagatgtaaccattgataccaggagactggatgattatgaactgctctcggctggggagatcctcggcagggagcagtctttttgattggaggaatgccattgaagaaaagaaatgaaatgccaaagagacagacagcaaaccatgctactgcaccgatgcctatgggcagaggaccaaagcgtacccttgccgcgtatgcagcgctggtgcttactatgacggtaggtggtatcccggtgcttgcagccggagatcccctgtcagtcatcaataacctgtccacctttatcttctccctgatccgggccatcggcttgatcttactgggatttggtgtggtgcaggtaggtttgagcttaaagagccatgatcccagccagagagccaacgggtttctgacgctggcaggcggtgtcatcatcacctttgcaaaagagatcctggacctgatcgttgggtagtgggtagagacagaagcgggcagggaggacatcttcctgccccggcaaaggaggtgagactgtttgagtgataactggatcgtgcagaacctaaactctgcactgaacacctggaatgagaagctggcagaaatctggacgctccttacccaaagcccggaatcctttaagggcgggacgatctggagtgtcatcaccgggatcaacggggcgctgactgccattggatatggacttttggtactgttttttgcagccgggatcgtaaagacctgtggcagctttacagacatgaaaaagccggaacatgccctcaaagcctttatccggtttgcactggcacaaggcgccatcatgtatggcatggaattgatgaccgccctgttttccattgtacaggggatcgtatcgaccatcatggcacagtcgggaatggcagacgggggtgtgacagagcttccggcagagatcgtggaaaagatcgaagcggtagggatgctggaatccatccccttgtggatcgtgacgctgctgggaagccttttgatcacagtgctgtcttttatcatgatccttacggtatatggaaggatgttcaagctgtatatgtatactgccattgcgcccatccccatttccacctttgcgggagaaccctcccagtcggtggggaagaacttcatcaagtcctatgcaggggtgtgtctggaaggggcgatcattgcactggcctgtatcattttctccgtctattctgccagtccgccagccattggggatacgtccttaagtgcagtgaccattgtgtggaactatgtaggggaattggtattcaacctgctggtgctggtgggtgcggtgaaagcatctgaccggatcgtaaaagagatgatgggattgtaggaggaaagaaccatgcgtaaagaaatatatgaaaatcaggaaagcagcgatacactgcctttccattgggaatttggtaaggaagagatcaccctgaaagtgtccagctatgcctatggaaatgggcttgcggttttgatgtatagtcaaagtgaaggggagctggaattatttagtgacttgacggtcaatcttccgggcgggtatggactgaaaacgcaggaggcatttgtaagcggtgattttaccagggataagctggccttcattcaagagaacaggctgggaaaggtgctgccaggacaagcccgttcaggatttgccacctacaccccggtggcatttgatctttcaagactctcccggtatgaccgggaaggggtggaagaattttgcagacaatgggggttggacattccaaaagaacaggaaaaagtccaagggagatcgacaggaaaaaagaaaagagaaagagagagatagaagtatatggaagtaaaaatgaacaaagagatccgcaactatcaggagtccatgtttatgggactgaacctgcgccagtgtattttctccctgcttgccatcgctgtggcggtagggatttattttggcctgggaaagtatgtgggacaggagatgaccgggtggctgtgcatcttaggggctgccccattcgcagcctgtggtttcttccagtaccatggcatgaatgcggagcagtttgcttgggcgtatatcaagtctgaatttttataccccaagcgcctgctgtttcaaagtgaggacctgtaccatgcctgcatggaagaaacgctggccttgggagaaaagtctcaaggggatggcgcagcccttatgaaaaaaagagaacagcgggcaaagaagaaacggatgaaacagaaaaagaaaacgggaaggagtggtgcgtttgattaaaaccttacaacaggcattgaaaatggaccgggagaagttcaaagtcccaaggtctgtccaacaggccatcccgatccagcggatctggccggatggggtattccagtccgggacaaaattttccaagaccttccggttttccgatatcaactatgctatcgcaagcaaagaggataagacggaaatgttcttggattatagtgagctgttaaatgccttagattccggtgcggcggcaaagatcactttaaataacagaagaatcaataaagaagagtttgaagcatccctgcttctgccgatgaaagaggacgggttggatgaataccgaaaggaatacaacgaaatgctgctatccaaggttagcggcaccaacaacagcatctatcaggaacggtatctgacggtcagtgtccataaaaagaacatcgatgaggcaaggacttattttgcacgtgtgggaacggatatcatcacccatctgagcaagctgtcttccattggggaagaactggatgcggaacagaggttacagatcttccgggatttcttccgggcagatgaaccccagtgctttcctttcgatatgaaggcatttgccaaaaaggggagcagcttcaaggattggatctgtccccagtccatggagttttccaaagactgcttcaagatcaatgaacggttcgggcgagtgctgtatatgcaggattatgccagttatgtcaaggatgacatgatctcggagctgtgcgatctaagccgggacttgatgctgtccatcgatatcctcccggtacccacagacgaagcggtgcgtgagatccagaaccgtctgcttggcgtggagaccaatgtgaccaactggcagagacgccagaatgccaacaataacttttctgccattgtgccttatgatatggaactgcaaagaaaggaaaccaaagagatgctggatgacctgaccaccagggaccagcggatgatgttcggcatcctcaccatggtacatatggcagacagcaagaaacagttggattcggatacggagagcatcctgtcggtggcaagaaagcacttgtgtcagatggcaaccttgaaatggcagcaagtggatggactcaatacggtactgccttatggcatccgcaagatcaatgcccttcgtaccctgaccacagagtctaccgcagtgctgatccctttccatactcaggagatcatgcagccgggcggtatttattatgggcagaatgcggtgagcaaaaatatgctggtggcagaccggaggaagttattgaatggaaactctttccgattgggtgtcagcggttcaggaaagagtttctcagcaaaagaagagatcgtggaccttgccctatctacggaagatgacattctcattttagatccggagtcggaattcggttctttggtggaagcgctgaacggggaagtgatctccatttctgcaacgtcccatacccatctgaacgcactggatatggattctgcctatggaaacgataagaatccactgatcgagaagtcggaatttatcctgtctttgtttgagcaattagtaggggcaggaaatctgtccgccaaggaaaaatccatcctggaccgctgtaccgcagatgtgtaccgggaatatatccgaagcggctaccaaagcgaagtaccgaccttgaaagatctgtaccgacagctaatgctccagccggaagaggaagccaggggacttgccttgtcttcggaattgttcatcaatggaagcctgaacaccttcgcccagaaaaccaatgtaaatacgaagaatcgcattattgcctatgatatccgggaactgggagagcagctcatgcccctggggatgctggtcaccttggacagcatcttcaaccgggtgatccaaaactggaagaaaggaaagactacctggatctttgccgatgagttttatctgttgttccgctatcagtacagtgcggactttttctaccggctctacaagaggattcgtaaataccatgggtttgtcacaggtttaacgcagaacgtagaggaacttttgaagtcggatacggcaagactgatgctggcaaacagtgagtttttgatccttttaaaccaggcgaccacagaccgggatgaactggccgtccttttgaacatttccgagaaccagttatcctatatcaccaatgtaggcgcagggaaaggtttgatccgctgttccggaaatcttgtgccatttgagaacagcttcccgaagaacacgaagctgtaccgcttgatgacgacaaaaccaggggaatgctagtaaaaaagatatttttgtgtggtgctgctgaacgttcttcggcagcatccttttgggaaggagggaatgtagatggaagaaaaaagcgtagagattccaaaaataaaaggaccgcttcgggagcaggacagtatccgggcgttgctggagcttttggaacaacagggcatggagcaggaaaaaggggatgtgatccgcatggcagatcatattgattccatggaaatgcagctcggaaccgtcttgaaggaactgggagaggtgaagaagcaactgggcgtgatgcaggaaagcaaggttaagctctttgcagtgaatacgatccagaaagcagaacatcaggtgaaaacacttcgctttcaagtgggagaatggaaacgaaagtttgtggaacgggcagaacaggcggtgtttgattttaaagaaaagggaaaagatgcccttgcttctgcggtaaagggcatgcactttacccaaggcttgcaaaagctgcagtcttccctacatacggtcatgctgtcgatggatcagaagattgaccgtatggggagcatggcggaggaactgcacgttgccaaagggcatctgaaaaacgcatttttggaaatgaacggaaaagataccgcaaagatcacagagcgcaatccggaacaggggatcatctttcaaacccagaaggtgttattccaatccatgcggagcatccataagctggaacagaaaacggaacgattgcagcagcagatcgggaagctggaagaaagacaaggaaaacaggcatctttaaaagataccttgcaggagcttcggcaggaaacagcacctcgtcagcttggaaaagaagaaaaacagaaggcagcgatccggtaaaggggaggtgaaagctatgaaagaagaaacaaccattacctttcttgcttcggag

SEQ ID NO: 7705 - DNA, 1153 bp, Unknown
  gut microbiota DNA sequence
aaaagcaccctaagggagctctattaaagttacccttttttaccaccgatatgaaaaagaaattttttgctaatttatggttgacttttcatagctggtctcttttctcaaaactttttcatgcttatcaaaatattgagatgccagggtcaaaaggtctaagcccacatgagcttgctcataggtgggtgaaagaccttagaacccgccctgctatgagcataaaagtgggatgataatcccacgatatgcgaatattgggtaggattgtgggagtgcgtagcacggagcaatccgtaggcatcaaagtcgggggcttttgaccccgacatcattttatttcattacaggtcgttcttatggcttcatcctctcccatgccataactgctgcctcctccgatatcgtacaatgcatctcatatagcggaagtctttctgccatctgtttaatcatcgaaagtgtctttaacatcttgtccttttcaccgggacggtaagtctgcttatacagatccggatatccatctattgcagaaatttttctgatcatattttcttctcctcttctcaaaatacagatcccctgcaccggcacttccacgtttgtctgcaatccatgcttcccgcaccacggagttccacatacataaattccatcatcttttatccgaagaatcggtttatcgtcattaaccatcactgccctgccgccgaaatgctgtctccacatccttgtatgcgtggattttcctgttccgcttgcagccgtaaacaagtatgcttttccatccacagcaacagcagagcaatgaaacaggacacaatttctgtccagtattttttcacacaattttctgtaaattgccaatgactcaataattccttttgatgcccccggttcacttttctttttttctctttcaacttcctcgtctgtaacttcaattacaaaatctggtttgccctctgccttcacttcataatcccggcatattatttctgtataattttctgtaaatgcaatttcaatttccgcatctgcaatccgatatctttttctttttccatcattcaccgttccaaaataccatttttttcaagggtttctgtaaaacttcttatatcttttcgtgctgttgcactgtcaatat

SEQ ID NO: 7706 - DNA, 220 bp, Unknown
  gut microbiota DNA sequence
gtcatttatacaacaaatgccattgaatctctgaattccacttatcggaagctgaaccgtcagagaagcgtctttccaagcgatacagcccttttaaaagccctttatctggctacctttgaagctacaaaaaaatggactgcaacaatccggaactgggctcaggtttatggagagttaagtatcatgtatgaaggtcgcttgccagagtaataaaaaa

SEQ ID NO: 7707 - DNA, 5064 bp, Unknown
  gut microbiota DNA sequence
atgaagaaactgcgtacaagcggacatataacggtatctccggaaggatatattaatttaactgaatctggaaaagaaatagctacacagatttatgaacgccatgttcttctttcttcctggctagaacgtcttggtgttgatccggatattgccgcacaagatgcatgcaggatagaacatgtcattagttctgaaagttttgaagccctcaaaaagcatatcaaataactctcttctcactataaattgaatggcattttaaaaccgggaatttcatactttcccggtttctaaaatcttttcattttccatatttagtattgcattattgatttttatcgtgcttcttatatcgaatatgcccaacaatacctgcagcaaagaagagtattgcggctaaaagttgcatgcttaccacaaaatcaaccccatcttttctgaaactgtcaaaaaagttagtcagccatattactgcgcctacaaaccacaataaataccatcgttttcttttgcttttcataacttttttaccaccacacaaatccaacctttttttgttttatctacttttactcctctaaaaccggcatcctccaaagatttttctatttgctcagaattgtaaatcttcatcccctgtattatcttcgtccacttttcatcctttggattttcaccgtttgattcattgcagatcataaacgttccgccgattttcaaaattttatataccttcttaaaagcctcactaatatccggccagaaatatattgtttcaaatgcagtaattacatcgaaagtttcacctctgaaagggagtttcatgacatccccctgcaggatttcacaacgcttactttctatccctgctttattgatttttttgcttttttctacactgatttctgaatgatcaatgccaaccactctgccatacggacttttttctaataactttctgacatttgccccaccgccacatccaatatccagacatacattatcgctttgaatttccatatgtgtaaatccccattcagccatagatgaatgaccagtattcatcatatgaaccataattttgccgccgattccttttggcttacaagtattttgaaaaaaagacataacctatacctctatcaactcaccaaaacaatatctattcttaatatataaaaaaatttcgctacatacagatacttccaagaatctcctgtaacgcatttttgctacttgaatggcatctcactacatccgcattgcagcgttccgcctcctccactgcacacctggccatcttatgggaaaccgtattcgtgaacagtacaatcaaatctggattcccaatctgtttacttaaagttgcagacatctgtgtaaagactttcgctttacaattaaaacttttacaaacttttttgtactgacagaccattctatcatgcccgcctataataacaacactcatacccaacctcccatttttaatatattcataaaacgctccgatagcagatatctacaaaatcatccgttcttgatcatcggttgcgttctaaatcgtattatgggaacgctgctattaactgattaaaatcttttctcgcagcattccccaatatttattaatccagattttcacccaacgctttgcaggattgaatcccctcatcatcgggcatttcattgcagatcacgctttcacaaatcaagacagctcccgcctctttgcatcttgtctcccagtctctcatccactctccatctccccagccataagagccaaacagtgcaattctttttcctgaaagttttgattcacaagaagcaaacatcggttcaaattcctcttcttccaatacttctgctcccattgccgggcatccaaaagcgatcgcatcataagaatccatcatagaaacatcaaattcatccggagttaataatacaacctctgcccccttctccttcgcgccctccagtactgcctttgccatggcttctgtatttcctgtgccactccaataaactactgcaattttactcatgatttttaccttcctttctgaagtttgtgattatatagtaatcgtaagctgttcaacagccacgccacttttccatctcctgcaataaatttctgtgcattttttatattttttaaacagaatcctcgcggcctgttcatccccgtacaccttccaacacccagaacatttgctgcaggccgccttattctcaataaatccttttacatcctctgccggataccctaagaataaacctatttcatgcggaaagtctgggtcactctgcagtttttgaatcagtctgcagatgcactgtgatagattcgtacaatcatatcccttacatttcaatatgatctgagttttctcatcagaaaaatcttcttttaacttttctggacgatagacataaaccagcatccgtttgtctgatatgcgaaccgggataatccggatccctttctgtgtcagtttttgattaaattcacgtatttcttttataatcatcttttgtgaactataagggcatgaaaaaagacttcccgttttcagtcctgctaacgtaggtgaacaatggcatactaacatttcctctgacattttctttcacttctccttaaacatcttttctgaaaatgaatctactctacccagtaagttttctttatcaatagttagttttaactaattcatgtgaaaaaaatatgcacaccttgctttcattaaaaacatcagatgtacgtttctataattttataaacctatcccattatctaaacataagccgttttttaattagctttaactaactttagtttactttattttttcactgttgtcaatccataaatagatgtgattaataaataatatttactaacctgattatacacccgttttttcgttgtaactattcctgtttatatttgaaagttcattgtaactcaattctcactcaatcccggctcaatgccattcccccttcttttcaataaactaatcctgtgcgaaacatccgcacaaaagattatcggaaaggaggatttttatgaaaacacaaagaggaagtcctgttacagatgaaaaatactgcaatagataagtgttcgtcatctgaggggaggtgagtgcatgacaacctttcttactgcaaacagtactctaccgccatatatggcatttcccagttttcttctggactgtgatttctccgaaaccacaaaactgctctatatggtgcttttaaaccgggcaagattatcacaaaaaaatgacggctggattgataaaaaaggtcatgtgttctcctatttcaccattgaagatatggcagcaacacttcgcaaaagccagacaaccatcaaaacatctctgagtgctttggaacaagtagaccttatctgtcgtgctcgtcagggaaccgggaatcccaaccggatttatgtaaaagtcccggctgatttttcaacacagacagaagaaaaactgtctgttagacagtcagaaaaccgtccctttgacagacagaattctgtccgccagacagtcagaaaactgtcccctaataataaagagaagaaaaataatgattcagtaaaacgccattatgaatgtaaggaggatgaaagcctatgataaaaccacaaaacctactgccgaacctttctccccggcagcctttagaagatgaatatatcagcgaaacggacggtctgatctactgttccaagtgccacaccccacggcagaaaaagatagaatttttaggaaaaatcatgtttccgatcatccgctgccaatgccagcaggaacaatatgaaaaagaagaagcaaaacgaaaacaccaggaatttctagaacacatctcccggctgaaatccagcggtctgcaagacccggctttaagagaattcacttttgctcacgataacggtatcaacccggaaattgaaaaggcaaaaaattatgttactcactgggaggaaataaaatccaaggccatggggctgctgctctggggtgatgtcggcactgggaaatccttttttgcaggctgtgttgcaaacgctctgctagataaaggggttcccgtactcatgacgaacttcgccaaaatcttaaattctctgaccggaatatatccgcaggatcggaatgaatttatcaatagtttaaatcagtacagcctgctgatcattgatgatttgggtgtggaacgaaattccgaatttgctttagaacaggtcttccatgtaatcgacagccgttaccgcagtatgaaacctatgatcattacaacaaatctgacgttggaagaattaaaacatccggaagatttagcacacagcaggatctatgaccggattctggagcgttgtgtcccactaaagatcaacaaccagaatatccgggaactgaacgctgtagctaatatgtcagaagcccgaaaactacttgcttaaaaatctgaccggaaacggtcatagaagaaaggaggccaatatgacagataaaaaaacacaaacagaaatcagaaaagaattattacaggcaagacacagagcagaggaagcacaggcacggaaccgtgtgaaagagcgaaatgcccggacacgcaggctgattcaggagggtgccgttttggagagcatcttcccggaattccagacaatggagccgtcgcagatcagacaggaattgttaaaccgtttcaaaagaatctgacactagttgacaccagcaatttctcatcccgaagggcgcacttactcaccacctgataaatcaggcagtggtatccccttcggggctcgtgcgctctgccgagggctttatccgctgttgcaggcaacatcgaaaggaggtgccagatatggcaatttatcatatgcaagccaaagtcgtcagccgcggttccggtcggtctgctgttgctgcttctgcttatatgagctgtagccgcatgtacaatgattatgacggcatccagcatgactataccagaaagcaggggctgatctatcaggag

SEQ ID NO: 7708 - DNA, 2210 bp, Unknown
  gut microbiota DNA sequence
gatcatatttacagacttttcttcatagtctcaaggaaattggaagaggaaattatttgtaggaagttctttttttgcatttataattacgattgaaggaattgttgcattgagtataggatatttttttcatattgaggcatccgaaatgccgaaattggacagtgatattacgcagtttttccaacgctttcttacagaactgcgactgatcctcgtgcttgtcctatattttttcagcaggcgcaagaaaaatgcgccggagagaaaggtacagaaaagctttttgattattccgatattaagcgctgttttgattatttatcttcatgaggcgcagattatgaggaattcgattgatctgatttttagttggatagtgacaattatcgtcatcgtgatcaatattatcacttatattcttttccgaaaacaggagcaatatcatatcgcagaaggggagatgaaaaatcagttaaaagaatatgaatatcaaaagcttcattacgaacaggtcgagcagcatcagcaggaaatccgaaagattcggcatgatatgaaaaatcagatcgcaggaatatacggatatcttgaaaaaggagaaattgaagagggaaagcgggaagtttgcagtatcttgaatcaattagaaaaggcagagcagaaattatttactgcgaacgcagttgtgaacggaatcttgaatatgaagtatgtagagattgaagcaaagcagattgaagcaaagttagatgtaaaattgccggagatactgggaattacaggaacggatttaggagtgttgttcggaaatatattggataatgcaatcgaagcatgcgagtcttgcaaaaaagaaaaatggatcgacttgtttgcagtatacgaaaatcatggaattgtcatttgttgtaaaaattcatgcagtgaaacagtaatggatcttcacacgagaaaatctgataagcgtaatcatggctttggtctgtctagcgtaaaacaaattgtagaaaaatacaatggagacgtctggtgggagtcagaaaaagaaagttttacattgaatataaatttatgggaaaaaattgaaaaatagtatatacgagaaatacagcagtatcctaagagggtatttgctgtattttttgtataggtgacgatacaagtctggaggtgtcaaagaccttaacggttgtgtacaattctgaaatgtgccttttgcgctttcagtgatctggcttgtgatgaatttttataaaatttagaatgactgttttttaagttgttttttgccgatcggatcaaaacgaaagaaatatagaaacaaatatcatgttaaagtgcgagttgttacaataaactatgcattttgttacatgttggaaaaattcaaagaaaaatagtgtataatcagaaacataaaaaatcagtcaaacaaaagagggaagaggggaaatgatgtggaaaatgattcataaaagatggttaagccttttggtatttggcgcggatatggttacaagatttgctgcaagtaacaagtgtatatggtatctttatcaagaagaaattccgaaagatgcagtgaaattgaaaaaatgaaaaacaaaagagaagatcggtttgaagcaatcgtcgatcagtttgtaaaaaatgatctgattgcacaagaggagtattcttattatttatatggggtgaaacatttagaagttttaatcatgacaacaggcggagtattattgagtggcatattgttaaaggagatattgtttacagtcgtatttctaattacattttcactattaagaatcggatggcaagggatacatgcgaaaacgaaaataagatgtttctgttattcgttactgttatttttaagtggaatctatgtaaaaaaacaggtagttcgttcgattgatctttttagtcaggcagtgtttatgggaagtatgttgataattttgcttttgactgcattgtggaagtataaaatcgacgggaaattaaatgagttaaaaagatgtttttggatattaggcggtgtcagtttagcgatagtgcttgacatttttgtaaaaagtgaggctgttatgtgtgggattggatattcttgtttcgcaatgattttgctttggtttattagtatggtgaggacaaaggaatgaaaaagagaagaattataatagcagttataagtattattgtag

SEQ ID NO: 7709 - DNA, 352 bp, Unknown
  gut microbiota DNA sequence
gtctctgttatctctttattcagactgtccgaatgccttcggcatcagaattatttttcctgatttcttcttctgaatccgaatacgaacgctgccgctgcaaggagtaatgttcccgcatatacaaacaggtttgagctgtcgcctgtctgcactgccgaatttcctgtgccgctgcctcctgtacttccatttccgcctgcgtttccactaccgtttccgcttccgcctgtgcttccactgccgtttccgtttccgcctgtgcttccatttccgtttccttcaccgtttccatcgccgcttccgccgtcgaccggtttcagattctggattgccgtattcaatgcaagcg

SEQ ID NO: 7710 - DNA, 1902 bp, Unknown
  gut microbiota DNA sequence
cctttcttaaatgtttaggtttggtagcttaaagcataacacagaaaaggtatttccgctttttaattattcagttgtaacacatgtattgtaatcctacagaaaacgtttggaaaaaactaaaaaagtagttgaaatttacattaaagtaagatataataattaaggttcgtattagtacgaatcttaatgccggaatagctcagcaggtagagcacttcactcgtaatgaaggggtcgtcagttcaagtctgatttccggcttaataaaaacgcagttccgttttttcggaactgcgtttttttatggcgctcgccgcgttccggaaagtgtctttcggcgctttatgtggctgcgttttccggttgaaaattaaaaagtttgtttacttttaaaatacagagaaatcgtatataataaagtgaaaataaaaaagatcataaaataataaagaaggggactgccttatggaaagaaaaaatatctggaatttatacagcgatgaacagatttcggaactaaaggaaatcaatgacaagtacaagcgttgcctggatgccggaaagacagagcgggagtgcgtagaacttagcgtaaatatggcaagagatgcaggttaccgggatcttgaagaaatattaagatcaggagaaacgctgaaagcgggagataaagtatacgcagtcaatatgaataagatgcttgctttatttagaatcggtgagagaccgatttctgagggaatgaatattcttggagcacatattgattcgccgcgtattgacgtgaaacaaaatcctctctatgaaaatgaagaacttgcttatcttgatactcattattatggcggtataaaaaaatatcaatgggtggcacagccgctcgcactgcacggcgtcatcgtcaaaaagaacggagaaactgtgaaggtatccatcggagaagatgaaaatgatcctgtatttgtcatcacagatctgcttgttcatctcgcccaggaacagttggaaaagaaagcgtcgcaggtgatcgaaggcgagaaattagatcttttgatcggaaaccgtccgatagagaaagcggacgatctcaagaaagaagaaaaagacgctgtaaaacaaaatgtgctcaatattttaaaagagatgtacggtatcgatgaagaagatttttattcggcggagctggagatcgttccggcaggaaaagcccgtgactgcggacttgacagaagtatgaatctttcttacggacaggacgaccgtgtgtgcgcgtttacgtctttatttgcgatgctggatgtgacggaagcgaaaaaaacaggatgctgtctgcttgtagataaagaagagatcggaagtgtgggagctacgggaatgcattcccggttttttgaaaatacagttgccgagctgattgccgtgacagaaggtgaatccgaattaaaagtccgccgggctttgagtaattcaaaaatgctttcgtcagatgtaagcgctgcgtttgatccgatgtttgcagaagcttttgaaaaacgcagttccgcattttttgcaaatggaattacgtttaataaatttacaggcagcagaggaaaatcaggttctaacgatgcaaacggcgaatatattgcggctcttcgcagaacgatggacgaggcgcaggtggcataccagtttgcggagcttggaagagtcgaccttggcggaggcggaacgatcgcttatattatggccaattatggaatggaagtgatcgacagcggagtggctgtactgaacatgcatgctccttatgaagtatcaagcaaagccgatgtgtatgaggctgtgaaaggatatagagcattcctgcgtatggaataatcgaacaaatacacgggaatatatttttagaatata

SEQ ID NO: 7711 - DNA, 859 bp, Unknown
  gut microbiota DNA sequence
tttttaactaagggaaaccggatggtactattttaacactacagtaaaatattatcctaaaaacactacctacaaaggacaaatcacatatttattaacctgtccagatggaattcctatggcctactcaaactcagcaaccataccattagcaacaaaataattttgtgatcacccttaaaaatttaaaattgctattaaaaagcaaagaaatggagtcaattatgaaaaaacgaatactaatagctacatcattacttgttattttaatcataggatcaatatctgtatatgccacatcatttgagtccaatattgatatcatggaaaaagtcggacagttatttaaatctcataaggaaaaaagtgataattctatttttgcaaaagggaaatcaggtggaattattacaaaagacgatattgaacaggctaccgaattttacattttagccggatataccgaatctactgctcgcgaaaaagcaattaaatatatgttagaacgtgatgctacatatcaaaaggcaatttcagaaggctattctgtaaccgatgaggaagtttgggcatatttggatgaattaaaagagatcataaacggagcaacaaataaagacgaagcacaagctttaattaatcagttcgattctgaagaagaatattggcaacacgaatttgaagtttataaaatcaatctaccgattgagaaatatttaaactccgtaaaacaagattacttaaataacgctgcaaccgagaatgtgaaactttttctgtaaataatgttttagaaggtcttctatggtaaaatattttatcataaggaggccttttattatggcaagagaaaagaaac

SEQ ID NO: 7712 - DNA, 53170 bp, Unknown
  gut microbiota DNA sequence
caccatcttttacgatataggcatctgacaggcgcaattctttttccttttcccacttttcttttccgttatagaatgtgtaaaattccggtgtcggaaggggaacgattttctttttatatcggcttctcggtggcacgagtctttcatatgcacgcccgatgtaaagcagactccgaaggggcatgttttcgttgaccgtagactgatgctcgccgaatacgatcacttttcctcctgcgtcaaaagaaatatcgttttgaaaattcatatagatcgtattgtctacacggaatttccgaatcttcgttccttccggcaacggctcatcatggattgcattaaaaagcgcgatctcattcgcttctgctgattcgtcctcatagaacagatctacaaagacactgtttttaatttctctgttttcttttcctgccataggctctcctttcatgtgcatgaataagtcctgcagtacaggcgggaaaatacttttaagcttactgttttcaaacttgctgttttcaaacttgccgctttcaaacttgctgcttttaggtttgcttttgccaaaagtttttcctctgaaaaagaaaactttttctcttttttaagaccttctcttaaaaatcagtatacgaaaaaaagaactgttctacaagactatccacgcaaaaactgttgttgtattgtatcgggtaatttcgagggaattcctcagaccggcgaagctgccggtatcttccacagaaagaatttctgtaagtagagttactatagcatacatgtcatttaaaaacaatgccttactttacgaaatgcaaaaagagaaaccgattgcgcctcgcatttggtctctctttttatcatcctatttttcgctgtaatgatgagtttcttccaacatcatatctttcactttcattaagcgaatctgtgtacttctttcattctcatccagcttcatcgtaatatattttatactttgttccgtctccggaatgatcacatgctcaagtgcattgacacggcgtctcgtcttctcgatctccgccgccataagctggcaggctttctcacattcagcaagacggatcatatccggaagaacatctgcaagcgattttactgctccgtccaagtctcctgacgtaaaagcaaaaccataagaataaatatcattttcatccgccgttcttgttttatactgaaatgtcggaatatccacgctcatgacgtttttttctccggcttccagattcacttcctgcttcggagccataagcgccgtattcagagccgcctctgacatgcctgcttttgcgattacgaagtttttatttgcagagcggattcccgcttctacttttttacgaacttccatgttttcccgcacgagatcaaggtactgacgcatcagctcgtcacgtttatctttcaaaagcttatgaccacgaatcgccgtgatccgcttctttttaagccgcgtcagctccattctggtcggattcacttgttttgccgccaaaattctacctccttttcctgctgccgcagatgatcgcagcatgcttcctctcagttttttgaagatatttctccactttcttttgcgcgctgtatctctgcggctgatttgtaagtatcgcagattgccttgcggcaactatgatacattctcttactctgcgtaatactgatctaaatatttatcatcaatacgtttcaattcggttctcggcagcattctaagcaatttccatccgatatcaagagtttcttcaatacttctgtctgcgttatatccctgcgatacatattccgcttcaaaagcgtccgcaaatttggcgtacatcaagtcgatctctgtcaacgctgcttcacccagaatgaccatcagctcttttgcatcttttcctcgtgcataagctgagaaaagctggttcatcgtattcgagtgatcggctcttgttttgccttctccgattcctttgtctttcagacgggaaagggacggaagaacatcgatcggaggcgtgactccttttctgtaaagatcacggctcaagatgatctgaccttccgtaatataccctgtcaagtcaggaatcgggtgtgttttatcatcttccggcatcgtcagaatcgggatcatcgtaatacttccgttcttaccgttttgtcttcctgctctttcataaatagaagccaaatctgtatacatatatcccggatatccgcggcgtcccggaacttccttacgagcagccgacacttcacggagagcatccgcataatttgtaatgtctgtcagaataacgagtacatgcatctctttttcaaaggcaagatactctgctgctgtaagcgccatcttcggagttgcgatacgttcgatcgccggatcatttgcaaggttaataaacaaaactgttctgtcaagcgctcctgtctcgcggaaactttccacgaagaagttcgactcttcaaacgtaatacccatagcggcaaacactacggcaaagttttcatctgttccaagcaccttagcctgtcttgcgatctgagccgcaagctgcgcgtgaggcagccctgacgccgagaagatcggcagtttctgaccgcggacaagtgtattcagtccgtcaatagcggaaactcctgtctggataaactcttccggatagcatctggccgccggattcatcggcagtccgttaatatccatacgggcatccggcaaaatttccgggccatcgtcaatcggtcttccgagaccgtcaaatactcttccaagcatatcttccgacacgccaagctccatgcttcttccaagaaaacggactttactgttggaaaggttgattcccgtcgcgctctcgaacaactggacgagcacgtcgcttccgttgacttccaacactttacatcttcttgtttctccgcttgcaagctcgatttctccgagctcatcataagtcacgccttctacgccgcgcacaagcatcagcggtccggctacttcctgtatggttctatactctttcggcatttagcggtcctcctttacaaatgcatttgcaatctgagcgcttaattcctcgtctactttcacaaattccgcatctaatgcatcttctttcacatatttaaaacgtccgatctgctcacgaaccggcatagagatcagtttccggagagacgctccttcgccaagcgcggcaacagatctttcataaaatgcatttactaatctcatcatcatgtgctgtttcttcagagaggtatacgtatctacttcatggaatgagttctgatgaaggaagtcctctcgaatcgatctggctgcttccattttcaggcggtctgtcggagaaagtgcatccattccgaccatttttacaatttcttccagctctgcctcttcctggagaagtgtcatcattttctgacgtccttccatccagtcttccgccacatttccgttaaaccatttttccatatcgtcaagatacagagaataactgttcagccagttgatcgccgggaagtgtctcttatacgcaagagctgagtcaagaccccagaatacttttacgatacgaagcgttgcctgcgataccggctcggacgtatcgccacccggaggcgatactgcgccgattacggaaagcgctccttcccttccgtcttttccgagagagatcacatgtcctgcacgctcataaaactgtgccagacggcttcccagataagccggatatccttcctcgcccggcatctcttcaagacgtcccgacatctctcgaagcgcctctgcccaacgagatgtagaatctgccatcagcgctacagaataacccatgtcacggaaatactccgcgatcgtaattcccgtataaatcgacgcttcacgggcagcaaccggcatatcagacgtattggcgatcagaactgttctttgcatcagcgcctgacctgtcttcgggtctttcaattccggaaactcgttcaaaacgtctgtcatctcatttccacgctctccgcatccgatatacacaacgatatctgcttccgcccattttgcaagctgatgctggatcactgtcttaccgcttccgaacggtcccggcactgctgccacaccgccttttgcaatcgggaaaaacgtatcgatcactcgctgtcctgttacaagcggcatctttggcggaagtttctttttatacggacgtccacggcgaaccggccatttctgcatcaatgtcagttctctgtctccgttttccgtctcaacgacagccacaacttcttctactgtaaactctcctgccttgatttctttaattgttccctttactccataaggaaccatgatcttctgctgcacgagaaccgtctcctgcactgttccgatcacgtctcccgtctcgacttcatctccgacttttgcagtcggaacaaattcccatttcaggtttcgtttcaaagacggaacttctacgccgcgctttaagctgtttcccgatactttcataatatcgtccaacggtctttgtattccgtcatatatacttgtaatcagtcccggtccgagttctacggacatcggcacttccattgactctaccggctctcccggtccaagtcccgaagtctcttcatatacctgaatcgaagcttcatctccgtgcatctcgataatctctccgatcagacgctgattcgacacgcggactacgtcaaacatatttgcatcgcgcattccctctgcaataacaagtggtcctgcgactttcttaatcactcctgtgctcattagcttactcctccaaacagaatatccgaaccgaccgcctgttccacggtcttctttacaccgtttactcccgctcccgtattgcctgacacgcccggtatctgaataattgccggaagcgtattttcacggtactgctctatctcttcttcgatctgtgcagccacggcttcggtaatatatataatcccgtactgaccgtctgcaagctgttttaatttttttctggcatcttcccgggtctttacagggcagatgctaagacctaatgtggcgaatccgtaaatgctgtcgtaatcgccgatgactgctatcttatacatacatctcccttatcctttccctgatcgcctcgtccgaaaaaccgttctgttttcctgtcagtataatccgtacggtcttgatctccgtctctcttgcgatcaaatatccaagcagaggtcctaccgaaaacgcctcgtacttctgcggcttcaacatctcgatcatacggttgtcgcaccaccgttcaaacgcggaggctgactctcgaagcgcctgtgcgccttttgcatacgctgttccctccagatactgtgcgatctcatcttctccggcaagagccgcgcggatgagctgttcaacattcaccccatcacactccgccatagcgcttcgcatgaaatcagcgctttttcccgttttccgggaacgcacggcaatcttgatatccgcaatagcaaccattgtatctgcataattttcaatgatcggttcaccggattcttttcccgctttgcgaatagcttcaagcgccgccttatcaatcataatatcgcacaactgaccgtctcttgtatgaagaagcgtttcaagagcttcctgcgcaacatttcccatatgagacggcaaacgcgaaaactctctgttctccacgatccgaagcatctcttctcccggtatcgggcagtcatcataaaaaatattcggattacgcgcttccgtacaaacctctttgatcgcagctttcagattatgatacaacttcggataagagagaacattaaatacgctcgcatcaggagcgacctctttgatcacttcccatgttttctcttcttcacgccgcaggacgacatcaggatcatcctgatccgccatatcaccccagcctttctcgacaacaaactgcagcgcttccgccgccgttttacaggacaaaagctgctcgatgactgcatcagagaacagggcgacttccagcgcacgtatacgtgcgactgcgtaagtatattttgtattccccaattctaaacctccttatgctgtaacaatccgccgcattaaaaatgcggattgttatgctcattgcagatcactgtttacgaaaagagctgtctcttcactacatctgccagttcttctcttttcgcatcaaaaactgcttttatcgtacaattttcttcgatgccgccatatacaaggataaatcctccgtcaatctttctcgcctcttcggaaatcacaagttttccgccttttgcctttgccgatgcatcgattttctctgcaaatgacttcggcatcctgtcgagatctcttttagagaagcaaattgctccatcctgggcaagcatatatttatcaagcatttttccaagcatttcaaaatatgccgcgtcatccatgttcatcacctgactgtacgcatcctcaagcacactgcggatcacatcctgttttgccgccaaaagagcctgttttctgttcatatcagccgacgattccgcccgttttgcatattctttcgcgtcagccgcagcttttacacggatatgttctgcatccgccccggctttttcaaccgcatctttcacgatcttttccgcatctttttttgcctgatcgagaagttctgccgcagactgctctgcctcctcgaaaatccgggatttcattttatctaatccgctcatttatcgctgtctccttttcatcaattccaaaccagacgtcttttccttaaatctgaattccgtttacggcaaggaatgagatcagcagcgccagaatagcgtatgtctcaaccatagccgggaacaacatagctttaccgaactgctccggtttctttgcgacgattccgatagacgatgccgccgtttttccctgtgcaattcctgaaagaagtcctacgataccgatcggaagacacgctgccaatatcaaaagacctgaagatacggaaacatccaatgctccgcctccgagaataccgatctttgaaagtgtgataaatcctacaagcagtccatacagaccctgtgtacccggaaggagctggataataagcacttttgcaaacttactcggatcttctgtcacaacgcctgccgctgcctgtcctgcaatacctactccgatcgccgatcctgctccggcaaacaataccgcaactgccgctccgagcagtgcataaacaattcctaaattttccgcaatattcatgataaagtttcctccttaacatctgcatattttgtattttctttaaaaggattaaacggctctccgccgccttcgtaaaatttcccgaaaaactccacaaactgcaaacggtttgtgtgtacatacgcacccaaaagattgatcgccagattgagcgtatgacctgcgataaaaattacgacaaatgcgatcacgccgatcacattattcggaagcatgcttcccatctggttaataaccgatgcgattactccggttgcaagtccgagcgccagcagacgagagtaagacaacacgtcgctgagccagccgctcacattgtaaagatcatatgcgccaagcgccagacgaagcgccgggtttttcttctctcttcccgacataagcacgattcccaccgctcctgctatcgccaatgccttcgctcctgtattgagccatgccggaaatacaatattcatctgtgcgatagatgcaaaaatatcgctcggcaaaagcatcaatataagaccgatcaaaagcataaaccaaagaacaacgtcacagaagaagtccatcacttttccgtctttcagacagagatatcctttgatccccagtcccacaaacaggtggatgacaccgaataacagtgagaacacaagcagtttcatcgggtcgttcaacggcacaaaccaaagcgccggaacggtgatcgtcgttccgaaaaacttctccgaaacaacatctacgatatttccgaaatatcctccgaataaaattccccacacaagagtggataatccacaatagaagaataatttcatcgattttttcattccctgagacattctcgggaatttcttcacaagcacagcgcagacgattgccacaatcgctccatacgccgcatccgaaagcatcattccgaaaaagaatacatagaaaaacgacatgatcgtcgttggatcaagctcccctttgtgaggaagtccgtaagactctacaacgccctccacacttgccgaaaacggattgttctttaaaataaccggagcttcttcgttttcctgcagttcctcaacatctaccatacagtcatatttttctgtcagataaccggaaagatgcgccgcctcacactgaggaatgtatccgcttatgacaaacgttctctccgactgcgggatctgaccgagcactgcgtatttgtccgcgcgtactctgtagtaatccgctaatatttttaatttttctctctgatccgaaaggtctttcacctcattctcgatctgttcaatccgcgctctgcagtctgcgatctcactttccagctcttctttttgaaacttcggaacgtctccccacatctgggaaggtcttgcaaacccggcgcttctaagcgcatcttccgctgcctgcacatcttctttcatgcagacgactgctagatataccatgcccggttctgatgaaacaatgtttacatctgctccggttatatccggcgctttctctgccaaaatcccatataccgtctccgcgtcagtacctcccggcatcgttccgaaaaatactgccgtccggtctgtctctgccggtgtcagcggaacgtccaggctgatccacggattgagactctcgatactgttgttcagtttcgtaatctccgccatctgttcagagcgctctttatccagccttccgatctgttttgccgttttcagaagatctcttcgctcattgcgaatccgctcttcttcttcccgctcaatcaatgcctttccttctaaagatgcaaacatcgacttcttctcaggaacatatttatcaagaatatcgatcgcctgttctgccagagtcgacgctttctcgaaacctgccttttgccctgcagtgtccatcttcttaaaatcttcatcttcttcgattacatgattgatctccacaacaccgaggctctgtaatttttcgaggattgcttttcggtctttctttaaggcgcagatgctgattctctgcatcttaagtaccgccatctgtctatccctcctttacagtcttatttctgttatgtcaatctttccaacacaagagcagccgcctctttctttcgttcaagagccgcctttttcatctgttctgcttctctgcgcgtttcttccgccgcctgtgccagcataacttctccgtctttctttgcctgatttgctgttttcaaagcgtctgactttgcttcgtcaatcagcttgtcggcagcctgttttgcttcttctttcgcggtcttgaggattctcttgctttcctgttccgcttcttttacgatctgatctgccttattttctgtttcccggatagatttgatcgtttcttctaccatttccgcaacaccaccttccgctttcttttctatctttttagttttaccatactttcccgcttcatacgggacgttcccttttcgggaaacgattccctcctcctgtgccctatctgaacagacgtaacacagtgtacagattcaacgttaaacgaatgtaaaacgccctcccgcaccttatccgaaccgatgtaaccgcaaacgtttcttagcagtttcttagcacattgacactattatataccgaaagtcttcaatagtgaactacacttttcccgaatttttttacattatttcgtcattttgcacatattttcacaacttatttcgttcaggtattcccatgccattctaattcatgaagctctccttccaactccattttcgcaaatccgttttgacgcagagcttcatagagaacaaccgccacagaatttccaagattcaaagatctgatctgtcccatcatcggaatgcgcacgcaagtatcttcatgatctacaagaatctcctccggtatacctgcgctctcttttccgaacataatgtaacaatccggttcatacgccgcttcggtatatacttttttcgcttttgtagttgccatatagattttggcacccggatttttctcaaggaaatccgcataatcaatataagtcgtgacatccagatcattccagtaatccatccccgcgcgtttcaatgccttttcggataatttgaatccaagaggctcgatcagatgaagacgcgtccctgttgccacacatgttcttccgatatttccggtattggccggaatctccggctcataaagtacaatattcagcataattattttctctcatttctcaatcgcccgataaatctttccagccggccgattgcttcttttagatcttccaacgaatatgcgtaggatattctcaaaaatccttcgccgcattcgccgaacgccgttcccggaacaactgcgactttctcttcatttaacagcctggttgcaaattcttctgaagtcattccaaattgtttaatactcgggaaaacataaaacgctccgaacggttcaaagcattccagtcccatctttttaaactcatgcatgaggaagcgccgtctctgattataggatttcctcatttcttctacttcatccccacagtttctaagtccttgcacagccgcatactggctgtttgtaggcgcacacatgattgcaaactgatgaagcttcgtcatctgagatatgataacttccggtccgcagcaatatccgagtctccagcctgtcattgcaaacccttttgaaaatccgttaataacaagcgtcctctctctcattcccggaaggctcgcaatcgatacatgttcttctttatatgtaagttccgaataaatctcgtcagacatgacatacagatcatgctcttcgacaaattttgcgatcggttctaaatcttcccgcgtcatgatcgctcctgtcggattgttcggaaacggaagaacgagaacctttgtcttaggcgtcgtatatttttcaagttcttctgccgtcagtttaaattcatttttttcctgaagaggaatgatcaccggaactccgtctgccataaccgtacacggcagataagacacataactcggctgcggaatgagcacttcatctccggggtcgagcatacagcgaagtccgacatctattgcctcgcttccgcctacagtgacaagtgtttcatgtactgcatcgtattttacatggatctttctctcaagataattacagatctcttttctcagttcttttaatccggcattagaagtataaaacgtccttcctttttcaagggaaaacattccttcttctcttatgcgccatggcgtatcaaagtccggttctcctactccgagggaaattgcgtcttccatctcgttcgccacatcaaaaaatttacggatgccggacggttgtatctcaacgatttttcttgataatggatttctcattacagtgtcaccggtatcctttccgacccttttttcacgcccatgatcgttccgtggtctttatattttttcaatataaaataagttgccgtgctcaaaacgccgtcaatcgtagacagacgttcagatacgaatctcgatacttctttcagcgtcttgccttccaaagttacaagcaggtcataacttccggaaataagataaaccgcatatacttccggatagttatataaccgttccgcgatccgatcgaatccgctgtctctttgcggcgtcacacgcacttcgatcagcgccgtcaccatctctacgccggctttatcccagtcgatcagcgtatgatatccgcagatgatcttctctttctccatatctgcgatctcatttgccacatctgtttcttccacaccgactaacactgccagttctccaagctctacccggctgtgcttttcgatatacttcaaaatctccattctcaacgcttcttttttctcgttcattttctgcctcctatacctttatatatcatttccgttttacttgttgtaaaataatattttatcatggataaaacttttcatctgtatgtatttttattatttttcacactttttataatccttctgccatctcgccagttcatccggcgcaggtctgtccagatatcttatctcttctttgcttgtgatcacccgcgcattctgcgctttggcaaccccaagcctgacggctcgcgcccccgccttttccagcacttcaatcacctgatccgcttcatcggtcaagatcagataacttccggcagaagtcagctgatacggattcagacgataatattcgcagatttctacagtctcctgcttcagcgagatcgatcccattgcaatttcaaaaccgatcttttcttcctctgccatttcccataaggccgccaagatgcctccgcttccgatctgccaaaccgaaatatctcttccttttgccgcctctaaaatctgctccggcgttatgagctgatcacgaagcttttttgcctgcatcaaaaatgtgttaataaatctttgcgataattcttcctccgccgcttctaaaatgcgaagagaaccttccagacctgcatatccgcataagagcaattctcgatttttaacaaacttctgtctgtttcccgtttttttatctgcagtctcttctaatgcatgcatccccggatcttgtactttcgttccgcctgcacatgcgtacacgatcggagtttgcaccgccgccgttccctctgccgacaaagacgtcagctttgctttaatgcactcgcagcctttttggatttccccacaaacatccgcaagaaactcttcctctgtctcttccggaaaaagaattcttaccgatatcccttctgcctgtattttgcgggctgccagttctcccgccgcgcccaaaaccgcataataccctatcccggcatggccgccgcaaacacatacgtctgcccacgaaaaacttccgtccgtctgatccatatgaactttctttttcaccgaccggttccatatagtcggtgagatctttccgatcttcatatttctttgcttttccttccattgttattttaaaaattgacagctccgccgctttcagtatgtctgcctgtcctttactctgacagataataaatcgccgcgtttcctgtgagcggatctcggtttttataatcaaacaacactgttttcccgtcaattcgttccaaatgagtcatttttctcatctgacgtctgtcgtatccttcatatgctttcaaataggtccgctctttctcttcttttttataaaatgccgccgcttcatccgatgaaactccgctttctctaagaaattccggacgttttttcacattatccctcaaatacatatccaatgtcaacatttccatatattgttccgatctttctttacacgttttcacgataaaatcatataagatctcataccttccgatccgtgaatgacttacggcaaatgcatttttttcatcataatatgccgccagacattcatacatacaaaacggagatgcaaattcttgctctaatgccgccatcgtacagcaaaactgcccgctgttataatacacttcaaccatctcttctatctgctttaaccggatgacctccgcataagtaagccattttgtagaaaggacttcatacggcgcacgatcctgatacacaatcccgtattcctgcgccctgtcatgcataacagatccttttaaaactttcagaaaaccaagctgaagctgctccggattcattttatatacacggtcaaatgattttccgaagctttcatatccttcatacggcaatcctgcgataagatcgagatgctgatgcacattgtttccttttttaattttgtcaacaatcgttgacaaaacatcgattttcatcgttctgttgatttcccggatcgtaatctcatttgccgattgaacaccgatctcaagctggatcagacccggacgcatacgattgatcaacgcgatctctttttcattcaataaatccgcggaaacttcaaaatgaaaatttgtgattccgttatcatgctcatgaatataagtccagatcgccatcgcatgatcatgccggcaattaaacgtccgatccacaaatttcacctgaggtactttcttgtcgataaaaaactgaagttctttttttacgagctctatctcccggaaacgtaaacatttgtcgatagaggaaaggcagtaactgcatgaaaaaggacatcctctgctcgattcataatagatgatcctgttctcaaaatcttcaatatgatcatagacaaacggaatcgtgctcaaatcaataacaggacgaaaatcattttggattacagctttgtccttatttctataagcaattcccggaatatcagaaaagagttcatctctttttactccggaacaaagcgcccctttttcttcatgataaacacggagcagttccgcaaacgtctcttccccttctccgcacatcacgccttctactttcggatactgttccagcacagccttcgcatcgtaagatacctcaggacctccaagccagatttttgtatccggaagaatcttcggcagttctctcaaaagctgtcctacatattcaatattccacaaatagcaggaaattcccaataggtccggttttctcctatatatatcctgcaagatcgcatcaaacgtctgattgatcgtatattccgcaacttcgatttcttccgtataagttcgcgcatatgcttttaagctgtggacggcaagatttgaatgaatatattttgcatttactgccgctaatagtaccttcataatttctcctatctctttttccaacaaaatttatactctataataacactaaaaataatccgccgcaaagaactgttacattttactgtgattttgcgctctattcattgacatttctcttaaaaccatgtaaaattaagactcgtgcagccggggtgttagcggtaccttgtacctgcaatccgctatagcaggggtgatattgtgcagagggcgacagccggcagagctgccttaggtaagtggcgttgatgtttgggtcttacgcgacgggaatctgtgaatcgtgtcaggtcgggaacggagcagcactaagcagaaccttccgggtgccgtaagggcgcctgaactgagttaactgcctaagtaacgtctgttagcctagctcgaagcacaatgcacgaaaaagtatttataaagtttatatgatctcaatgaaaagtccgtgccgaaacagctatactgctgtaacgtctgcacgggctttctttttgtaatggcagcgagctaaagtccggacttgccggagaccttggcgaccgcttacaatcccggaatgtgcctttagcgcttccggcgattcttttccctcagttccctgaaaaatccggtcataagcgcactgcactcttcctcaagcactccggttgtcaattctgcctggtgattaaattgttttatatccaaaagattcaaaaccgatcccgcacatcctgcttttggattcatgcatccgacaacaacgcgggtcagcctcgactgaatgattgctcctgcgcacatttgacatggctctaacgtcacatacattgtacattgctccagcctccagtctcccatttttttgcttgcctttttgattgccttaatctccgcatgtgccaacgggtctttatctgtattccttctgttataacctctgcctatgatctttccttcataaacaataacgcatccgatcggtgtttcattaatcgcatatgctttttgcgcctgtttaatggctgcccgcatatacttttcatctaacttcaacttctcattttcttccattatatccctcctgtatgttcctccgctttctttcctcccatacgttctttttcttttctttcatgaatagattagattgaaaagacaagaatcgaggtaaaagatggacacgggtactttttatctatatgaatatgaaaacaatgtacgaaagcgcaatgcgggatttctgaaaatctaccgccgctatcaatcctgtatttttcaggcacacatccgaagcatcagccttgaaaatgttttcgaggcggaaatgtatgcgttctttttcaaggaaaatcaaatctgcgcaaaacagatcgctcattttcccattgactccatgacacacagcatacgtttctgcgctccgcaatcttccttccccgaatgccgccgtctcgaatcgatcgacgggtttttcctgaaatgttccgagtcatcctccctttggcttacgccgaactgtcctgaaaacatagattcagatcaaattcattttctggataccgactccacgattcaaagcgactcatatcccgcctccctatccaccagaccggacagcccgcagaacaactctcaggagaaggcgaatcctctcacaaaaagcgaatcaccggatgaggcggagcctcgcgcgaaagacgaatcaccggatgagacaaaacctcccgcgaaagacgaatcaccggatgagacaaaacctcccacgaaagacgaatcaccggatgagacaaaacctcccacgaaagacgaatcaccggatgaaccagaacctcgcgcgaaaagcgaatcaaattcctccatccggggagaagtgcggcaaaatgagatctcaaaaaccggtctttctcttccgcgaaaactatcgctttccgatctgacagttcttcctcggaaattttggtttctttcaaacaacagttttcttctgcacggttaccacagttacgggcatcttctccttaccgagcaaaacggacggctctggctcggagttcccggcatatatgacttaagagaagcccgcgcggcagaccttttcggtttcccacgcttctgcagatcttacgccgattctgatatgctgactgacgacgagcgaaacgcaaacgctgatttcggtcattggtttcgctgtgtcggactccggcctagatgatcccgttcatttcctgatagagacgttttgcataactatctgtcataccgcacacataatccgtcacaagcagcaggcggagatacaatttctccgcttcgcttttgccttctgattggattcggtatgcattcttataattatccgatataaacgatattactctcctgtcaatcgttccctgcttttcttttgtatcgaaatacaaagccgcctgtacaagacgctccatcaaataatctataacagccgactcagatacttccatcttgtagattgccattgatgaaaaaacatatctgtccgccatgtctccaagcagttccatcagttcttccccgtttgttccgtaaaacagatcctgaccgaactttcccgacatgatcgcatcgtaattcgccataaatccttctgtcgcacagttaagcaaaaatccctgtgcatttacaatccaatttttcacggcgtaagattccggatcatgcacccgcttttgtattcccctctcgtaaagctgccgaagtctgtatgcgggtcgaaacgtaccgtttcgtttcttctcttccaactcttttagttcccgctccagatccgcatatcggataaatcctttcacaaaagaatcttcaatatccgccgtcttataggcaagatcatccgccgcttccaacatatatgtcagcggatgccggtttcttcccgcccctgtctcttttgtcactttatgaaatatttcctcgtccgcaaaataatatcccatcttccggtcttttatatttccactgttctcatctatctgcaaagatgatccggggtatttaatgatcgtattcaggagcgcatatgtcagattcataccatgctcatcgacaagatagtgcagtcttgtcacaagacgaagcgcctgagcatttccttcaaagtgaaaaaaatcctgtttcatctgcgcggtaaacatctcggaaacattcttttggcaaaacgtaagtttcggaagatttctttcaaaccattcccggatcgcaatttctccaaaatgtccgaacggaggatttccgatgtcatggatcaagcccgcacactcaagtatatgagaaatatcctctttcatctgaggcgtaaatcctgagtttttccgatgctccagtatattttctcctatcgtctgccccagtgatttcccaagcgaagatacttccagagaatgagtcagcctcgtccttacgaaatcgcttttatcaagagggaaaacctgcgtcttatcctgcagccggcgaaaagatgcacttccgattatgcggtgatagtctttttcaaattcacttcttagatcgcccgcctttgcaaaattcccgcctgctctctcacgttttgtcgaaagcagcctgctccattccatacgttatcgtctcctttcctcccgcaaacaggcggaagcgccaaaatccacattccgaagttgtaaatggccgccaagtctcaggcaagcccgaactttgacatatcgccgttgcaaatcaaccccacagaaaactctgcggggctgtatcactttccttattgttcaattatccgccgaattgaaacgaaacgtcaatcgagataaatcggcggttcatacgccttgccgagtaaagctttcttacgttcctgaagtccgagaaatgcccactctgtcatatctgtccatttatggatcgtacggtcatacacctgaacgtatccgatccttgtcggatgcatccgcacgctgttcgactggtattcttttccggtgtacggattcacatcgcctgcctgagtatcctcatccgcatcatcatgtgtaatgaccggctcaaaatcttccgtgctcccgctttctgcaaatgccgtttcatcttctgccgcatcttctgtccattttgcatccgacgaaacagactcatcttgaactacagctcctgctttgtcggcatgatccgtatcgttttgatttacattttctccgataccgctttctccgaccgcatccgtctgcacttcattttcttttggtgaaacttctttttccgcttttgactgtgaatctcttcttctgaaaaaacttccgagcctgcgttcttttttcggcttttcgagttcctttttaatctcttctatcgactcgcccgcctgcacgttcttttcaagttcattcaactcttcatgaatttcgtataattcgccgatcgtcatatcgcgatcgttcgatacctcttctcccggtgtctctaacccttccgtatccggcatactcatatccgcttctttttccggctggatatattctgcctccacagattcttccggctggatatactctgcttccacaggttcttccggctggatatactctgcctctacaggttcttccgtctgaatatactctgcttccacaggttcttccgtctgaatatactctgcttccacaggttcttccggttcaatatactctgcttctgccttgttttgtgcaaactcttctgtatgctcaaacatctccggcacagtctcttcgatcagtttttcttccggctctgcatactccgcttctgcctgctcttttgctgtcagctctttatgaccggaggcttctacagcttcaactctcgctgccgccgcacgctccaacgccgcaatgcttcttacttcccctgccccttctgccgacatgatactcaaatgaaacggacactcaagcatttccgcgatcatacgcatatcctgttcctgaaaattatctctgccaagacgctgtgtcaggttctgtctcgacattttcttccctgttttttcctcgatcaattccgcaagctgcttgatcgtcattcctttccttccgagaatgatcttgacttgttccccaaatgttaaatcctgcattttttcctccttatgtatatttatactctttaccaaccctttacggtattccccatatactttatcctatctctttttcccagtctgcgtcaagagattttccgcaatgcggtttttagaaccagcgcggaccggactgttgcttatacttatacttatgcgattcttctgcacggtactgtcaggctttttattgaagaagatattcttccagtgtcagattctttttcatgatctcttccgccgccgttttccctacataccgataatgccacggttcataaatgattcccgtgatatccaccttttccggaggatatcttaaaataaatccatattcccaacaatgttccatcagccatttttgttcgtccgtctctccctgccggtcatccagaccttcatactcggacgctataatatccactgcaagtccggtcgcatgttcgctcgttcccggaactgccactgactttttcgtctcatcataagcttccaaaggcgtacgtccgtttgccatccagtcctgcatggttgcattaaacacttccttctgcttctcagaagaacggtaagcggaagcaacatacatactaagtcccgcttttgccccatcgtcaagcatctgccgaagaggttcttcgatacgcgcatcgacaaaccgttcgctttccaactccaccatagattccggcacataagaaacatccagaggatgagagtcgttgacaagaaccaatgcccacccttctttgtcgcttcctaaagcctctgcgctgttattcgccgcctcatgcttcatgatctcttctttcagctcatttgttttcttttttaatttttctttttctgcggcaaattccgctttattttttgacaaaaccgacttcgcggcaactcctgtacacagaactcccgccacaagaccgatcgctatgccgatgaccaacattcgtctcagccggaattctccggtcaattttttcataatttcaactccatatctatatcggcggcaatctctttctctgtagaacagatcgccattttatatagtttattcggatgctcatattcccggtaataataatcttgccgaaacagatccggtttccgtatcaaaaccggcggatttcccaatcgtatctcaaacgagtcaagcgaaagcttcataccgaatcttgtcgctttcaaaaaactttctttgagcacccagtatctgtaaaatatatccgccctctcctccggtgtctttcccgacatcactgcctcatattccgaaccgcaaaaataccgttttgccaaatgctcccgcgccctgccgatctgctgaatatcacacccgacctgtatgcgttttccctctgccaaatcccctcccatacagacggcacacatgacaaactcccctgaatgtgacaggttaaacactgtttccttcggaagtctgtatttcttcctcaacttctcccacagactccatgccgccacgctctgcactctctttaaaggatctgcctgcgccattgccttttctttccgaaaacggggaagccgttcaaaatattttatatatatttctttatcgtaaagcggcgtaatgtccgccgcccatccctttaccatacttttccttatctgtctcttaaatatctcacttcaaacgtttcaatcgtgatcggtttattaaacaatgttccctgtgcataatcacagccgatctccctgagtacattaaactgatcctgagtttccacgcccgctgcctgaacagacgctcccaactgtctgcatatgtcgataacagcctgcgccacgatccggctccttccgtttccgacaatatttgaaatcacgctcttatccagtttcaatccgtcgaactccataagagacaagatcgaaaaacttgaatcttttgcaccgaaatgatccaagatcactcttacatttccttttcgtatcttactgctcgtctctgccagcatctcctgattcatatcgctgcttgattccgaaacttcaacttcgagatactcgcatctgacatgatgtttttctatgagatgcagcattttatccgcaagtccttcctgccgaagagttgcccctgcaaaattcaccgaaaccgggatcatcggaatatctcttacttcccatttatgaagcgttttgcacacttcctcaaacacataaagatcaaggtaatgggaaagttttgtttcttccagcatattaagatatcttcccggatctactattccgagatctttgtgatgatagcgcacaaccgcttccgctccgccgacctcgcctgtgagcgtatcgatcttcggaacaagacatacgataaaattcccgttttcaatatcttgtaaaagatcttcttttatgatcggttcgtgatgtcctttttgcaaatttttgtaatattttcttttttcctcgcgcatcatcacttccgcgttgttgacaagcttgtctacctcgatatcgatcttctcccacgcatagccgatagaaacaagtccgagactgatattgtcaagctttgtatgcaccgcatgaacctgttttgtaaaatcctgataagacgtattttctacaagcacgagatactcatctcccgtcagccgatatgcttccccactgtgaaaatactcctccagaacttctccgacacgaattacgacttcgtctccgtaatctctcccgaactctttattaaaatttttcagtccgttgatatcgacggaaagcgcgccgatcgattttaatttcttctcatccacagtatcaaaatagtgaacaagactgtttctgttcaaaagaccggtaagatcgtcatgataactcagatattcctgctgcttctgcatcttctgcagtgcgattgcctgcggaatatactgaacgatagcgcgcatcaagtcgatggtgcagcctccccgtctgactccgacaaccgcaagaacagcagtcacatcttcactgatcggaagaaacacgctataatcccgagccgtcgtatcggtaatctctgttttcatccatttcggctgacgctcttccgggagaagtttcatccgatcacgctgccactcgatattctcatcgcaccactcgtagatcgtctcgatgtctcctctgtctttttcaatataataagcatactccgcatcataatagctgcgaaccgtacttaatatttcgtttacgatctcgctaagagaccggattttgtaaccttcactcataattccccgcccgtttcattttctttgatctgtaaatccatatatttatttaaactgttctgtctgacatttttctgtgcattttaatgcaaataatttacttgcataagcattattattttagtatacagccatataaaatgcaagataaaaaaagagccagtcactcgtgatctgactctttttatctgtttcttttcacaaacatgctatcgatgtatcctttcgacaaccgtaagcatctgtcacacttaatagtggatcaggtctttcgctccctgtgcaagtttcaggcggttcatcgcccgagcaagagatgcctgcgtgtggtaatattcctgaatgctttgtttctgccgcatccgctcttgtgcatgttccctttgttctctggcatgacgcacgtcaatatcttccgggcgttccgccgtatcgacgagcagtgtcacacggttattcacgatctccgcaaaacctgttccgactgcgatttccgtcacttcaccttctgttgattccatgcgcgcaataccgacaacaacggcgatcaccatattttcatggtgcgccagtacgcctttttctccgtccggcgccggaatcgtcagtttcttacatcttccattgaaaaatactttatcacttgctatgattctcaatccaaatgtatccataatacacctctgcctactccgccgcctttgctttctcgatcacatcgtcgattgaacctacattgaaaaatgccgactcaggatactcgtccatctctccgtcgatgatcatcttaaatcctcggatcgtctctttcagcggcacatattttcccggaactccggtaaacgtctcagccacaaagaacggctgcgacaaaaacttctggatttttctcgcacgcataacggttgctttatcttcatccgacaactcttccataccgaggattgcgataatatcctgcagttctttatatttctgaagaatcgcgatcactttgttcgccacttcgtaatgctcttccccaacgatctccgcttccaaaatacgggaacttgactccagaggatcaactgccggatagataccttgctctaccacttttctcgagagaaccgtcgtcgcatccaaatgagcaaacgtcgttgccggagccgggtctgtcaagtcgtcggcaggaacgtataccgcctgtacggaagtaaccgaaccgtttttcgttgacgcgatcctctcctgaagttctcccatttccgtagcaagcgtcggctgatatccgaccgccgacggcattcttccaagaagcgcagacacttccgatcccgcctgtgtaaaacggaaaatattatcaataaacaacaaaacatttctgtgttcttcatcgcggaaatattctgccatagtaagccctgtttccgccacgcgcatacgcgctcccggcggctcgttcatctgaccgaacactaacgccgtcttttcaagaactcccgattctttcatctctgtccacaagtcatttccttcacgggaacgctctcctactcctgtgaatatggagtatccgccatgctctgtcgctatgtttcggatcagctcctgaataagcaccgtttttcctactccggcgccgccaaacagtccgatctttcccccttttgcataaggagcaagaagatcgattactttgattcccgtttccaggatctcaacaaccgggctttggtcttcaaatgtcggaggatctctgtgaatcacccactgatctgcatctgtgatctgttcgccgtcatctaccgtctctccaagtacgttaaacaatcttcccagcgtcttctctccgaccggaactttaatccccgctcctgttgcagttacttccatgtctttgtgaagcccttcgcttgcagccagcatcagacagcgaacttcattgtttccgagatgctgcgccacttccataacacatttctttccgttattttcaacttccaaagcgtctttgataaaaggaaggttcccgtcttgaaacacaacgtctacaacaggacccataacctgtatgatttttcctttattcatgatctttctcactttcttagaactatagcggcattctgccgcctgtttgacatactgatcttcccgaggtatcagccccggcttttttctgctgcatttctattttcgctgtgcccttgccccactgcacacttctgtaatttcctgtgtgatcgccgcctgccttgctctgttatatatgatcgacaagtcatggatcagacttttcgcactgtctgtcgcagatttcatcgccatcatgcgggcgttatgttcgcttgcatatgcttccacaagcgctccgtagacgattccggtcacataattcggaatgatactatccattaccgcttctgcagacggatacagcgcgattgcttctctgtgcacgttcaacggcattttcatttcgttaaacgagcttctttcaagcggaagaagcttcattacttctgcttctgcctgaacagaattttccatcctcgtataaacaatatagatctcgtccaattccctctccctgaactggtcgagcagaaccgcggcaatatccctcgccctgtgcatcgtcggattttgtaccgtatattgaaaattggtatcgatctgcacgtcccgctttgcaaagtaatgacgaccgagttctcctacgataaacaatttatgaatccccggacgggccagtatctcttcttctaatttcacgatattatgattatacgcccctgccagtcctttatccgccgtaataacgatcgaaccgatcttgcgctctccttccggaacattctcgcgcgccgaaaaatatccatgatgcaagtccggcaaatgtctgagtattctcgatatttcgccttgcaggccataaaagtaaggctctgtatccgcaagttttttcttcgcatgggtcattttcgacgaagagatcatatacatcgcgttcgtaatcttcatcgtatcttttacactgttgatacggctttgtatctctctgatatttgccatattatcacctgctctttttaaattcctctgcgatcaacacaatctgatcgatcaattcatcagacaacacttttttctcttcgatctcttcgccgatatttgggtatttcgtatcaaaccacgtcatgagatcaagacggaactgacgtatttcttttttatcgatgccgaggaatattttgtgtgtcgcggcacaaagagtaattactttttcatgcagtgacatcggatgatataacggctgtttcaaaagttccatcagtccgcttccatattccagctgttccttcgtcgcaggatccaggtccgagctaaactgtgtaaacacttccatctctctatactgcgcgagatcgatacggatacttcccgacgcttttttcatcgccttcgtctgtgccgccccgcctacacgcgatacggaaagaccgacatttaccgccggacgcatgcccgccgcaaacaatccgctctccaaaaagatctgtccgtctgtgatcgagatcacgttcgtaggaatatatgcagatacgtctcctgcctgtgtctcgatgatcggcagcgcagtgatcgaaccgccgccgttttcatcacttaatctgcttgagcgttccagcagtcttgagtgaagataaaatacatctcccgggtaagcctctcgtcccggagaacgtccgagcaaaagggaaatcgccctgtatgcaaccgcatgttttgacaggtcgtcatacacgatcaatacgtcttttcctttatacataaagtattctgccattgcggttcccgcatatggagcaatatactgaagcggcgcgcagtcgcttgccgttgatgacacgacgatcgtataatcaagagcgccgtttgtctttaatgtattaacaacttttgctaccgtagacgctttctgtccgattgcaacatagacacagatcacatctttgtctttttgattcaaaatcgtatcaagagcgatcgacgttttccctgtctgtctgtctccgatgatcagctctctttgccctcttccgatcggaaacatagagtcaatagaaaggattcccgtctccatcggaacactgacagattttctgtcaacgattccgggcgcttcctgctcaatcggacgataaccgtcggcttctatacttccttttccgtctatcggctcgccaagcgcatttacgactcttcctatataagcgtctccaaccggaactccggctctctttcccgtacgggttactttcgttccttcactgattcttgtatcgcttccgaaaagaatacagccgatctcgtttcttcggatatcctgaaccattcccttcaatccgttttcaaacgtaacgatctcaccgtacatcgcatgatctattccataaatcgaagcgatcccgtcgcctactgtaatgacagttcccacttcactgtctttgctcatcatatcaaaattctcaatctcttcttttaagatcgaaatgatttcatttgagttgatcgaactcacctcgctcacctccgtgttaatctttgttctaatctgtccagacggcctttcgtgctcctgtcatactcatcgtttcctacccgcagaataaatccgcctatcagagaatcatcttttttcatctcaatatacgcgcgttttgctccgtattttctgcacaaaaacgattccatgccttttttttgttcttcacttggaagcgccgtgtaaaaaagaaccgctcttatgatctgttcctcctcatctgcccgcatatcgtatgcgtcaaaaatttctccaagcagacgaaccttacgataacggcagacaatcttcagaaagtttctcatttcccgcggaaacactttatctatgacctgttccttcttctcttgacgaatcgtcggattgtccagaacatctgtgatctgcggtacttccgaaaatatttcacgagttttttctatcgtctctttcggaatattcagttcaaaaagcgtttctgcgtatctcactgccgaagaagaacaaattacttttctatttgttttcatttccgtgtccctctcctgtttctcttagaaactgatcgaacaactgactctctctttcttcgtccgacttcccgcctgcaatcttcgccgccgaagcgatcgcaagaccggtgatctcgcccttcagttcatggatcgttttttcccgttcaatgcggattgtctcttttgccgacgtgatcatgctgtccgctttgttccccgcttcttccagaatacggtcatactctgcctttgcgctttttcttgcattttctacgatctgaacagactcctgttttgctccgtttaacgccgcttcatattcttgtttcattttaagagcgccatcctgcgcatcctgcgcgctctgcagtccgtctgcaatcagttgtttacgtttctccataatgtctgtcacaggcttgatcagaaaatgtctcagcaagagatagagaattatcacatttattattgtatagacaagattcatatttatttctatcatctttttcccatgcctttcccgtcattttcacaatgtaacatctgactttattaaccgagaagaatgatgatcaaaattccgataataaatccataaatagccgttgcctccgcaagcgcacatccgagaatcagattcttactgatcttactctctgcttccggctgtcttgcgatcgcttctgccgcttttcctgttgcgataccgataccgacgcctgctccgatacctgtcaatactgctactgctgctccgattgctataattgcttccatgttttttgttctcctttaattttttaatctgtttgattgttttttattgattgttttttattcttaatcgtttccatcatttgaaacagcccggctgtttatcttttgattctattccatttcctccgtcataaataacgcggtcagaaatacaaatacatatgcctgaagaagcccgtcaaagatatcaaaatagaaacttacggggatcgggcaaataagcggcacaaaatatttcaaaagttccagcactacaaatcccgccagcatatttccgaaaagccgcatacaaagcgacaatgggcggatcacaatttccaatatcgtaatcggcgccacaaccggaaccggctttgcaaaatgtttcatccagtggactactccgtttttatgaattcccgaaaattcaatcacgcacatactcatgatcgccagcgccgcagtcacattcaagtcttttgtcggcggtttaaaacctaacaatccgatcgtattcgacactgccagataaagaagtaccgtgataagatacggcacataagctttattttcttttccgataattccttcaaagaaatcctgcgcccaaccgatcattgactccaatgcaagctgtacctttccgggattttcaaccttaaggtttcttactaatataatggataaaagaaccaaaactgccataatgatccaagtgacaacaaccgattccgaaattcctcctaaaacaggaagtttcaaaaccgttttacaattcagttcctccatcaatgtttctgtcagatttcccgtattgctccctcctttttctttgcttttttattacaggcttccgttcgttttgggtataaaaaaagagctcttttccatcgagaaccgttccccatcgaacccctgttatatcttcatctcttaggtccgaccgttttcggtacaagccgttttttctgtatttccggcttccctaaaagtcgagtaaaacattacacccgaagaatatttttgtcaatatttccactttattttctgttttggcaaaaaatccgtttttttctttcattttgccacctcataacataaaaaaagatgaaaatttattcaattttcatctctcttttttaacaatattctttttctgtaaattatcaaaaattatatacaatgcacccgctgtttttgcaatatattttgtcgctttccacaatctttatgtctattttttaacaaacattgtcaaaaatagacttgtttctgtgataatgtttataaaaccacatctattgtaccgactgccgtctcccaagcgccgcttatgacgcctgtttcatataccttttcttctttctgtcatctgtctccgttttttgcactgcctttcggcactttctgcgatttctcctgtatatcttgctccacttccgaagactctctcgcaattctcaaaaagtctctgtcatgcgcttttcttctcggtataaagcttcctgccacctttccttttcctctgcttttcacatagaaaaatccaagtacggaaaatacagccgcgccgataaaattaacgatcaaatcctgcatcgtatcaagcagtccgatatcaagatatcctcccaatccaagagattgtccgttcaccgcaacatctgttatgttttgtatcgcatacggcacattatgtccgcccggatcaagcataacagatcgaatcgtatggataaccgtatctttctgcatatcgagttccatgatcatatccatcccaaactcaaaaaactcccacacaactccgatcgtcatcgaaaaacaaaacgctacgattgccgtaaaaagcggcgacagtgaaaaaaccgtccggtcacttctgttcagcagatcaacaagcgaaaatccgatcgccgccgcaagaaaaccgttcaatgtatgtaacactgtatcccagaacggaaatacaagataaaattcactgatctcgccgagtatctctgccgaaaaaataaatacaagaatgataatctccaatgctgtcggcagttccactttaaatgtaatctgtgccaaactcggaatcacaagcaaaagaagcgtaagtatacacaaaaatacattttcataattccgattcaaaagttggagcacgagcataatgatcacaagcgccctcaatgtaaaatacactatagccgaacttttatgttcccttagctccatgctaagagctgttgtccaatttttaaattttccggccgctttcttattatctcttttgccatttacgtcatttacattatcattcttatttttcttttctctcataaacctctttcctctgtttctgatctttccttatcagaccctttgccgcttttctattcaagaccgccttctttacttttttacttttacagttacatgtataaaattatacctgccgctccgcttacgagcatcagcatgatcgggttgatcttccgcttccgcgacaaaaacaacactcctccgaaaatagctaccgcgccgatatcaagcgattctttcattgtttttaaatccggatctcctgttccgaaaaaagaaagcaatatgatcgttgctgcggctgatacgatcaatcccagagaagctgctttcaatccgttaagcgtctcaaaaatatagactgactctttatgcttctgaaaaaaacgatacagagtcaatgaaatcgcaactccgcaaaaaacgcatccgactgttgccacaaccgcgcctgccgcacctgcgatctgcaagccgacaaacgtagatgtattcactgccagaggaccgggcgtcatctgagatatcgtaataatatccgcaaatactttttctccgatccatcccgcttttactacaacttcttcatggatcgaagggattaccgcatacccgcctccgatactgacaaggccgatcttcaaaaatgtcaaaaataattttaaaagaatttccatttgtgacctccgcttcttacgtaaacccgaaggatacaaagcccgcagcatactgccagaatcagcgccacatttacatcaaaaataaaatttgctataaaggcgatcggaataagggaaaaaagaaaaaatgatttttctttcaatatcacagtgcacatatctgctacaacactgacgatcaaagccgcaactccggattgcattccttttaaaacagcggcaacaattttatttgcaataaataaatcataaaatcctgaaatgattccgagaatcacaagcggcggaattacagaagccgcacagctaatcaccgcccctgccgttcccgccgccttataccccgacaacgccgccagattcaccgcgatcgcccccggacttgactgcgccacagcggacatctccatcagctcatcttctgtaaatatctttttcttttcaacaaaacttcggcgtacaagaggaacaacaacataacctccgccaaacgcaaacatgctgatataaatattcactgcaatcagccacaagtaaatgcccggtgttattgacttttgttcctcattgctcattgtgattccttcctctttcctgcacctttcattccggcatgcgtaaaatatattcaaacgggcataccaaaagatcagtaaggtttctcagccgccttgtttctttgttttcattcgtttaattactttcaaacgggtaaattcttcacgctctttttcttccaaagcattcgtgatcgtatatacaagtgatgtatacatcggaatcgtgatattctgcaatgcatttgccctcttctgcgtctttttgatatttcccgcaaggcggtacgccgcattttctaccatagacaatttcaccgtcagatcttttaccttgcggaatgcttctctcgccttatcgatcgattcacgggtcgtactaaatgaatacgttggctttccggcatcaggcatatatttgacatgagggatttccgttcccataatactgcgcgtctggatcgtgatcgaattttcgatcggaactgtatatgcaagcatctcaacattgctgattccgttttcgatgttcgccctttgcagacattcatacgcataagtgaacgtcgtgtcgatctcttcttggatcgtccgtgcttcatcgatcagatccatcagttctctgatcagtatatttctttttttatccatcagatcataaccttgcttcgccaacgcaagcgaatttttcgccagcataagatttccttttgtcggaaatgtacgcggattcatatgcctcctccttccccgcttttatttttactctgaaaggatcagtttctctgcaccctaacttattcttcttcagacagtttataatatttatcaagaatcttcgtatcaacgcggtcaagctcttctctcggcaaacgtccgagcagtttccatccgagatcaagcgtctcctccattgtacggttttcattcattccctgaccgatatatttttcttcaaattcttttccgaactcaagatacttcttatcaataggcgacaattcatcctcacctataacagacgccagatttcgggcatctccgacttttgcatatgcggagaacaactgatttgccagatcctgatgatcttctctcgtatatccctcgccgataccgtctttcataagacgggacaatgacggaagaatgttgatcggcggatagatcgactgtccgttaaggggacggtcaagtacaatctgcccttctgtaatatatcccgtcagatcgggaatcggatgtgtgatatcgtcatttggcatcgtaagaatcggaagctgtgttacagaaccgttcactccctgtacgatccccgctctttcgtaaatcgtggcaagttcactgtacaagtatcccggataaccttttcggctcggaatctcaccttttgacgaagaaacttcacgcatcgcttctgcaaaggatgtcatatcagtcaagattacaagaatatgcatattctgttcaaacgccagatattccgccgccgtcaatgccactttcggcgtgataagacgttccacaacaggatcgttcgccagattcaaaaacatggctacgtgatccgcaaccccgctctcctcgaacgtattgcggaagaaatccgccacatcatgctttacacccattgccgcaaatacgatcgcgaacttttcatctgaattttctcccagagacgcctgttttacaatctgcgccgccagttggtcatggggcagaccatttcccgaaaagatcggcagtttctgtccgcggatcagcgtcgtcagtccgtcgatcgcagaaattcctgttctgatataatttcgaggatactctctcttcacaggattgagaggagatccattcacgtctcttcttaacgtagaagcaatcggtccaagtccgtcgatcggatttccgatcccgttaaacgttctgccaagtatatccggcgaaagcgcgatctccatcggatggcctgtcagttttgtatgcgtatttttcagggacatattttcagagccttcaaatacctgaataacggctttatcttcatatatttctacgatacggccgatctttctctgcgtaccgtctacgacgaattccacgatctcgtcgaaaaatgcatcctgtacgccctccagcgcgatcagcgggccgttgatgctgcttaatcctaaatattcgattgacatgatcttcggttctccttatgcattcttttccaaaacattctgataaaacgcgtcgatatcacgatgatattgagcaaacatttccaatctgtcgttcggcacatcatatttgatcgagattacacggtcgaaaatattttccgccttcagcacagacataggatgccccatcgtcacaagcgtccttgcctgtttataaagatataaaattgtgtccatcatcaaaaactgtttttccattgagacacatgtatcgtctttatgaaatgcgttctgctgtaaaaatcccaaacggatcacgcgggcaatctcaagtacaagcttctgatcatccggcagaacgtcgcttccgatcaattttacgatctccaacaggctgctctcctgattcagaagcgccattaacctatttctataatcaacaaactgcggggatacattatcctgataccaatggcttaaatcgttcagatattcgctgtaacttgtgagccaatgaattgccggaaaatgtctcgaatacgcaagacttttatccagtccccaaaaacagcgcacaaaacgtttcgtattctgtgtgaccggctcggaaaaatcaccgccctgaggcgataccgctccgatgatcgtaaccgatccgtctgttccgttcagattgtgcatcattccggctctctcgtaaaacaccgacaatcttgatgccagataagccggaaatccttcttctgccggcatctcttccaaacgtcccgaaagttccctcagtgcctcggcccatctggacgtagaatctgccatgatcgccacatcgtatcccatatcccggtaatattccgccagcgtaagtcctgtataaatacttgcctcacgggcagccaccggcatgtttgacgtatttgcgatcagcgttgttctgtccataagcggattgcctgtccgcgggtctgtcaattcaccgaactcttccagaacctgcgtcatctcatttccacgctctccgcatccgatgtaaataataatatccgcatccgcccatttggcgatctgatgctgagtcattgtctttccggttccgaatcctcccggaatcgcagcagttcctccctttgcgatcggaaacatcgtatcgatgatacgctgtccggtcacaagcggaacagacgccggaaatcggtgatgtgtcgggcggggcacacggatcggccaccgctgtgtcatagtcagcttcttttcaccgccatccggaagttctaatataacgagagtttcatcgatcgtatactctccgtcttttacaacctcttttaccgttccttccacatccggaggaatcatacatttgtgaaggatcgcatgtgtctccggcacttccgctataatatctccgccatgaaggtactgacctttttcaacgacgatgtgagtcttccattttttctctctgtcaagcgaatccacgctgactcctcttgtaataaacgcgccgcctgtctctgcaattctctcaagcggacgctcgattccgtcaaatatattattcaggattcccggcgcaagcgttaccgaaaccgcatttccgcttgcgacaacttcctctcccggtctaagtcctgtcgtttcttcatacacctggatcgtcgtcctgtctttatcaagagcgatcacttcgcctactaatttttgttttccgacataaaccatttccgacatacgaaatcctgtatttcctttcaggtagatgacaggtccgttaattccataaatcgttcctgtgttaagcaattccgtcacctcctaaaaacaaaaatttgtcatattcgtcctggatctgcgttttaaacgaatggtccatcaaaatattacgcgaacggattaccgcgcgcaccccgccgataaaatcttccgcactcaccgtaagcttcgccccggtttctttttccagctccgtacgttttttttcatcggacggattaatataaataacgaccgggtcatcgcctgcaaaccgctctgcctttcggatacacttaacaagaaagtcgtcgtatgcttttgttttcatataatcgttcacaagctgcatcgcttcttcaaacactttgtctttcagctcctgctgcacttttccctggcttcgtttaatctccagctgagactttgccaatgcctgacttactgtccgttttgcatttgtcgtctctgcttttatgcgcgtttccgcctgccgcatcatctctgacttatggtcgctgaatattttttccagcgcttctctgtgcgcatctatgatcgcatttccttctgcgcgcgcctgctccatagacacagtctgcatatatgtgagtttttcttcaagagtcaaccgaaagccctcccttttctacgatttatctgcttcatttgcctgatttattttctgctctatcactgctttgtccgctgtattcttcattcgtcggaatgaatatctccgccttataatttcaatccgatcgcttccgttatataagatgtgataaaatctttttttcgtcccgttccgtgccggtccggaatttccacaagaagcggcatcttacgttccaatcggaatgtatcgatgatcgccggaaactccctgccgaatttctctgtcaaaagtacaattcctatacttttgtcttcaagaacacgttccaacgcctgctttagttcatcttgttcatgaacgacaatgccgtctactcctgccagacgcatcccggtatatgtgtcaacattgtcgctgatcagatacatcttcataacttcagatccttttcctttctgccttaccgtttacgctgctcccgccgcgccgtccgcatgtatctttattacaggtttcctaaaatcatgaaggaaatgatcaaaccataaagacacactccttctgcaagacctacaaaaataagagattttccgagtacgcttgaatcttcactgatcgcacctaacgctgcgctggctgcgctggcaaccgcaattccgccgccgatacaggaaagtcccgtaacgatcgcagccgcaagatatcccatgcctgttgcgaatcccgcatcggcagtcacagcttccgcagcctgtacattcggtccgccaagaagcatgatcgatgcaatcgcaaacgctccgaaaaagaagaaagcattcgttcctattgctcttttataacgttttctgctcttttccccaagaagataatacccaaacggtacgataatgctcacgatcagcgtgatgataaaaacgatttttgttcccattgtcattgtaagttcctcctatgatatgatgaattttaagaaatctattttcggctgtttttctttgtctttctttttgcatacggatcaaatgcatgaccgctgcctttataaaaacggctgaacagttcgtaatattccagacgcagcacctggattccgacgatcagaccttcgaatccgcaaacgaacaggtttccgaagatcacgcctgcccagttcggacttccgctctctgctcccgccaactgcagcacaacttccatgatcgcggcatgactcaccgcaaacgctccgatacgaataaaggaaatcgtattagagaagtaactgagcaatgtttcaaagagttcaaaaaatccctgcacaacaaacattgcctttcctgtctccatcttatccgcccgcttctgaagcatcctcgtaaggggttctctgaaaaagatgagcaaaagcgggattccgaacatgatcgccataacgattccgcccggaagcggatttcccgtcataaagagaacgactgtcactacgaccgcaagataaaatacaagtcctgccgcaccgttcggatcaaaccatgcgctttccatatttttccctcgtaccgcattgataatgtgaagcaccatcgcaaccatgatcagaaacataccgaacgccaccgcaacaataaacaccgtattcagctttccgagaaacggcaaagtcgtcatatgatcgatcggccgtatccacagcgccggaagaacgtcttcaaatccgaaaatacttccaaacagaaatccgaagatcgtggaaaaaacacctgccgtcgcaataatccccgcaagcggcgctttcttaaacttatagaccaatcctccgccgatcatcaaaagcagtccctgcccgacatctccgaacatcactccaaagataaatgagtacgtcagaccgacaaacatcgtcggatccatctcgttatgtgccgggagtccatacatactgacgaacatttcaaatggtttgaataatttcggattttccagctttgtcggcggttctccgaaatatgcgtcatgatcgtcttccacaacgacgaatactttatcgtcttcctttacttcctcaacgaatttatctacatcatcttccgccatccatccgcacagaatatagtaatcttcctgtttatcttccattctggccgcaagttttctcacatcgaagttattggacagttcttccagcctgtcccttgccgcaactaactgcggagcgcggtccgccagcatctctcctgcctgtttatccagatcttcaatttctaaattgacacgggcaatctcgttttcgagtacccggtatgccgtatcgggagttccttcaaattcatccttcaactcgattctttcaaaatgcagcgaccggaataccgcgtcaactttctgtgtctccgcctgcgaaacgaaatatactccataaacataactttcatcccgctctccttctacgaagattgcttttagatcatccataagatatttttgcatcttatgataaaattccactgcgatacggccgaaacgataagtgatatatcgataatgaagcacacggtgaagatcgcattccaacggtcgaaacggcgctacgatctgctgtttcgccctgtattcttcaattttctgcttaagcttttcctttttttcctgaagtgtacgataatcttcatccgccttgcgtacaagctcaaacatatcgtcaagaccgagtttcgtatccggctctactgtttctgcattcggaagatatccgacaaattcatttgccttacttaacacttccctgtaggggttcagctccacaaaaggtcttaagttatctactgtcttaagttccgacagcgcagactcaagctgaatctcataccgcgaaagatactgatcggtaacacggtcgatatcatttcgcggacctgatatattaataaatttcatctttacgatcatcgggttctacctccaatgtatgctgccgtttctcccggattcagtccgtaccggacgcattccataacggttgtcagctttttcaattcttcttcttttaagaagagataggtgttgatcgcggagaccgaatacggattctttcgccggtctgccgtgtacagatgatgcagacagtccgcatacatctgctccattgtcaaattttgtttgaaattataatgccgggcataagttgttcttattacgacattttcaaactcctcgactcccggagcctccaccatatctttcactaattctgttgacaatttatagtgtatcggaatcagcatcagatagatatccgcgggcttcatattgtaatactttttcgccctgtagatccactgaatattcaaaagatcgatctttgacccacgatctctcataaacagctcaagatccgactttttcaaaatcttcttctgctctttccatgtagatgtataataataaagatccaacgccagattgtaatcataaagagtcacattatcggtatcttttatttttttcaacggagcgtaatactccgtttcttttagattttccacaagctcatctgtcgttctggctgtgatcagctttccgatagatatttgcgaataccggtcaaaaaacgcacttttataattaagatcaaacggtttcttataatggttgatcacgatacgcagacagtaattgatcagctcgatctcgtatcctttcatgatcagcttcataaattctctctgactctgcccgcagaaacggtaaatctttgtgtaatcgtgataaagcgactgcacaagcaccttctctatgtttcctcgatggatctgatcttccgttaaagtgtcaagcacttccgcatacgccgtatttttccgcagatagtccgcaatatccggaacacttcgtaaatttgctatatccgcaaactgctccggcgtcaaaagcttcgcctccattgcccggatctttgtcacaatcccgctgtacttaagtaaatttcccataagttacacctctgtgatccgtctcaatatctcatgcgcatattctgtatgcttctcttcatattctttccggaggctgcagatcgtatcctcacttgcgccgctgctgctgttaagaactctcgactgttctttttccaactgttcccggattttctcaaggcgtgctttcgttttattttctaagtcctcgtcaaattttttccgtttttcatcaaattcctgtccaagtacgtctttttgctcttctgcatgacgaacaatcgcagacgctgcattttcaatttccgtcaatttatccaaaatagcgtccataaaaagcctcctgtcagcaataatatatccctatgatacaccttttcctccaaaatgcaagccacatcttccaaaaatgcgctccctttaacattcccttaacatccgtccatgttatcctctgcctaaacaggaacgattctcaaacatccgcaaatctttgacctgacatatgctgcatattatgatacaatctagtataacgaccaaaatacaaggagacacatatgagacttagaaatattccccgcgccgacgatactcttcaggcacattttactgtaatcaagaatccgaaagagttccgcggaaactggacttcggttttcggaaacgaccgtccgatacggatcgagatcggaatgggaaaaggacgcttcttattaaatatggcaaaaacctatcctaatatcaactttatcggaatcgaacgatattccagcgtcctgcttcgggcagtagaaaaatttgacaccgaagaattttcagatttgccgaatatccgctttgtctgcatggatgcaagagaactgccggaagtatttgccgaatcagaagtcgaccgcatttacctgaatttttccgacccatggccaaaatcacgtcatgcaaaacgccgtcttacatcaacagagtttttatcccgttatgaaaaagtcctcccaccgcaaggacttgtggagttcaaaacggacaacacccctctttttgacttttctctggaacaggtaaaggaagccggatggacgcttcaggcttttacatacgatctgcatcacaacaaagagctaaacaaagaaaatattatgacagaatatgaagaaaaattttcttcaaaaggaaacccgatcaataaactgatcgcaatgagaaaataacggcggcagcacggatatgctataaaaagcagggtgagacgcttccaacgaacctctccctgtttttttcatataatatagaaagatgtatgagacgctttccggcctcgcttatttaagctgtccgctcaatccgttccgttaaaaggagtttatatgaaacgaaaacatcaaaaataccgtctctgtgaaatatgctactgtcatccgagacttaaccgaaaacttcttattatcaaaaattcttttgatgaagtgtacaaaatcttaaattcagacttctgttcccgcaaacactcctgacaaacaactttttattctcatgtacacacagccggtgacaaccgcaaatacagacaaaaacaatactattttttaacaaaagatgaaaagtaaaaacaaatcggtaaaataaagacgaaaataaaagaaaaaataaagaaaatcgaatttttttgttaaaaagggttgatttttcataaattttaaattataatctttcttgcgttgtaaaacaacatactattgcatgcgcgattagctcagttggtagagcacctgactcttaatcagggtgtccagggttcgaacccctgatcgcgcattctaatcactgtttttgcggacttgagagccgcggggacggtgatttttttgtactttaaattcaaatatccgtctcttccccattacaaaaagcggacagctcaatcaccatccgcttttcttatcgatttactatttacatcacttacaggctttctacttttccgcaaacaactctcaggattgttctcaagtcttcgatatcaacagttccgtttttgtttatatctcccgcctgtttctgcgtttctgtcagttgtgtctttttacaaatacttctcaaggcttcacggacatcgccgatttcaacctttccgttcaagtttacatcccctttgacaacttcaacttcatcttttacaaactcgacttttacaatgcctgatgaagctgtaatcgcatatttcatagtagtaccagtataaacctgaccgttttctttgtacacttctccgttaatcgtccagtttttcacagaataaccttcgttcggagatgccataaattgaacttctgtattcggaagaatctgcgctccatttgataaattttctcctgttgccgcattaaccgctcttaaagaaccgtttgaaccggattcatactgaagcgtgatcttctgttctgtgcttgaatcacctttgacaataatttttacatctaccgagccttccaaatagtgatctgtagctgtcgcatgcacagttacagtcgcttcacccgcctttttcgggatcagcttacacgatctgtctgcgtacgcctcttccacgtcacaaatgtcagggttgttcgctttaaaagtcacgattcccggagctgccccctgcaggaatacctcttttgcatttcctcccagttcaactgtcattaccggacttgtcacagcgatcgggtgtttcactttctgatagtttacatcaattacatactcccgcttttctttctcattcttttcgtaaagagacgtctcgtaataaactttgccgtccgctacatgcaaataccagatactgcccgaaacattttcttctaactcaaaaactttttccggctctgtattcttatcaaagttccatttccatacagctttcggagtgttgtagtaaagcatcccgtcataatatgcaatttccatacaacccttgcctttattatactgtgacaccggccactcatcctcgatctcaacgaccagttctcccttctgagtcgggtcttccgaatcatacctccatattccgctctttatcactccgtctctggggaatgatccggcaacatataaaccgcctttatatgcggccatttttctggaaacccatttccactctacgttgtcataagttgtatcgttacaaatttcatagccttctctgttccatgtgtgatctgaaaattccgtctcacttttcaggaaatattcatgttttacagggtggcttttttcctccaacacacagcttccgtcatcccatgtcgcgtctacaaaataccattttccattaattttaatctgattccacgcatgaggctggccttttgaaactccactcactactttacacggaatattcaggcgattcatgtaatacttatacgccaatgcatatccttcacacacacattttttctcaaaaatggcaccttcaatatcatgggccacaaaagcgcccaatgacgcactgtactgaattgttctaaccagatgatcatgcactacaagcgctttttccagatcagtcgtacagttttccgtcatctcttcaaccatttcccattcccgttccaattcttccgtacggtcaaaaggacttcctgtctcgccggaataataaggataataagttttcaaaagtcctgtttgcggatctgtatcggttatatcgtttcggatcgtccaataatattccggttcctcatagtggataccgaaaatcaccttgttcaattcttcatgcgttattttgtacgcggttaaatcaatcgccgtctgcttctttgcccagcagtctttcagatattgatctaacggaagcagcttctctttagagtttgcttctgcaagctgtacttctgactgcactgccgcctgctacgggttttcctgtgctcctacgacggacgtccccgcaatcaatattccgccgcaaagcgccagtgcgcccgctcgttttttccaacctcttttccatgcctcatagtttttgttcatttttctttttcccctttaccttcaatctgtcttatgagtcgctatgctgcactctatcgttttataaaattcttaacaagttgctccgcctttcaaatgtttctgcgctcttatgttttcatctttgcgggctaacagtccatctcccaaaagctgttcctgaacattttcaaatccgagtctttcaaccgtatccgcaaatcgctctcccgtgatcccctgttcccggaacaaaagaattgctttttccacaatatcaagcacttcttctttatctgtaaacactttttcaaggtatcttccccgcgctactttcttgccccagcgtccgcctatatatacgcgataccccgaaacaaattcttcagtcacaccaaacggacatttactgatgcaccttccacagtgattacatacattttcgtcgatcacaatctttccgtccaccatttttgccgcatggatcggacaatttttttctacctggcaaatccggcagccacggcacttttcaagatcgacccacggaactttctgaccgataattccaagatcattcagatccggttttacacaattattcggacatcctcctaccgcgatcttaaatttatgcggcagcttcacatcgctgtatccatggaaaaatctttcatgaatttcttcggacaatgcaaacgtatcgatcagcccgtactgacaagtcgttcccttgcacgatacaaccggacggacttttgagccggttcctcccatctcaagtcctgcctgcatcagatattcccgcagcggttctatattgtcataaggaacgccctgaatctccatcgtcagacgagaggtcattgtcacttctccgcttccgtataactgcgccgcctcggcaatcgtgtgcgcttcttcggctgtaatctttccgtttcttgtgatcacacgtccgttaaatttatccggcgtccttttatcctttaaaaatccaagcgcttttactctcgtctcgtcttctttagagacagcttcttctatattatttttcacttttacatcattgaaaaatgttgctccttcaagaacgactgtattcgtatagccgtaatgacgcaaccggttttgaagaaaatatcctcttttgccctttgcacagacaagaagcagtttctcctcttttccaagtcctttgatttcgccgtttacagctcctaagtttacatataccgctcctctgatcgacggctccggcgcaacatcgacaaccgtatagccttctgcttttcctgcggcatactccgcaggagtcatgctgacgatcgtaccgtccagtttgttcatcaatacataaacagcctgcacaaacggatggattgctgttgagaacggcggtgcatatgcgaaatccgcattttcaaaatcatccagaaccgcgcccatattcaatcccatcactgcgatatcaaccatcttatcaacagagcccggaccaaacacctgaacgccaagcagttttcttgtactccggtctgcaatcagtttcgtaatgaaaaacgaagcgtccggataataatgcgctttatcatccgtcggaacaagcgccgtaactacatcgtagcccgcttcttttgcctgcgcttctgtcagtcctgttcttccggcattcagacccggaagcttcacaacgcctgtgccgagaactcccggatacgacttctgcgctccggcaagtacctgtgccaatgtacgtccttccagattcgccgaagatcccatcggtgaccactgacgttttcccgtcagacggttcttcaccatcacacagtctcctgccgcatatacatcatccagattcgttttcatctgatcgtctgtaagaatcgttcctttgaacatctctataccgctgtcatttaaaaactccgtattcggacggattcccgcagccatgatgatcatttcacacggcagatttccggcagacgtcttaattcccgccacacggccctgtgtacctctttcatatatctgctccgctttcgttcctgtaagcacgcggattccctgccggatcagatgtcttttcgcatagagcgccatctcaggatcaaaaatattcggcaggatctgatccgcaaaatcaatgacggtcacctggattccttttgcctgtaaattctccgcagcctcaagtccgatgaaaccagctccgatcacaaccgcttttttcacattgttttgttctgcatatgtacggattccttctgcatcgtcaggcgttctcatcttaaatacgcctgccagttcttttccttctatcggaaggatcgcgggagatgctcctactgcaactactaatctatcgtaggaacagacttctttctcgcctgtctgtacatcctgcaccgtcacttgctttttttctgcgtcgagtgcaaccgcttctttccccgttcttacttcaaccccggtcagcgcggaatatttctgcggagtattcacgatcagctcgtccctgccctcgatcagtccgcccacatagtacggcagaccacatcccgcataagagatatctttatctttcgtaatcacagtcacatcaatatttctgtcttcccgtttcaatttcgcagcagtttttgttccggcagccactccgccgatgattaatatcttcattttgacgccccgctttcttccatattcagttgatcgatctttccgcagacaaatcttaagatcttccttaaatcttctatatcaacgtttccgttttcatttacatccgccgcctgcttctgaagcgctgtcagttctgtctttttgcatatacttctcaaggcttcacgaacatcgccgatctcgaccttcccacttaaatttacatcgcccttcacaaatgccggctcatcttttacaaattcaactttcacgctgtcagatgaagcggtgatcgcgcgctttaattccatgcctgtataaacgatgccgttttccttatatacttctccgtttacaacccagtttttcacagaataaccggaatttggagacgccgtaaactgaacttctgcattcggtttgatctttgctccgttttcaagtattttccctgttgccgcatcaactgctgctatacttcctccgtctccggcttcatattgaagagtgatcttttcttcaatatcatcccgctctttaacgatcacttttacatctaccgcaccttccgcataatgatccgtcggatctgcatgaaccgttacgatcgtctccccggcttttttaggaatcagctgacaggactcgtctttccacacaacttgaacgtcgcagatctcaggattcttcgacgtatatgttacgttccccggagccgccgactgcaggaacacattttcaccgcccattacaactgtcataaccggtttggttactgcgatcggatgctttgctttccggtaatcttcgtcaaacacatattgccccttctgtctctctcctttttcataaacgcctgtctcgtaataaatcttcccgtttgcagcctctgcatcccatatttcgcccggaatactctgatccagttcaaatactttctcaggttctgattcaggatcgaaattccatctccatacagcccgcggcgtattgtagtaaagcattccgtcataataagaaagttgtgaatatcctcttactacattgacagagttcagctgccactgatctgtgatcggaagcactaattccgcttctttctctatattttccgcatcgatccgccatataccgctcacttcttttccgccgacgatcaacgatttagagcggtacagtccgccctgataagcgtacattccctgaagatcatttttccagtctaaattgtcatacgtcgtatcgctgcaagtttcatacagttcgctttccttgttccatacatgattcggaaacttattctcactgcacaaaaaatactgatgctttacgtcatgactgttcgccacatcatcccatgtcggatctaccatgtaccaattcccgttaagctgaatctgattccacgcatgagactgaccatttgacgttccgcttacgatcttgcacggaatttccaaacgattcatataatatttatacgcaagcgcatatccctcgcacacagcttctttctcaaaaattgcgccttcaatgtcatgagccgccgcctgcagtctggaagaatacacgattgtatcgcacaagtgctcatgtactaccagcgctttttctatatccgttttacaatatttcgttttttcctttacaacttcccattcccgttccagttcttcgctcctgtcaagaggttttcccgtcgttccctcgtaatattgataatacgtttttacgaagcctgtttcctcgtctttattaatagcagtgttgcgcaacacccaataatactccggattttcataatgtatcccgaagatgaccttattcagttcttcttcattcagtttatacgcgcttacatcaatcacctcttgtttgttcttccagcactccttcaaatattcctcgatagaaagctgcaccgtttgcagctcctcctttgccaatcgtatctccgtttgatccgccgtaaactgcggatgctcctgtgctccggcgacagacgttcccgttattatcattcctgcacagagtgctagcgctccaacccgctttttccagtcctttttccataatccatattcatttttctttttcccttttctctacgctcttccgcttctgttttacagaccgatattatacagacaggctaacatttaggaatataattgtcaaccatattccgcatattttcacccttttttctgacgattattttcccctcttttattccttttctccttcggttctccgaactgttttcctcgtttatgacggtgcaaaaatccccctctccggatgatccgaaaagggggattttatgtttttatttgattctattctgatgagccgctatcttaacacggttactcttttatctatatcttctttttcttttttatcgggttcgctgactatgcctccaaacggcatctgagctaccagtttaaagttttccggtatatcaaaaatttccttcacccgtgcatctattaccggattataatgctgcagcgaagcgccgacattcaactctcttagcatagaccaaacagcaagctgcagcatcccgtttgcctgatttgcccaaacaggaaaattatccgcatatgtactgaactgttcctgcattttcttaacagttgcctcgtcatataaaaacagcactgttccggctccggctttaaacgaatctattttttcccgaggtacttttccctcaaaaacattgtaaatttcatcccacagccgatcgtgtttttcaccaaatgcaagcacgattcttgcacttttcatattgaatgcatccggcactaattctgtaacttcctttatcttttcttcaatctctttttccaaaaccggcagattcttatcaatgttataatatgttcttctgttttctaatgattttatgatgcccataactgcctcctcctttaacagtacgtctaaatattctttctttaacttaaattccctttttgcgaaagaacataaaggaataatttttatatcgttttttctcgcttcttcaaccagtttagcaactaatctgcctgcgattccctgtccgccataacttttttccacaaaagtgtggtctatgatccatactttatccgacttagcatatgtgctttctccaatgaatttttcatcatcgtatgcggccgctctgttttctttttgttcatatataatttttatcactgtcgattacctcctgcttatacaatacattttttcatttacgtttgcgcctttttcatcatgctttttccagcctgctgtccggtacgatccaagtcaaagcgatcgcaatatatatcaaatacgaaatgaccggaaaataaaaagcaaaaataatagcggcggcatatgcgataatagaaagctttccttttaaatcatttccgatatttcggaaaatttgagagtcctttccattaatctttataacttcagcctggactatattgtaagagacagcacacataaagagtatgattccataaaataaagccggtaaacttttatacggatttagtcccatccattccgttgccatcgggatcaatgacatccaaaagatccaatgtaaatttttccataacaatctacctgatactgaatctgtcatattaattaaatgatgatggtttgcccaatatatccccacataaataaaacttagaatatatgctaaaaatgtcgggaaaacctcttttaccgcatccaaagttaaatctttcggtgcattaagctttagcaccatgattgttataacgatcgctaatacgccatcactaaaggcttccattctccctctgctcattatacttttccttgtagttcgtattaatactctgctgtttctttgatgaatgtattgcttctaagttctaaaaacgccttttgaagctcttcctgcgtattcattacaatcggaccggcccatgcaaccggttcattcaacgcccttgaattcatatataaaacttgagccttctcattcccgttcttaattgtaagactgtctccttccgttaatttgacggctgttttttcctctatgtgctcgccgtcaatataaacgtctcctaaaagtgtaaagaccattaccgaatcatcctcttccatcgtaagtgtaacttctgcatcagcatttagatggatatcgtaataatccatagagagataatcgcctttatagccttcatgttccccatattttccggctaaaagtcttatctttcctccttctatttcaatctcctttatatcttcgtttttaatactattgtaacttggcttactcattttatcttttgccggtaaattcagccacaactgtactcctaaaagcctttctgccgccggaaccatctcctcatgcataattccggaacccgaattcatccactgaacttctccgtctgaaatacccgcttcattcccaagactgtctctatgaaccatcttacctctcgatacataactgatcgtttcgatccctctatgcggatgcattggaaatcctgctgtataatcgtcgggattaatgctatcaaaagaatcaagcattaaaataggatcaaactcttttgttgtcagattccccaaaactcttactaattttacgcctgcgccatctgttgttctgaatcctttgactttagtcttcacttttcttttcattataattttcctcctattttcttcaaaagatacagcagtttttccttttcttcctgatctaaaacttccatgctttctgctatcatcgcttcatttcgaggtacgattttactaattacatcatatccttcttgcgtcagatgcagtatgcacacgcgtctgtctttctcgttacacattctttcgacatagttcatttttactaaattgttcactataagaggtatcgttcctacactgcttaagattctttcccttacctctcctacactcatatctcccttgctgtagagagcctctaaaaccataaactggctaaaggttaaattgtactccgctgctatcttggatgtctttttatccaaggcgtttacatttctgtgaagtccgatcaatatcttcatctcagttcttcccaaaaatcattcacctccttaagcattttatatctaactagataatatctatatagatatattatatt

SEQ ID NO: 7713 - DNA, 453 bp, Unknown
  gut microbiota DNA sequence
tacagacgatgatggagatggatttacggatatagaagaggaagaaaaaggtactgatccaaaagatccagactcagttccgcaggttgatccgattgttgcgccgactataggagaaatagaagatcagactgttgtagaaggaaatgcgattacgccggtaactccggaggtgacggaaggatcgaatgtaacagtggagggtctgccggaaggagtgatgtttgagaacggaacgattcagggaacgccgaaagtgacatggaacggatcggaagaaagcagagcaattacagtgacagtaaaggcggagaaagacggagcgactgccagagagactttcgtgatcacagttcaaagagatacggacggagacggagagccggatatcacggatacagacgatgatggagatggatttacggatatagaagaggaagaaaaaggtactga

SEQ ID NO: 7714 - DNA, 251 bp, Unknown
  gut microbiota DNA sequence
cgtttccgcctgtgcttccatttccgtttccttcaccgtttccatcgccgcttccgccgtcgaccggtttcagattctggattgccgtattcaatgcaagcgctgcctgatcgacttcatcctgatctgcatctgctttttcaagaactgcctttgcattttgaagagccgcattaaactctgccttaccttcttctttatactgtgtcagatcaagcgcttccgccttgccgattgcctccttaagcgta

SEQ ID NO: 7715 - DNA, 564 bp, Unknown
  gut microbiota DNA sequence
gttcgataaagagaagtttttcaaagggaggtgaaatccatgaaagaagaaacaaccattacctttcttgcagcggagtgcggggagtttcatgggatgggggagtgtatcgaatgtacgtctttaaaagaagccttccggcattaccagagattttgcaaacgttcccctcagatgcttccgtctttggaattttccctgcaccatgcagaggatcctctgtataacgagggagaatatccattggctaccggggagaagggaaaagagttactatcctatgttccctactatgccaatcatccgctggtgcaggaagcggtaagggaattggaacagctggagagtcagcagaagaaattaaaaaagcggggaagggaacgttagaaagtacagaagatgggaggtgtgtgattgaaagatatcaaagaaaaagtgcgggatcaaagtccaaagatccgcaatcctgcctcccggcttccgaaagaactggtgcgttctgcgatgctggagacaaaagaaaagaccagcatcatggcagataagatcggaagagaaacggga

SEQ ID NO: 7716 - DNA, 22792 bp, Unknown
  gut microbiota DNA sequence
aacggcttctaggcggtacaagcctttcataagcacgtccgatgtacagcagactccgaaggggcatgttttcgttgaccgtagactgatgctcgccgaatatgatcacttttcctcctgcgtcaaaagaaatatcgttttgaaaattcatatagatcgtattgtctacacggaatctccgaatcttcgttccttccggcaacggcttatcatggattgcattaaaaagcgcgatctcgtttgcttctgctgattcatcctcatagaacagatctacaaagacactgtttttaatttctctgttttctttttctgccataggctctcctttcatgtgcatgaacgaaccctgtagtacaggcgggaaaatgcttttaagcttgctgcttttaggtttactttcgccaaaagtttttcctctgaaaaagaaaacttttccctttttaagaccttctcttaaaaatcagtatacgaaaaaaagaactgttctacaagactatccacgcaaaaactgttgttgtattgtatcgggtaattttgagggaattcctcagaccggcgaaactgccggtatctttcacagaaagaatttctgtgagtagacttactatagcatatctatcctctaaaaacaataatatttttcatccactccatttagaaaaaacactgaaacaaaaagtggattttagccttcactcattaaaaaacataggagcacgggaactgcaaaaaggggctgtcgctttaacgattagtaaatcgtgaagcggcagcttcctttttctcgattttctctatataattgcgctgtgtctattgaaacgatagtttttttcgtaaaaaagccgtactttaacacaatccaaaactgggtatctgtaggctgcggtccgactgtcagccatacaatgtattcagagtcaactccatgctgtaaattaaatactggtttcaactgtccatttcccattgcatcttctttcatccgcataaaggttgcatctggatctgttttagaataactgttcctttttccacaaatatgcagttttttttgtatatccttttaaacggtccagatagtcttctaatgtttcgatattcttttgcagccgagtttttcgtttcccgataccatgtacaaatacaatgttttcttcctgttttaatgcatacagcttttttcgcagccgttttacatgtttcattttaacagtatcaccgtaaacaatctgaataccgtaaagctgttcgcattctgcaataagatctgcgattttaatcaataacttctcctgattttttgttactgcttttttccacacaaatgtgtatttattcgcacaggtttcgatttttgtgccgtctataaaaatcgattctccggaaatttctccaagctcataaagaagattagacatttcagcgagaatccgtttcgcacacggtgcaaaatgaatactgcgaaaacgagcaaaagtggcataatcaggaactggtttaccttctaaaagatacataaagttaatatcccgtttacagtttaattccatagcctccacaaactgactcagcaaccgcacagaatcgtctaccggaataattgtttctaagtttaggtttctaagtttaaagggagttttagttgatatccctcctcatttaaagtataattcttgtgtaataatataggggtttgcatacttatattttacaccaacagccagacttttcggagcctggctgtaattttttgtatagaaaagaggccgcgcactaattacttagtgcgacagcccctttttttcgacatttcaactttttgaagtgtctattttattttcttttttttactctgattacagaaacgcccgcaaacattgccactgctatgaacatcatcataaatggtactgcaaatggtgttgcgtctcctgtctgaacagttcccggtttcacttccggcgttgtcggtgtttccggtgtctttccttctttcgtcgtcgctttcacagatgctgccgctgatttatttcctgctgcatcatatgctacaacttcgatcgtgtactctgtcttcggagtaagttttgcgatctctgctgtaagaacatcgtcttttactgttccgattgacttgccgtttacaaagatttcgtatcctgtcactcctacgttgtctttagatgctttccattcaatcttcactgttgtatcagttttatctgttactttcagatcagagggttttgtcggagcttctttatcttcttccggcttcggatctggtttctgctcttctttcgtcgtcgctttcacagatgctttctctgatttatttcctgctgcatcaaatgcttctacttcgatcgtatactctgtacccgctttcagatctttcagctctgctgtaagaacatcaccttttactgtttcagcaagttttccgtctgcatatacgttatatcctgttacttctacgttatctgtagatgctttccactcaactttcacagttgtcgtggttgtctctgtttctttcagatcagacggttttgtcggagcttctttatcttcttccggcttcggcgaagttgcaagaagcgcttttcttgcatcctctaagtctttctctgctttatctactgctgcctgatctgtcggattttcaagaactttctgcgcagccgcgtatgcagcttcaaatgcagctttttcttttccatcttcaaatgcgtctaatacaactttgtctgcattgtttaattctgcttccaattttgttgtatcaacttcgcctgatttcaccggagtgatcttcaggttatcaagaatgaggtcttgctgtccgtaagctcctcccggctgttttgcaccgtttgcataaataccgaaccatgtctgtccgctctcgcttccggtaaccgtaaactcatgatgacttgctttacctgttcctgccgttgccgcaaggtaatcattatctgttgcgttgttaaaactctctccatctccaagcacaaccgcatatgcagatgatcctgcctcataatcgaattctactttatatgtctttcctgcttcaaatcggaagttctgcggaatcgtatgatacaaaagacctgttcttcccgaaccgcttccactgtcgcagtgctgtttcagcgaccattcgccctcaattacatcattgatcacataaccgccccagccgacagatgtatattttccgttatcctgagacagatgaagctgtccgtcgccgcctctttgtgccggtcctaaaacaaacggataatatcctgatgttacggattcaaaatcctgctcgaaagaaccgtcttctttatagttttcaatcttcttgtcgataattctgatatcgtcaaagtatgttgctccatcacctgccgcacggctgatcgtcaatgttgcagtttctttttccgctgtaaacggaacgtaaactctctgcatataggaagcttcattgccgcctgcatgtttctgatcacttgccacatagttctgagcgattgatttcgtcgtatatgcagactctttgatcgttcctgcatttacttctaccgtcgctttactgtcgcttctgttatcaacataaacttctgcaacataatctttgcctgctttgagccctgtcagttttgtgctgactgcaacgtcttctgccgggctttcgattgtcagacgctgatcgcctgtccatgcttttgtaacttttacggcatcgttgtctgctccgctccaaacgtctgcatccactttgtcgccgtctgcataagagttgaatcccggatctttcactgatgtcgtctcaccgaagttaactgtatcggctgtcggcatttcttttccgtcagtcacgattacgtaagctgtttttgcttttgcttcaagcgtgatctgtccgtttgaaaccggaaccgcgatcgcttctccacgtccctgatctgacagctcatacattgtaagatttcctgtaaatccgtccggcacattccatgtagatgttccgccttccagattgtagtgatacagtttcgtctctttcgtgtcgctatctgtccacggaagcagataatagaaatgatcgtttgtcgcacttaaaactgttttatcattcaatgtgatctcgcgttcgatgatctcatcagatctttgtgcttcatttcttgttacaactactttatcatcaccatttttcagtgtgatctgtttttcctggtttccgaccggtgactcgccttctgcgtagttctcccaatcgattacctgatagtgctgaaggaattttgtcggaaggttttcggcaaatgtcaggtacagataattattgaaatcctgatctccgccccatccttcaaatccttccagtttatatccgccgagaagcgggttgtcagccgctccgccatgtcctacccagttaagaacctgtacgtctctcatgtcgtttctgaggaaacggatgatgtcactgttcaaaccttttgtagctgatccgccgtatggtccttctgttgcccagtgtgaccacgtggaatcatactcgccttcgtacgggaactctgtggagaatctccatccgagagagttaatctcttctgcgattcttcttgtctcccacgcattctgataccatacgtcaagatagatgaagtccatattgtcggcgcctgcttttttcactgctgccgcaatctcatccgccgatgcaagtgttccctgtgaatcttttacatattcgcctttatcccagtcgagacttaaaaggttcgtattgttaattctgtcaaataactgtgcaaatctcttatatcttgcctgtgttcctaaatcccagatcttattgatcacgcgggactggtcaagccatccccatccgccctgctgcggtcccatgatcatatcatcgttgaaagatctcgcttccggataagcttcctgtgcattgacatggataccgatttctgtatcatactcatgcgcaacgtcaagaagatctctgaaatcatccacgccgccttctctttcggagatatccgcatactcggagttcgcagagtcgtgaccttcatttccgtaacctttcagcataacagcctgcggaagtccgtctgttgccaaagcaactttcttgatattgtccgctgtcaccgaatacgggtttgttacagcgcttccgaagttcataacgattctgtagtttacaaggtctttcacatcctctgatccatacggaacattgatgatgtcacgataagcaactgcggcatcctgccagtcgatcgtcttgtcttcgttcatatcctctgcgatacaaacttttgcatatggaagttcactaagcgggtagtcatatgtagctgcctgtgcctgtccgcctttatctcccgcctcgtaataccactgagcgcttgtaaggctcattgtgtcagctccgctgttcatgatgactctcagatcgtcttctgcctctgagttgctgaacagacctgcgcttaaattcttgtttgtcaggaatccgtatacatatcctacagatttctgcgctacgaatccatcgtcaaatgtaataaacttatctccgctcttctttgtatccgtgctcttaacagcgcctgcaaatgaagcgttttcttctacctgatctacagacagaagattcaactgcggaatgtcgatagaagcaatcttatccgttccttctttgcggtcgatctttgtgatctcccatgtaagatcattgtcttttacactgatctcgaccgtcatgttcatattgatattaatttttgtttcttcatcttcaccttcatatttgagggtcatttcataagaagctttcgccccttcaatcttagccttcacttcaggagtgatctccttgccgttgatcacaactgtattcacctttgcaagatctgattcgtttccacggaagtaaacgtcatcttttccttttacttcatatcttgcaacaaccgggaagttcggtcctacatacactttcatgtaatcagactcgatggatttataattcttaaggtcgatcggcgttttctcggaaagtgtaaagttaaatacattttctccttccgccgcatcctgaacttcaacctcttgtgttattgcttcgtatcccggacaacttgccgcagctgtataagttcccacttcaacatcttcgatctgataagctccgttatcatctgtttttgctgattttgaaccaaaacgaaccgttgcgccttttaatgccgctcctccgtcttttgccgttacagttccggaaacagttgcgagattgatatattctgaagactgtgactgtccgtctctgtcttttgcaaattcccatgtatcttccatacatgcagtctcatttactttcgcatctgcaaatttcaaagactggtttgccgttttcaccatcacgcccggatgaccttttcctgcgtttgtttccagccagtttcctgcgttctgattgttcgttgttccgctgattccgttgactgtaactgtcagagcttccctgctcatcgtaacagagaacgtcatctcttttccgttttccggagtctcgaaatctccgttcaaacttccgtatgagcctgagccgttctgccagtaccacttggaagatgaatcatatccgatatacaggaaatcattatcatttacatatgaatagaagaaaccgaagtttccgctgttgatcggtgtaaatgacagactaaatacgtctgccggcttgatcgtgcgatctttgtcaagcagaagcgccggtcctgttgctcccgcatagctatgtcctccgccgttctgagagcctgtccggatcgtgatccatttacgtcctgccggaactgtttcttcgtactgtgccgccggatcccattcctgacctgcaagattatctttatacaatttccatgtattgagatcctcttttgtctctcctacaacaacatcattaaaataaacgtctgtgtatgcatctccgaatgtcgcgcctccgactccgactttaccctgaacgtctttaagagcgacaaagttcgcctccgttacagttgcctttgttccattgacgtcaatttcaaggccattatctttatagcttaacttaatttctgccaactgacctttttcaagtctcggaagagcaagcgtatcattctgccaagcctcgtttccgtcctttttgtactgccacttccagcttccgacatcatacatcagaaaagcccagttattgtcatctttatattttgtgacaatacgaagccttgttttgtctacgtcgctgttaatgcgaagtttcaaactatatgcctgatttgtataatcagctttttctgacaaaacaaatgcttcaggtgtagcgcttccgaaatgtccgtttgcattaccgcttccggatttcagatgtcccatcgtgaccggctctgccttgacagataatgccggagcagcgccgagcactgtcgtcactaccatcacgagcataagtaaagctgcagttactttgttccacttctttttcattatcctcttttcctttctttaaattttaatattagctccttcaggacatagaaagagcatcctatcttatatatcataactctttcacttttttcagtatttacactttttatctttaatgttgatcttttgtttgttttatttatttgtactcatttttcacctcgatttttgtatgtattgcacaatatattacctctcaatttgtaactatatcacatatttcttctgttctttatacaacaagagggagcttccctctaatatctcagtgaaaaactccctcttgtaatgtccttattgatcttaatgtatctaatgtccgcaatgtccgccgcaggaatcgtgaccttctccgtgtcctccacagttttcatgatcgccatgatgatcttctccgtgatggtcgcacattacgtcaggattatatgaaaggtttccttcaatcagcgcctgaaccgcactatccgcagaacctgaaactcctccatacagtttgataccagcctctgcaagtgcgttctgcgctcctgcgccgattcctccgcagataagaacctctacgcctctttcccgtaaaaatcctgccaaagctccatgaccgcttccgttcgtgggaacaacttccgatgatttcacttcgccgccttcaacttcataaagcttaaaagcttccgaatgtccgaaatgctgaaaaacctctccgttttcataagttactgctactttcattttattcatcctctttctttataatataacctttttcataagcgtaatgattccgccgtgacatagcgaatactgtaaatttatttatctgtaccgcccttctctgtctcgcctgcgataacttccgcttcttctgtcgtctacctgacggtttcttatttgggtattttttctcctgccggcactgctctgtcgtcggaaagcattttctcccgtctgctctgtatttgaccgccggcgctctaatgcctttttgcgttttcttgcaagctgtcttgctctccttcgtttcacttgccgatatttcagcagactgaaaagaactgccaacaaaatgattaccaaaagaactaccgctattaacagctttacatatataggcatctctgttttttcttctttatccgtacttttcttcccgacggatttcatttccggctcaatattataccctgtttcttccttaatataatccgccgtcagtttcacttctacagttccgacattttgacctttgtataaataggtcagctttccggcggcattttgcctgtcagtaatcgtaatctcatgctccagagatgaaacgtcaattcctttcggcagaacaacatatgcatcttccgttttaaacttcctgacgccatcgggcttgtcgtgttcattcaaaaacactttggaaaaattcgcatatacataatcaaacatcgcccttgtatctacatacacatctccctgatcttccaagacaaccgcaacaagctgcatatctgcattatctgccatagtcacaagagtcgtttttgcctgatccgtatatctggtcttgccgcccgtacaataatcataagaataatgtgcccctacccaaagcatcttgtgattctgttggaacgttctggattcattcacaaggtttgtaggcggaatcgtataatttaaagtctgagttacttcccgaaacttgtcaaactgatagactgccgatccgatcaacgccatgtcatgcgccgtcgtataatggttttcatcatgcagaccatttgcattcgtccaatgagatcccgtacatccaagttcctcgcaacgttcattcattttctggataaacgtctcaaaacctccgcccatctttttgccgacactttctgcgattgcataagacacctcattggcagatgcaagcagcataccgtacagcgcatcgttcatactgagtatttctcccggtctcatcccgatactcgcatctccgtattccagaaacgaaacgctgtcttcggaaaaataaacttcgtcatccggatccgcattttccaacgccacaagcgctgtcaacagttttgtaatgcttgccggataatgcttatcgtttatttttttcccgtataaaatcgccccgctgttcatctccataacaatcgccgaatttgcatatacatgcggtccctgcggccagttttccaaaccgtttgtctcaggaacggcatcatatgccgcctgtttctgcaccgcgatcgggtcaactacatcttctgcgtgtacggctcttgacggaatcaatgctgtgccgatcacacagactgctgccagcactgccgaacatatacggtttctatattccctcattataaccctccacatcgatataacccttcagattatttttctctaataatttattataacgatattctttttgttttacaagttttagattttccgaagtattttcatccgcttccagaagggatgtcaattttcatggatgggtttcagcattttaatagttctctgcatgtatttcaaaataacttctcggatgcgcacaggtcggacagatctccggcgccgcagttcctactacaatatgtccgcagtttctgcattcccacactttcacttcacttttttcaaatactgatgccgtctctacatttttcagcagcgctctgtatctctcttcgtggtgcttttcgatctccgccacaagacggaatttttgagcaagttccggaaatccttctctctcggcagtttccgcaaaaccggcatacatttctgtccattcatagttctcgccttctgccgccgctttcaagttatctgccgtatctccgatcccgttcaattctttaaaccacatttttgcatgttctttctcgttatccgccgtatcccgaaacaacgcggcaatctgttcatacccttcttttttcgccacagacgcaaaatacgtgtatttattgcgcgcctccgactctcccgagaaagcgtttcttaagtttttttccgtctctgttcctgcatatttacttcccatgttattcaccctttctgctcctctcaaaagaaacagcctttccttttttatatcctattataacacagtcagcttatattaaacaattaacattcaaatgccggatattatgtcagtccttcctgtatattcttctttttctacatagaattataaacgctcccgaactgaatatcagtaaaagcaatgacaaagccgccgagcttgtatctcctgttttcgctccttccgtcttctccgtttccgtatttttatccggcatttcaggatgctgcggcgcttccgtgatccactcgctttttggtttcgttacaacatcccatatatagctgccgtctatttcttccggaatactgatcagatacggcgatgcctgataactgccctgcttctcatcggtccacacctttgtctgggcaatcaaatacaatccctgttctaatccgccgatcattgcgattccattctcgtccgttttcaaagcgtttccctgtatactttgccgaaccgcatagttgtataactgctttgcctgttcgtttttttcagaagattcgattccttccagagaaactcccgcattaccgaaatctcctgcaagcgtccactttccatcctccatctttccgacaaaaaaaacagaaaaatccgcattcgcaaatacaacctcttcattttcctgtgtccttccatgatattcaatctggatagagcctacattttccgccctgcaggataaacttggaatcagtattccgaatacagtcaaacaacctacaagaatatttttccatctatttttcatttgaaacatgatcttccctccgtgttttttctctctttttctttctctttttcacatacgcagcaacaccgcaaaagaacaaaataagaaacaaaatgaaaagtcctataaataaaactttcatctggaacggtaatcctattgcgattttttcatccggaactttttccactgcctcttcataaggaatcctatacccccttacaagaagcctgtgtgtattcaccgcatagggtgtacaagtaactaatgtaacataatcttttcccggtacgatcgtaagctcctttgtattttccggcagcacagtaagtatctgatccacttgataggcaaatgtttcaccgagaactttaatatagaagatatctcctttttccaaattatccagatccgtaaacaacaacttagaaggaagtccccgatgcccggttaaaactgcatgggtactttccccgcctatcggtaaagacgtcccctcaaaatggcctacccccgactgaagcaccttttcttctgttccgtgataaatcggaagttctgcattaatcttaggaatacggatatatccgatcattcccgacccgtttacatttaacaggctttgatatctctcgtctacctctttctttatagatgaaaaaggatctaataactcaatatttcccaaaagctcttcgttatactgtcttgctgcctcgagcatttcacgcttgtcactttcgcttaaccgcactgcgttttcatcataagccgaaatcacttttgagccgttcttttcataaagatagttgctgactgtcggatataacagtacggagaatgcaataatcaatcctatcacgcgaaaaatatccccaatataaaattgttttttctctgtcttttttctgcgcatctttatttcattctccctgctgttataacgaatgggaagactgcccgaaggcagccctctcatccatatgtctgaattataaatgattaagcacgttttcttctgctgatcacgaagcttaccgcaataccgagaatcatcacaactgcaatcactgtgaaaattacagtacccattccacctgtttccggaagaagtgttcctgtagtattctcaatgtcgatgattttatcatccaccaccccatcattttgcttgattgtccagtcattcacattcgtagtatcagattttgtaattgtaattttaaccggagctgtcaacttgttgtaaccgtccggagcctgtgtctccactaaccagtagcttccttccgcaagaccgtttaactttaagttcattcctgtgcctactgttgtcccgtcaccgatagattccatatcgtacatcttattatcgccgacctgttccgggtctactgtgtaagtaccgttagaacctgtaactgcgattgcattctgattattgtttgcatcctcttcgcttctataaagacggaatattgcacccgcaaggtagctattctgctgatctttgattaatttgtgaatctgtaccggataagttggtgttgttactacgtccggtgttgttgtagttatgttatccggatcgttaccatactctaagtgagcgctgttgtttgtctgtactacggcatcagcattaacttttgcatagtatgttactgtaaattcctgacccttactattctgattgtttctaatccactcagataaatccaaagtcattatgcggttattttctccgcttaatgtagctgcctttgtctcagcctggccttcaccaatctttacagatacgttataggatgtgccttcctgtgctgtaccaactgcatcttttacaaaatcaagaccttctgtcaatgtatcgtggattttatatgtatacttatcatatcctgttgtatccggaattgttcctttaatcgtataagttacaacctgtccgatttcaacagttgtagcatttgctgttttgtcaatacttggagcctgacctttcaggttcacagttacgtcaacgtcatctacagatacgagagatgactgaatctcttttgttcctgtctgatataccaggtagtaaccatagtctaagttttcaaacttatattctgtaacctcgcctaattttttggaagttccagtttctgccgttcctgctttcaatgcagctgctgtaaagtcatttgcgaatttctgaattcctgaaggattttccttatactcagcaagtttgttatataattgttcacttgttgcttccttcgataatcctaaagctgttgcgattgcatttttatagtccgcattgactgtataagcataatgtgtatcgcttacactcaaatcaaagagcttatagactttaattgtctgaccctttaacgtgtttccttcattgacgtttactgtcaaatttcctgtttttattctgtctgcggcaaaagcagttgttgccattgccagtgtcatgatggctgctaaacacaatgccatcatctttttgattgagttttttacttttctcattctttgtgtctccttttctttttgttctttattatttatagctactctgacttcttgtgctttttctcttcctgtattccgtagctgtcactaagcaaagaagcagaacacctaacgtgtagagcaaagcttttcccattcctcctgtttccggaagaaggctgtcaaaccagtttttcgtatttgtcaccgtaatactgtattgacgatcgcctttgtaagttatttctgttgtatatccgtccactttcatctcgctgacatgatatgtgtaataatatttctttccatccgtgccaacatgatatgctgtatattcagctcccgtaagaaccttttcccatatgtccgatgtttgtgcatctttttttgtcaaaataacttctttattgaagtttgtatctacaaccggttttccgtctttttcatagcttcttgtaatgttaaagatgacctcattcggacgatctttttcctcgtcccttttccaaacctttttcagacgaagttcaataagatccttacacgggtcttgaacatccggcgcttcctcattgccacccggttctgtcgggctgcttgccgtattgttcatcagaacagccatcgcgccgtcctcctgataaacattgacaggtatttgccctgcgctgccgctcatcatagcgtctttcagatcggtaaacttcacaactttgtctttcgtcatatgccggattgtatatacattcttccatgcatcagatgtttcgtagttgtgctgaagttccttgcccgatttaccaaacagcttctcatatgcggtatcaccattacgatagatccggtaatagttttcattgccttcaatgcctttcacatcgttaaattcccagttggagttcagacttgactttccggtaaacggtccggtcagatcctttgcacctcggataacgtctgcaaagaacatgttgttgttctcaagtaagccttcgttattccatccgacgaaacctccggcaataccgtattgacctgtgccgttggcattgtttccggcgccgcctccatagacgtcatagccgtctgcaatacctgtcactgtacatttatcaatctttgtacggtttgcctttatgagtgaaatattgatttcatttttcaggctttcttcatcgatcgtaccgctctctgagcagttgatctcaatcttactgtctccgatatagatggtcgcaagactcttatcctctgctaagccaaccttaatatccagtccaagcagattcagagataccagtttcccatcatataaagcatcaatttcaataatgcctaaatcaattttaattacctgacctttttgaagttcatctaaccaaagcgccttcaaaatctgattcacaaccgtcactaatcctttaaccaactcggaatccagattaatatttgcaagataagcaaaggttgtctttcctgcgaaccctccggcgatctgaccgcttgtcacctgttttaacccggtgactttattttctgacaatcttccaagatctgcatatccggtaaatcctccggcgatttctgatttatttttctggtctatcgtattattactgtgtacagtaaagccttcgttgacaccttcgacactgcatcggtctacatgagaaccgaatacatccattacacctgcacctgcgcttaataaatcacccaacgcacctaaattgtccaaatcgaccgtaccgctctttccgagatgtccgataaatcctccggtgtagttcataccgttgaccttgcgaagatttgtcactttggaatctttgacagaaccgttaagcaatgcgcctccgaatcctccggctgaacccgaataaacaggatcgttgacatattctgattttttactgtctcttgcctgtacttccagtcctgcttctgcagaaccggacacatcggaatgataaacataacttctaaacgtatctaatacgcttgttcctccaagagtcaatagggcgctcaatatacttgtattcccattgctaacttgcaatattgcagatacatctgcaaggccgacaaatcctccggcgtattctcctcctgtcacacttctgacattcgacacatgaacgccgctttctgactcattcatttctccgataacagctccgttgatctctcctgcgaaaccgcccgccgcctttgcataggctgtattgcctgtaccgtttgtataagcgccgttgataatgattccccagtcatcccacgctttgacatctgcgcctcgcactgtagaaatagttgcatctaataaccgtgcaagatctcccggagttcctatcagatactgaagcaatccgccaagtaatccttcactgcttgccgtgtctaaattcgctgcgcttgccggatcgatctgtcctgcaaatccgccgattgctttcgtaccttccacttttctcaaattagccacgaagcatcgcttattattcggatcaggtacggcatctgttgcactgtacgtattcgctttttcagaccagttgccccagatctgtccgccaaccatatgaccgacataccctccggcataaccgactttttctattttcaaggttgaatccttaaccgggattcctgttgccttcaccgtcattcctgactggaaacctgtaatatccgaatttcttataaccggaacgaaagtctgcacggcgctgatagaatttgcaatatccaaaccaatcaactctacttttccgacttctgcaacgccgccggttttcatttctccggcaaatcctccggcgctcttgtatgccatcacagatttcgcatcccatgcatgagcattggtaaccactcctgctttcatgcgtccgacgtagcctccggctacgcctgcttccatatcctgtctgccgacgctcgttctgcccgccttaacattgtaaccataggcatattgtgtgattaatgcctgtaactgttcttcattctcaacaggtgtacttgtgaactgatctccgtaaacaccgttgttgccgacagcctccgcccacttgttccatgtgtccatatccacttttctaagcggtccgtaaacggctgtgttcgtttctgtcggataaacagctccgagaagacttaacacattacttgttttcagtaagccaaacagaagctgtaagtttcctgttcctgccagatccgccgtttccatcaatccggtaaatcctccggcaaactcgccgccgtagactgaacgaatacgaatcgtggcacattccttcccgccgccttctgccgcatatcctttaattcttccaccatggttatagcctacatagcctccggcaagacctctcacacactgggtgtcagtgatgccgtcggcacgaaccgcgccgccgcaaggcacgctgctcgtctgactgtcttctataatcggaatgaaagactgcaccagactggcaagactatctgttacatttaacagtccatctaaaataccggcatcttcgattacggaagcaacatttcccggttccatgataccggcataacctccggctgcctcgcgtccgataatatagttgaataaattcgcatcactgtttttgatgatggtaccggacatttctccgataaatccacctgcttttcctaacttctgattcttatcatctctgccatctgccagtacggaataaccgccgacacatccgttgacatcggagttttcaatggtagacgccactacatccagcgccttcaaaagattcgtcagctcgatgttcccaagaagctttaatccgcctccgactgctgccgcggaatcaatatccacacatcctgcataacctccggcgtattttccacctttgactgcatattgtgaatccgttccgaaatagctgtctccatttgcagattccagactatcgcccggcggcgtcacctttgtatgctttaaggatgtcacatccgaatctttaatctgcacaccgccgccatatccaagataacctcccgcatagctgtctgtatccgtcgcttctacagtaaatcctttttctgtcgacttcacgcccgccgattgaatgatcgggatgtaaacttgaagtacatcgagcagctgaccgatatcaaggtttaaaataccaccaagaagattcagtccatttgaagaagccgttgcccctgcgtcaacttttccggcaaagcctccggcgtgagattcacccttgactttttccagaccataaactgcataagcctctgtccttgtactgttatcgaccttaccgctttgcatttctccaaaaaatccgccggcataatcagccttgacctgaggttcttcattagctgagcaaaatgtaacggtagtatttgtatattgaggtatcaaatacggaactaaatccaacagcccgctgacatttacaattccgggaagtttcaatgctccgtctttgtcttcctgggccagacctgccagcccgcctgtgtggcttcttcccacaaagcctccggcataaccttctttatcttttgcagcttctgcataaactgccttcagatttgtcacatgtgaatctgcaatttgtaccccttctgcttcggaaataaagcctccggcaagaatagattcgccttccgttatctcaacctgtccactggctttgatgactgcgccgttctctgttccgctcacagatacattggaaacttttgtggcaacaccatcaaccagactaagtaagctgtcaactttaatcaatcccaggcccagaagatccagaccgccttcttttgcaagactgcctgttcctgcccgtccggcaaacccggcggcataatttccggcagtcacagattgaataccttcaattttaatctgctctgctgttcctccaagcattaaacctgctccgccggaagcatacttattcgatgcttcgatttgaagatcattaccacctagatctacattcgatacagtaaacgaaagataacttccgattcccagtgtatcgttcaatacgccgaccgcatcagctacagtaactgctcctgaaattccgcctgcataattatttgcttttacaaaacttaccccttgtatcgtatttttctcagttccagaggatgtgatctgtacgccgtctccctgtccgatcagaccgccggcataatctgccgctgcctgaacactaaagtttgttccactgacagaacttccttttatttcagaaggctgtgcaccgcttaaggaaagaagcacacctagttcttcttcatttcccgaagcaagtaactgttccagtagttttgatacagattgcaataaagtatcattttgttcatcgtttgaacctacggccattccatagcccaacgtagctcttcccgcaaaacctccggcatattgattggctttaaccagtttcactcccgaaacatttgattcgatgctgctactatttgccattacgccattaaaacctccggcataactatctgtcgccgtaactgaaaggtcgcttgcgtctacatgacaatttctctgtgtagaacgaatatcaaacgttttgatttccgctcccagatcacttaataatcctttaacctgtgcatctttttcgattccggcaaagcctccggctccgatatctgccactacctgattcaaaccggttacagaacagttatttatatctgttcctgtctggcttcccacaaatccgccgttgtaattgacagtttctttccccgttcctgtcgttccgatcgatccctctgaaagagaaacactgctgttttggatcagtggcttataatagccattcggcaataactgtccaagaggaacatcatttttcaaaagaatcgtaatcaaatctcccagtcccacgcccggaagaatattcagcaaggttgataatagctctacgactcccgctgtcacatttccgagaatataggttgcttctcctgatgtatatccgacaaatcctcctgtcattccttttacattcgttacagaagcgttggttaccgtacagttttcaacagaaacatcccctacaatacgtcctgcaaagcttccggtcgcaaacatatccggactgctttgctttaatgtcaataagtctttaatgacatctcccagttttaagtttccgattaccggaaccagtccttcaaggattccacttatcagatccagaattccacccaacaatccacccagcacttccaacaatccttctactaatgattttggatcattatttactgtcacagattgattattaactgtaacttgatctaaatggaggttttttactcccgccttccccgcagactcgaaaccaccattcccactttttttcatttcattagagatcgttccgaaaaatccaattccgctgtctttttggatatccagttcccctgtctgattcacttgaatattactaatggtaggcacgctgccctcctgcatattcaggcgtccttccatttttcccgaaaagtgaagcggtgtccagtcatcctcttttccgtcggaatattctccctgcaataaatcaatatctcgaaaaataatataattggcatccggagaatattttagcgattttaattcattgcttgcttctgatagagaaggataactttgaacgttgttttgattaaattccttatccacgataacaatatcatctgtccgctcaccgataagacctgctaaaagatcccctaatatcggtatatcaaacaaaggtcctaacagtgcatgtaaaatgtcaccaagcagctctcccagtggtccaagcaagaatccaactaatccttctttatcatattcgatattcatcaaaccttctgttttgtttgtatttgcttctgaaaaatagatgaaatctttttgttcaattccactttctcccaaagcctcaccttgttttagattgaagtcggcatcaccgggataatatggggtatatgttattttatcatcccacggccaaggcaggtctactatggatttcacatacagcattggggttacttgcatatactgattgcctttttctttaggcttcgcatcttgtccgattgctctaagctgccattcgtttccgataagtatatatggctctccttcaactttggtataaacctgaccaagatactcacgccctccaagctgtcccgcatctgcctgaaccgttgcttctttcttaatcttttccgcctttagttccggcatctgttctgtaaaggacggacttaacacataattatgttctttgctgtaagtcagatattcctgcgccgcttccgcgctctcatctgccaaagttccgtctttatacagaagctgacctattcccactttttcagggatcatatcataagacatgatcggttcttccgccgaattttccgaagcgatcaagagaagctgatagttattgtaaacataaaccgtatcgctttctttatcatacaacggagcatcctctttcggagcttctgcaaatgttccggtaaatccctccggcaaagtccacatcgttttctcagtcagcgggatttcattcatcagcatgtaatccgcatctgacgcatatgtaaccgcatttccgccgtcaacaacttcttcgcctgtgccgaacagttctttctctgtatcgttcatccgtacagaacttcctgtaccgatcgcctgaagctgttcgatgttgtaaatcttaataatgccgttttcatataaatctgcgtcttctgactgctgatccgatgacggatctgtctgtccgttttctgccgaacctgactgatctcctgacggctgaactgcctgtccgttttctgccgaacctgactgatcgcctgacggctgatctgtctgtccattctctgtcagctctgactgctcacccgacgactgaacgatctgtccttcttctgacacgtctgactgcatcggcatttttgcttcctgcagctgctgtatgagctgcatatcgatcggcggccctttcgctattccctgcgccgaaacagtcaccgtctgcagcaatacagaaaataccaacagacatgcagttccctttttccatattttccacttaaataatttttttatgtctctattcttcactgtctttttttcacgctccctcttgttccaaaatttctttcaatgaaatactgaaaaattgggtctctaatttttcctgaacttttgcgtaatatcttcgcaccgcacaaaaatctaccgcctttcgactacaataagcatcatcctccagacatcggtttatttttgtcgtgctttccataaggcgtatcacatctcccaatgtaatatcttttaaagtcttattaagtcgatatccgcctctggctcccagatctgcggaaatatattctgcctttttcagttttgaaagcactttctcaagatatcctcttggaattcccatttcattcgatatctctgtagcggaagcaatctttttacattgccccagatataaaacagttctgatcgcataatctgttgtcacgttaagctgcatagtccgcctcctcataagttatatacaaaataaaaaaacgacctccatgtgaaagaatgccgccatcatacttacaatatataaatctctttttatataatacctctcaggtaggtattatattttttaacataacaaatgcccacatatctgactatgtaggcatttaaaagctttgatcgctgaattctttcctctgttctatttttatactacagtaaaattataccccccccc

SEQ ID NO: 7717 - DNA, 15819 bp, Unknown
  gut microbiota DNA sequence
gtatatttttcagtttttttacattttctttacaaaatttaaacctgtatcacagtccccacacatctcccttaaaatataaaaactctctttcccacctcaacacaggaaggtcatatgcatttccttccttatataaaatgcaaaaagagagttttcatatgttatattattttcggttcttttttataaacaataaatctttaaattcatctaaagcaatctctttccctgcccttttcaagcgcacggcttccaacacttcggaataacgttttttcgtcagagggtttgttgccattgtcacaatggacagcagcagacagacagaagttcctattacaaatatattatgaaacccttgaactgtctgcatactttgcacggataccgccggattatatccgacataatctataatcatccctaaaacactgacgccggacgcagcggctaatttctgggatacggttgccatagaataaaacaacccttcccgtctttcaccgctcatcaattcatcgacttctacgcagtcagaaatcatggcataaataacctgatacagtgcgtttaacccaactacgagaatgctcgtcataatgatcggcgctgcggttgaacccggctttaagaagaacaaagggaacacgatcatacacaaaagccagattcccatagaaatcgtccatgaaacaacttttgaatatttcgtagaccaatgatctatcgggaaaacccaaaacaacgctacgatccacataatgatattcacaagggatacctgcgtgtcgttcaggttcaggttatatctcagataatataccaatactccgagaaaaatcgcctgtgccaaaattgcaaatataaacgcaatcgttaaatgaagaaacggcttgttccgaagaggaccttccagcatttcttttatggaataagatttttttgtaataatatctttattttcgtatccttcactcgccttataaccgatccagatactaagcgtacagataatgccgaaaaatgcaaaacatacggaccaagcttgtctgctgccgccgacaacaggctctaaaaaatcggtatatgccatgatcccgccgccgattgccactccgatgatcgcccaaaacgttcttattgtagccagcttacttcgcaggtcatagttatcggtaacttcgccgcttaaggaagtatacggaacgtcgatcaaagtctgaaatgtataaaataacaaagcaactataataaaataaattttctgctgaatttcaacaaaatcccatgccgtaaacagtagccacgttacaattccaaacggaatcgcacatactaataaaaacggtcttcttctccctttacggggatcgcggttatctgagatgattccgaccaaaggatctgtaacagcatcccataaagttccgatcgtcatgatcagacctgcgaattttcctgacaatccgacaacatttgtaaaaaaatacaagccatatgtcgtaaacatggtaaatgtaaaaagcgttgccaagccgggcagtccatatgctatcgcccttgcaggtgacatccttttcatcttacttgcctttcttatcttcttttttcattcctgccacagcaaatgagaacggctcaataatccccatcagcctgtctatgatcggtccgtatgcaacaactgcgatcaatgttccgattccccatgacgatcctaacgccactccgattacaaataagattgcataagatatgatcagaccgattccgtaactctttttaacaagatcagccgccataaacgcaaatatatcggatgtctgatatcctaaaccgatcgggatataataagccaatgtcaaaataataatgatcgaacctattaaaatacacgctattttcagtccgacactcatttccggagctgtcggcagcatcggtgcaagaacgtctaaccagaaattttcaaaaggtcctattaaaaagcaccacgcaagagttcctaaatgtaccaaatctcttcttacaaagaaaaatacaaaaaacatgattccttcaaacacaagagcaacagtaccaaactgaacgtgaaatacatttgataacccaatctcaaatgttgtcagcggatcacatccccattccggccaaaccaaaagcgctactccaagagcacagatgaaaatagaagggataattgcgagcagccttctggcataactccagatttttttcgcatccattattcttcctcccactgtaccgcgatcgctcttacaggcgaaccatcgcatcctataagtttcatcggcaatgcgataatatacggacgttcaaaatcgatctgatcaaaaaatgcccagttttctccgatcatcaatcttttttcagagaacagatcgtgtaccggaaattccgttccaccagtctgatccgcattgatcgtatcaattccgataaagcgaaccccattatcaactaaatattttgctacatctccgtttacatatggatggtggaaaaattcatctgtacctcttgttttataccagtttgtattaaagagaacgatttttccttcacaaatttcttctttatacggttcgatatcttctaatgtaattgcttcgtcagcctttttatccgttactcttacaacaacagcttctcccaagaagaaatctaattccatattatcgatcgtttcaccgctgtttgaaaaatgatacggcgcatctacatgagtaccggtctgtgttcccattaccaatgtagatagattgtaaccttcgttttccagtgtagtagcaactgtaacagacggttccggatctcccgggtatatcggtgtttcggcagtaaattcccatgataaatctacaatctttttaatttttctcataatctcatatcctcattattcattgtaagctttttttaacagctccaagtaatcttctttcgtaatttttctggcattgtcatttgataaaacattgttagcagatctttccgcgatcgcctcaaatctctcttccgtgattcctttgatttctttaattgtaggaatgtttaattttctgttcaaagctttcacatattctaccgctttcaatgcgtattgctcgtcagacatactttcttctctttcgattcccattgcatccgcaatatctgcaaaccgctcaggacatgccggaatattaaattccatgatatatggcagaaacagtgaatttgccacaccgtgcggcgtatcaaaccaagcgcctactgtctcggcaaaagcatgtaccgctccgacatttgaagaaatgaacgccataccgccgatcgtacttgcgatcatcatgtttcttcttgcttctctgtcttcgccgttctcgtatgctttttccagattctctgcgatcatagaaatccctttcagcgccagagcatctgtgatcggctgatgtaactgaaccgtatacgcttcgatacaatgtgttaaagcgtcgacaccgcatgccgcagttaaagatttcggcagtccgatcgtaatttcaggatcacagatcgctaagacaggaatcatatgaacaggatctccgactgtcattttgtactgtctttctgtatctgttataacggcacaccatgtcacttctgctcctgttcccgaagtagacggaatgcagatcagcggaagtatatttgtatccaattccgtatctccccactctacagtggattttccgttcgtgacaaccgcgccgacagctttcgcctgatccatcgcagatcccccgcctaacgcgatcagtgcatcaacatgattctttttcgcaaactctgccatttcgtcacaatcttccgctcttggattcggcttcacattcgtcagcaaaaagttttcgattttcgcatcatccaaacttttctttagttttttataatgctcggaagacgctaaaaacggatctgtaataaccaacacttttccaaaaccaagattcgcacattcttgtcctgtcgtttctattactccatacccttctataatacgtgtagcatgaaataaattattaacttccaacatacttttactccttttctgtttctatacgtattattatatggtatattgttactatatactcaagcctatttataaaatttccattttacgcaggaaaggattgctattatgtacgaaaatctattaaatccaaatgaattttccagtatttcaggagtttccaagcaaactttacttttttacgaaaagaaaaatgtatttaaaccgatatttaaaaatgaaaaaggattccgattttacagtttagaacaacttgatattatagtaactatacaggccttacagacaatcggcttgtctctcaaagaaattcagaattatatagaaaacagaaacgccgacttgatctatgatctatacagcaacagaatgatccctctgaaacaaacagtcaataaatacaatcggacaatagagatgatgcacgtaaaacttgatctgataaataaggcgaagtctgtcttattagatacgatttatctcgaatacagacccgccatccaaattgttaaaagtaaagaaatccccgcagatgcaagcgatacactccaatataaaatcttaggagaacatatggcctaccgcaaggaaaaagactacagcttaggacatgcggtcgccggaatcgtagatatgaaaacagcgctgaatccgaatatcaataaaactcaatataaatattactatacaatccttccgtcagatcacgatgaaaaagattatgacattattgaaagcggaacttatatcgtaatgtatcataaaggtccgtataaccaaacttatcaagcttatccttttatgatagattatgccggaaagaaccattttgaaatcgaatctatgatctacgacgaaagcttaatagacgaaactacggagtcagatcccgcaaactacattactcagatatccattaaaataaaagaagtaaaggggtcagattaagacccttttactttcttcatatgatgaaacaacataatccgcttcgcttacgtcctgaccgttccctgaaccggtaaatgccgcgacttcgatccctgcctgtttcgcggcgtgaatgccgacagacgaatcttcaaacacaagacactcctgcggcacagcgcctaataatcccatcgcctttaaatagcattccggatcaggctttctctcggcacacatatcaccgcagacgatcacatcaaacaagtccgtcatctgcatccgattcagtcccataataataagatgggttgcagtagaagatacgagcgcggttttcactccgctttgtctcagcccttgtatcagcggaacaattccgggaatcggagcaatatttccgttttcatatgtatttccaagttcttttcgtctccgtgtaagctgctctactgtcactttgcgaggcgcccgcgacaggaattctataagaagttcctgatcatgcgtaccgatcaacctctgcttgtctttttccgtcagctcaactccgaactctttcagtgcaagaccgagataatgactgttgctttcttccgtatctgcaattacaccgtcaaaatcaaataaaacatattttttcttcataaccgctccttttccgatccccgattgcttctgatctattttccttactttccctatggaatatcaggcgaataaatgacgcgcttcttcctggatttttttgatctctacttctgaaagatcgcaaaaatcactgttttccatagaacatcccgaatcctgaacataaaccatctttgtatctttctgtgtgatcgaatagaaccaacattctttcggaacattataaacttttcccttttccataagtgtcagttctgtttcaaattttccgtcctttctttctgccgtgatcagaatcgcttttccgtttacaaggataaactgttcatctgtcgtatgatgaatctccaggtgtttcagtccttcgatatcattatccggcttccagtttttaatgcttacaagccatttttcattcgtatatacacatttgattccttcttctttgttttcatatacattcggtctcattttttcctccgttattatactatatttttcattatttttaactggttgatctctcttttacagttatctttttatagctatcctttttatcttttcttttatccttttgtatcttacctttggatctttacacagttgtctttcccaagatcggaactccgtatccgaaagctccttctaaagcacatactttcgccgcaaataccgcgccttttcccattgccgtctgaagtctttttgccatttcttcatctgttccctcaacgatctttccttcctttgacgtttcaagaagcgaacataaaaatgctgagaaataagaatctcctgctcccattgtatcgatcacatcgtcggcgtgtactgcaggcgcatataagatcttatcattataaagaacgtaagatccgtcttctccaatcgttccgagaacaactttcactccgtaagactgtgcttttctcatttctttttcccgctcttcatctgtcaaatgcgcgcacgacataatcgcaactgttacatacggacatatttctttcaaatactcgtctgtccaacgagtagaaaaatcatatgcaaccggaacgcccgtctgatataaaacaggaagttctttttcaatataagaattcagatttgtgtaaataagatgaaaacctttgatatactctaaatcttcttttgtaaatccgaaatcatgctcttttgcgataccgcctttatttgaacctaaaaatactctgtcagtttctttcaaagttacaagagcgaatccattttcaccttcataacgacggcagtgactgtcatcaattccgatttctttcaacgtatcctgaacacaggctgccacttcatcatctccgtattttccaagatacgcagactccatattgttcatctttacataaacacatgtattaacgcactgtccgcccggatacatctttcctcttgacaaatatttatcacatacgttatctccaactgcaataatcttacaatgctccatctttccgattcctttcttttctgacattttctgcaacagatcgcctaatcgaaactgtcaccgctgaattgttactcttttttcatgccgtattttgtttctttgttttccggcatttcacgatatttttcgctacttataaggattgaactgctgtataatctctgtcgcacgttgtcttccgcgccgcatgcactgcatgatatcttctcccaagctgactccgtatgtaaaagccgcgatataagaatcacctgctcctaccgtatttactacttcaactttttctgcatccaacttataaaacttcccgttctcataagcaaggcttccgtattctccgagcatggcaacgactgttttcgcccctttttcgctcgtcttcaccatgaaatttcttatatattcgtcatcccgatcataagaaaagaatgcataatcaagatacggaatgatctcgtcgttactttcctgttccaaacgtttagaaaaatcatatacccatatctgcccttcctgcctgatctcttttatatatctgccgactttcgcccaacgctccgcataaataatatcaaactgttttacaaattccagatcatcgtcctgaagttcgatctcttccatcgcatttccttcaaaatgcagatgctttttatccccgtcaacaagatccatttttgcggcggctgtagggcggtcggtacgctttagtatcctcaaaggaatttctctttcttttaacctctcttctaaagcgtcggcaaacacatcatttccgagaatcgtcatttccgtgacatcaccgccaagatctttataattcaatgcaaaatcaatactgtttcccgtcagatagtaccgatctagtttataataaacgtcaatgcagttatctgccatcgcaagtgtccgtttcataatgatcttaacccctttccccgactacataaaccatataacgtctgttttttatcccatcgtattcacaaaaataaatatcgactgcgtgtccgagttttaatgtgccgtctaaaacaggaaatacgcagtgatttcctgtcagaagcgatttcaaatgtccgggcgcgtttcctccgatcgttccgtaagtcggaaggtaatgattatgatgatacggataatcttcaggcgcgatccggtcaagacattccataagatctttttctacacacggaagactttcgtttacagtgatccctgtcgttgtatgctctgtaattacatagacaattcctttttcgactccgctttcttccacaaccttgcgtacgtcatctgtaatcttgatcatctcaaattctttatccgcacatatcggaacttcttttagtataaaatccatctctctcactcccttccaagaaaccgctctgcattttctgcatatattttttcaagtgtttcttccgagaaaccaagactgtccaatcctcttttacttctgaccgggcgaattctcggcgaacccgaaccaaacataatcttatccgctatattgtgttctacccaaagcgctcccatatcttcggtaaatactttcttgtaaatctgatacggtccgtcaaaattcatcagcgccgtatttgtatagcaattctcatatttcaaaagcaacgccgccgtttcctgaacccacggccagccgacatgagaaagacagatgttcacttcgggatatttacttaaaacctcctcaaattcaatcggacggcaatattttgccagagagttattttccatactcaatcctgcctgaaaaatgatcggccttttatatttcttacatatatcatacagcacaaataatctttcatcacagggatacatatgtaatcttgccgtattgatataaagtcccgccagattttggaacttaaacgccttttccagttcttctgccgccgattcctttctcggatctgcagacgcaaacccgacaaaaaacgtcggatcacattgtacgatcttctcgatctcgtcgtttgatatatccggttctcccgtttcaaacgaacaatctgacggaagcagaaatactttttcaattcctgccaatgcatattgctttttcaaaagttcgatacttgacggcttcatcaaatgatagttcatctgatcgcatcgcttttcaaagcgctctttattttcacagattggtgagaaaagcgccggacgaatatgtgtgtctattaccatttttgtcacttcctcttatttttcgcttttatttttcgcttttatttgccgcatttcttttatatatctcgtttcttatttcttttgcttcattttgttgctttttatttttttgcttcaatttgttttcttctatattgaaattgtttaaattctatgcatcatatctttattattcaaatacaagtctctgaacatcttgtaatgttctttgtaatatatatggttcttttcattcggaacaagtattttccctttcggaagagaatctctaagctccgtaaaatcacgaaacctccgatctccaagcgccgccattgcagcatctccgtatgccgaacactgatatcttttaggaatacatatctgccttccgatcatatcgcatataatctgcatccatgccgcattttttgtgccgccccctgccgtaataacggatttcggcggaaggttcatttcatcaaacaagatcatatgctgaagagtcgaatatccgaccgcttcaagcgcggctctgttaatctgctttcttgtatgtgttccttttaaaccgaatagcattcccgatgctttcgcatcttgtatcgggctgcgctctccatagatataaggaagtatgatcagcccttccgatccggcttctacctctgccgcctctcttgccatcactgcgtatgcattttcaccgcccgctcgttccttcttcaattcttcctcataaaacgtatccctcacccatctcgtcagcgttcccgccgcattcgttccgtctccgatacaaaatgttcccggtatcgtaaattcctttccaccttttaaagaaccgtttccgtttgccgacacataatcatcaacataacgatcaacacagtaataataaaacatagacgaaccatactggaaaaatacagttcccgattctaccaatcctacgctgatcgcttctgcagtggaatctcctgtaccgacgatcactggcgtaccttttttcaaaccactctcttttgccgcctcttccgtcactgtccctgcaatttcaaaagaatacgcgcactccgcgatctgatccggccgacaatataagctacaattttctttatttatcgtgccgtcccgattataaagcggacgaaacgatccttttgccaaaaactgatcgatcacatactttccggttaattttgcagtgagatatgaacttcccgtcaaaaacttatatgtcttttcatacacttccggctcatggtttttgagccacaaaattttcgccgccgtatcgcctgtacagatcggatgaccgaacatttttttgacgtcatctccataatattgagtcagccacttaatctcttcttccgcccgcgaatcgatcccgtataatattgcaggacgcagcggattacagtctttatctacaggcaggcagtccgtaccaagagcgctcgtcccgacacatctgatctcgtcagaacgaatgttactcttttcaagaagaagcctgcacaatttacagaaatctccccaccagactttgtccgcatcatgttcaaaccaaccttcctgcggatgatccattccatgagttaccgaacaatctgcaacagggatcatattttcatcgattaacattcctctcgactcatatgtaccgatatctattcccagataatattctttcactgttttctcctcaaagactcttctttcactgtttttcttatcaaagattcttctttattgatttttccttacaatccttttcttatgtctgccacgatctccataaattctcttacacgctctttatctaccctgccgttaaatacgccgtcttttttaaatgcagttcccatgcagacgccgtcgcagtttcccagtttctctctgacatttccgtgattgcatcctgtattacaaaataccggaacttttctcggcttcgccacttcatgcactctggatagtatcacatcgtccggttctgctcctgctgccgctcccgacacacataatccatctgcaaaatcgccgaacataatggattttgcaacaacctgaacgtctctttgtacaagataagcatccgcttccgggtttactttaaaaagaagtttcatatcttcgattccgagcgcttttctgtgacggatcgcttctccgctgttcgagacatatactccatattctcccatatatgctcctgaaaaacagcttcttccgaattttgctcctgttgcagctccgagatcgatcgttgcaatcgggttttttacgacattaacgccaaacggtacgctgatctcgtcttttaattttccgatgatatacgccatagccgaaacaaccgcgatatccgctaccggctggtacggcaaactgaattcgtttgcaaaaaggattccgtcaacgcctccgtcctgcagcgccagcaagtctttccttgcgtgttctgtaactgttttcatatctccgcaatatcccggatctcccggaagcgcgtcaagatgcagcagcgctataatcggtttctctactccaaacatgtcttgtgtccacataacactttcctccgtataatatttgtttctatgttgtattctcctttatataacaagatttgtaatttataattaatcaaactcgttcgtatttgctttcatccatgcgacaatatcatcgatcgccttatcaggatcgcgataatatcttctgtcgcatatttcaaacgacaccgttccgtcataacctctgtttttaatcgaatcataatattctttcatcgggaaatctccgtctcccggaacagtatgacctctgtcgttaaagtgaatatgctgaagtttatctccgagattatcaaaataatcatctatcgtttccttcgcatatgtcatctgatccatatcgaccattccgacgattgccggagaatcgatctcttccagcatctttgcgatatctttgcttgtgataagcacgtttgtcgtcgttacttttaactcttccaaaagtaacctgacgtctttcttttcgcaatactgcgccagtgtccacaacgattctctgcagtatttccagccctcttctcttggctgatcgaagtatccgaatccggtactgatctgcacacacggacagtcaagaaactgtgccgtgtcgattgcccgctgataataccgaatgcttgattctcttgtaagatcatcctgcgtacagaaattaaccggatacacacagttttcaggcgtcatcgccatcacacttaaatgatgtgcttcaatctcctttttcagctcgatcaatcttaaaagcggataatcgaacagattaagctgcggcgccgaacaatacagatcgatgctgtcgaatggtgaacgttccactttatcaagaaattttttgatcggatatctcaaataatgataattcataggtgcgaatttcattgccatattcctccgtttcaatacttaaaatttgaaaagactgccgcccgttccatacagatacaaggctgcagtctctttttgcttttcagctttctttctatattgccgcagcacattgtcttctgacttcttagaatacaaccgctcctataagaagtgcgactactactgatacgaccgtacatacaagccccggtatcatatagctgtggttcaatacaaatttaccgatcttcgttgttcccgccgagtcaaatgcaagagctgcaacacactgtcccgaagccggaataaagtagttagatgaacatgcgatccaacctgccacgattacgtttgccggaagtcctaaggcgattccgatcggaatcatgatcattgttgtcgaagactgactcgttgtgatcgcacctacgataaataccgctacaatgaaaatccacggatacttatttgtcagcgccgacatattgtctgtaataaatgacgactgatctccgataaatgtatttacaagccagcacagaccaaatgccagaacaaccgcgaacatacctgttctaaataccggctgatcaagaactttgttgctgtccagttttgtaagaaggatcatagccgccgcagctacgagcataaagatttcgatcactgtcgtaagcggaagtttgcttccgtctgccagcgtcggaactaaaccgctgactgcgccgagaagaacgattcccaccatggcaatgaggaagatcgtaacggaaatttttgcttctttgctgacctttttctcttcttttactttcttggagaaatcttcgatcagtcctgcctcaacacgagcctgaaattcaggatcatccgcaagttcttttccttttttgatcactgcgattgccgcaacgatcgttccgatcaatgttgccggaacacaaacaataagtaatgtgaaaatatttactttcgtataatttgttgcctctgccataaaagcaaggataccgactgttgccgccgagatcggacatgccgtgatcgcctgctgtgaagaaacgatcgatgccgaaatcggtctttcaggacgaacgcctgtctcaatggcgatttcgttgataaccggaagaagactgtaaacgatatgtcccgtaccgcacataaatgtaaaaatatatgctacaaccggagcaagtaccgtaatcattttcggattctttctcaggattttctccgctatgcggacgaggtaatccaaacctccgcaagcctgcattgttgccgccgcacagataaccgctatcatgatcaagattactgtgacgggcggatcagaaggagtaacatgaagaataaatgtcataataaacattccgattcctcctgccatcgcaaggaacgtacctcccacacgaactccgataaaaatgatcgccaaaacgataatcaattctatccaaaacataagctaacctcctaaatcactctttagtttaccctcattttgagttttccttttaaagaactatgcgcatattctttaactctacaaaccaatccagtgtattgtattcttttgtatcgttctgtattgttttgtatctgatacaatagtatatttgttttgttgttttgtcaatttgtttttgcaactttgtgtattttacatgaatattaattatatttttgtgcataatgctatatttctattattttgtattatttatgtgtattacctatattttccaatttttttcataccataagcattactgttcgcccaatttaaaagaagcccgcacaatgtgcagactccttttataaaataagttatatcgcttaattggtcataaataatttgtttttatatccggtttttaatactctactttccacatatagcggcgtgttgcaagcgggtgctcgcgttttgtcgcaagggcatggttgtagatcggatatacattgttgaacagcgcatggttgaaatagtcaacaaccgatgcgtctatcgttgacagacccagctcttttgcatcaagaacttcaatgcgtttcgcatactttttaaggaatgtaagagctctttcatctaattctctcgtcgtgccttctgaaatctggatcataaacggacggtttgcatctgtgatctcaaatggaccgtggaaatactctcctgtatgaatgctgcttgaatcaagccactgcatttccataaaaatacatatactttccatgtaagcagctccgtaagaagcgccgcttcccattgtgtagattaccgaatcattcttatattcttccgcaaaagcttccgctctttctgctacatgtttgcgggcatttttaataatgttgctgatcatgccaagtccttcataaaacttatcatagttctcataaccttctgtctgcgctaacagttcaacagctacgagcagcgcgcactgtgttttttctcctgcataatcgatgtctcccgcaaggtgatccaaacttgcatcaaatgtataacgaataatgtaatctccgaactcaatgatctcagattcttcaagccatgtaaggataataactgcggcgcctttttcttttccgagttttgccgcccggatcgtctcaggtgtatttcctttatgacatgccagacatatgattgagttttctccgaaatccttcggtgtactatgaacaaactcgttactgttgatccatgctgaacgaagaacctgcgcctctctttccataaatgtctttgccggataaagcgctcccagagaacctccgcatcctacgaaataaatattttttactccgcctttttcttttttgttttcgataatttccgcaatgattttcttaatatctgtacttacatatgacattgtattacatctccttcttgttgtgtatttctttgtttctaaccagagtgtaatacaatataatacttattgtcaatatataatttattttctatttattatatacatttttatgca

SEQ ID NO: 7718 - DNA, 812 bp, Unknown
  gut microbiota DNA sequence
ctcgggcaagcccggactttggctcgtcgcctatacaaaaaacgccctttacatctgtaaagggcgaattctccgcggtaccaccttatttcatatatgctgtcacacatatatctctcacattctataacgggaactactccgggataacctacttcaatcgttcaatcatccggttcagaagctaccttccatcatcctttttccgaaactgcctttcagccggatcttcttcatcttttgctcaatctcctgcaaagcttccttaaattctccgggcagttctctctggcggttggaataatgtactcctcttcatcaatacctttaccttaaaataactaccacatactatagacataagcgccgtatttgtcaagatttttagagaatcttaagactttaacgcaacagttcagccatatagtgttcgggaagcacaaaacatgcttgcatgtttttgcgagcggacatctgtatgtgctgagcgcctttttatgagtaaaacagtggcggcagccacaataagcacgcagtgcggttttacgaatggcgcgggcggaactgttgctctcaaccaagcctgccatacagtgttcgggaagcacaaaacatgcttgcatgtttttgcgagcggacatctgtatgtgccgagcgccagtcgccccccacccgtaaaacgggcaatgtcgttaacttaagagtatttgttaaaaaaagctgtatgctaataaagtgattggatttattgttacaaataatcgcatcacaaataggactgctgatttttttaacagtccgatagccttttg

SEQ ID NO: 7719 - DNA, 886 bp, Unknown
  gut microbiota DNA sequence
tgtcatgcagttttcaaggttcaaatatatctgaaaagcatttctgcaatttactcaaaaaatcttcattttaaccttgacttttaatagttagactttcttaaaaagagtatctcttaatctttttgctgtcaactgaatttgttcccgatcagctttaatacacttatattgattttgaagcaaacgctgatattttgaatcttccattgcatcaatatcaataagaagtaatgccgattccacaaccggtatcatattattaaagttgattgcaccatatattccctgattaattttcctaaaatcttttgtgttcttcattttacgatgcttttctttgggcgatgtaaatggtgtataatattttattccatcaatctcaagcaccacgcctacatacggccgctttccctttttattatctgcaacttttgcatcatattttttcaaataattaatgtattcatctttgatattataaaatttcatttttcctcatctgtcaaaaaaagagacgacttcactcgcctctttttcaggttctctctttatggtggagactcaccgcttttttaggttctctctttatggtggagactcacctgcttttttaagtttccactttatggtagaaactcacctaagacaattctttgtctataataagtatatgcaattctccctaaaaaatcaatataattctataatttttcaaaaatataaacctcccaaggagcattccctgagaggtttgtaaaatctttttgaaattgtacgtcccgaaacgtatgattaacgtttgggtaactgagaacgcttgattttactggattcttggaatgtggtgttgcaaacacgttacaaacacagggcttctcattac

SEQ ID NO: 7720 - DNA, 205 bp, Unknown
  gut microbiota DNA sequence
tttcgtaaaagtcttagccttagacagacaaaaaccgataaagtggatgcccatacgattgctcttatgatgatgtctggagtaaacttacagtcctactcagacacatcttatcacaacgaagagcttaagtcattaaccagatacaggtttgataaagtacaagaacgagcaaaactgaaaacttctatctcacgccttgtta

SEQ ID NO: 7721 - DNA, 985 bp, Unknown
  gut microbiota DNA sequence
ttttgcaaaaaattcagataagatatagtgtagagcgatagatgtttttaagacttttatgttttgtttgcattaatgttcaactgctatgattaagttgtcagttccatcggaagatcaaaaggtacttggcacgcagaagaactgtaagaggatgcatttcatgctgtatgaagagggagcgacagcatccataaagtcagtgggcgaggaccacaggaggtagcaattgagaacacagatcatcaatgatttaatgaccaatatttttttcaatctgatcgagacagaggacaggattgcagcggatgagcggtttgaaggtttaagcagcaatgatgccctggagatctataaggtgctatctgaccagctgatccgcacccatatttatgccgcacatatcggaagcgggatcagcagcagaatcgcaatgtccatactgtcgtccgggagtttcctcttatagaagatctttccgtctcccctgaaggcataacgatattggatacggtgtatgtgccgccattaatgtaaaaggttgctttcgccggatttttcgggtttacttcggtggcactggttaacataatgctggaaataacatccgtatccacacggtacgtatagtccggggcttccagctcttcggaaggcacatctttgtagcttacaatgccgatgcccagggaagagataatggcatcatccgacacttttccagaggtgcttccagtccatgcagggtatccgagatcagatttttctaaaaacaacgcgagtggcaggttctggtgcgtcagggagggaagcacccttcttaatgcacctccggataacttgttgtaaagggcagcctccgttgctgtcatggcatagttttttccattgtgcgtgaagtaggcaatgggttcgatcaccaatttgtaatccccattaatcagattctcaaaaggaatgccggttttggatgcgataaatttag

SEQ ID NO: 7722 - DNA, 249 bp, Unknown
  gut microbiota DNA sequence
gctttttccttattgtagtgtcccttagaagcattcgccagcagatttgtgaggcgagtcagatggcatgaagcaatctgagcagaagaaggaaactcggctaagagtgcgtatatagaaaccatgtgaagactaggaacaagtttttccagttcagggaaaaggatgttaacaaggcgtgagatagaagttttcagttttgctcgttcttgtactttatcaaacctgtatctggttaatgacttaagc

SEQ ID NO: 7723 - DNA, 251 bp, Unknown
  gut microbiota DNA sequence
cgtttccgcctgtgcttccatttccgtttccttcaccgtttccatcgccgcttccgccgtcgaccggtttcagattctggattgccgtattcaatgcaagcgttgcctgatcgatttcatcctgatctgcatctgctttttcaagaacagcctttgcattttgaagagccgcattaaactctgccttaccttcttctttatactgtgtcagatcaagcgcttccgccttgccgattgcctccttaagcgta

SEQ ID NO: 7724 - DNA, 58356 bp, Unknown
  gut microbiota DNA sequence
gaatgtgccgtttggcacttccggtgattgttgccaagcatgcgataaaacagtccggtggactgttttgagtatcggcggctggtcaaagtcgggtttgtccgaaattttggcgcgtgcaaagtgccaagcccctcacttatgaggggcggagagttgaagtgggcttgctcactttgttcaataaaatgagggaaagcaaagaaaggaaaaaagaatgagcaaagaactggcaaagacatatgatccgaaagcgatcgaagaaaaattatatgagaagtggtgtgaaaacaaatattttcacgctgaggttgacaggagcagaaaaccgtttacaacggtgatgccgcctccgaacattaccggaaaacttcatatgggtcatgcgcttgacaacacattgcaggatatcctgatccgttataagagaatggaaggctacaatgcgttatggattccgggaacggaccatgcggctatctctacagaagtaaaagttacgaatcagctcaaagaagaaggtattgataagaaagaacttggacgggaaggattccttgagcgtacatggcagtggaaagaagagtatgccggaacaatcgagaatcagcttaagaagctcggtatttcctgcgactgggacagagagcgttttacgatggatgagggatgctcgaaagcggttgaagaagtatttatcaaattatatgaaaaaggatatatttacaaaggatcaaggatcatcaactggtgtccgaaatgtaagacatctctttcagatgcagaggtagagcatgaagagcaggaaggacatttctggcatatcaaatatccgatcgtaggaacagaccgtttccttgagatcgcgacaacgcgtccggagacgcttcttggagatacggcgatcgcggtacatcctgatgacgagagatatcaggatattatcggcaaaaacgtgatccttccgcttgtaaacagagagatcccgatcgtggcggattactatgtagacaaagagttcggaacaggagcggtaaagatcactccggcacatgacccgaatgactttgaagtaggaaaacgtcatgatctggaagagatcaatgtaatgaacgatgacgctacgatcaatgaaaagggcggaaaatacgcaggtatggaacgctatgaggcgagaaaggcaatcgtaaaagatcttgaagagcagggatatctcgtgaaagttgttccgcatacacatgcagtcggaacacacgaccgatgcggtacgacagttgagccgctcatcaaacagcagtggttcgtgaagatggaagagcttgcaaaaccggcgatcgaggcgctcaaaagcggagaattaaaatttgtgcctgaacgtttcgataagatttatcttcactggcttgaaaatatcaaagactggtgtatttccagacagatctggtggggacacagaattccggcatattactgtgacgaatgcggagaatttgtcgtagacagacacgctccggagaaatgcccgcattgcggatgcacgcattttacacaggatgaagatacgcttgatacatggttttcatcagcgctctggccgttctctacactcggctggcctgataagacggaagatcttgattacttctatccgacagacgtgcttgtgacaggatacgacatcatttttttctgggtgatccgtatggtattctcaggatatgagcatacaggaaaatctccgttccacacagtactgatccacggacttgtaagagattcacaaggccgaaagatgagtaagtctttaggaaacggaatcgatccgctggagatcatcgacaagtacggcgcggacgcacttcgtctgactcttgttaccggaaatgcaccgggaaatgacatgcgtttctataatgagagagttgaggcaagccgtaactttgccaataaagtatggaacgcatcccgtttcattatgatgaatatggatgaaaatattattgacgaaccgtctcatgatctgtttactccggcagacagatggatcttatcggctgcgaatacgcttgcaaaagacgtgacggacaatatggacaaatttgagcttggtattgcggttcagaaagtatatgactttatatgggatgagttctgcgactggtatgtagagatggcaaaattccgtatttaccacaaagaggaagctccggaggccgcaaactgcgctctctgggtattgaaaactgtgttggctcagggattgaaactgcttcacccgtttatgccgtttataacagaagagatttacggggcgctcgttccggaggaagagtcgcttatgatgtccgagtggccgaaatacaaagaagagtggaattttgcgcaggatgagtttgtcatggaacgcgtgaaagcggtgacaagaggcatccgaaacatccgtgcggagatggacgttccgaacaaccgtaaaacaaacgtattcatcgtcagcgaaaaagaagaactgacaaaagcgattgaaggatttaaacagtcggtaatgccgcttatgttggcgtccgacatcatcgtgcagagcacaaaagagggaatagaggacaatgcggtatccatcgtagttcctgatgcggtcgtatatctgccgcttgaggatcttgtggatttcgagcaggaaaaagagagacttacaaaggaagaagagagactgaacaaagagatcaaacgtgcgaaaggaatgcttgcaaacgagaagttcgtaagcaaagctccggaggcaaaagttcaggaagagagggacaaactcgagaaatacgagcagatgctcgcacaagtaaaggagagaatggtaggtcttggctaatataaaaggtttttttacaaaagtcagaaatctgaaaaaagaagatattaaggaacactttaaaaagaggaaagaacgcaggcagatgatcttggaaaaacggcgcaatggaaagttcgccaagaagatgcagccggtttataagtggatgaaccggctgtctgttccgcttcagtttctgcttgcatgtatcattaactttttcatcgaagtcatctcaagactttcgtttggagaggcgtgggcgtatcttacaaaaacgccgcttgtgtttttgtataattcatgcatgatattcgttacatttacgatcgtttatctggtgcgaaggcgtgtgtttacaagaatattgctcagcgtgttctggctgtttttgggaatctgcaacggatatctgctgacgaagcgtgtaaccccctttaatgcacaagatttgaaagtcctttcagacgcattggagttgacgggaaattattttaacacgtttgagcttattatgatcattatcggtgtgaccgctttgatcgtatgggtcgtttcgatgtggaaacggggcggacagtacacaggaaagatgcaccgctggatcgcgcttggcggagttgtcgcttcctttgtcggctgtatggcgctgacaaatctggcgattgacaaacgtgtcatttctaattacttcggaaacattgcgtttgcatatgaagattatggatttccgtattgcttctcggcaagtttgtttaatacagggatcaacgagccgacaggatatggcaaagagacgatggagaagatcaacgaagaagaaaaactgacgaaaagttcgacgggaagatcggaagaacagcgtccgaatattattttcgtacagcttgagtcgtttttcgatccgacagaggtagagtggcttcgcttctccgaagatccgatcccgaatttgagaaaaatgttcagcgaatattcaagcggatactttaaagtgccgtcagtcggcgcgggaacggcaaacacagaatttgaagttctcacaggaatgagtatgcgtttcttcggaccgggagaatacccatataaaacatatgcaaagactcgtacgttagagagcgcggcgtctgcccttaaagggcttggatacggcgccgaagctcttcataataacggaggaaatttctacagccgcgcccaggtatttaacaacatgggatttgatcattacacaagtaaggagtttatgaatatactccagacaacgccgaaaggatgggcgacagacgatattctcgttccgaatattatggagtctatggatacgaccgaagggcaggactttgtgtttacagtcagcgtagaaggtcacggagagtatccgacagaaaaagtgttggaagatccggagatcgttgtaagcggcgtggaagatgaaggcgaaagaaatgcatgggaatattatgtaaatcttgtccatgcaatggatgaatttgccggagatctcgtacgcgccgtggaggaaagaaacgagccgactgtacttgtgttctacggcgatcatcttccgacgatgaatctggaagcaaaagacctaaagagcagatatctgtacaatacaaattatgttatatgggataacatcgggttagagaaaaaggacggaaacgtagcggcatatcaggtgatggcagatgtgtttgaaagactggatatccatgccggaacagtattcaactatcatcagcagcgccgccatacgaaaaattatctggcagacctggaactgctgcagtacgatatcatgtacggcgatcagtacgtttacgcagaagaaggctctccgatgaaagaaggccatatgtatatgggcgtaaaagacgccgtgatctcacaggtgacagaacaatataataaaacatacagtatttacggagagaattttacgaaacaaagtaaagtatttattaacggggaaaagcaaaagacgacgtttttaaataacacccgtctggatctgaaagagtcaaaactttccgacggagacacgatcatggtagcgcaggtcggatcgagcaatacgacgtttcggacgacgaagacgtataagtataacgccggaacgctgaccgagatgccgccggaaaaagatgcgccggaaaacggcagacaggcgtttgtcgttgagaaggaagaaaaagaaaaatgacatacagtgaagcagtagactatatactggacattcccaaatttacaaaaaaaaatgatgcggcacacacgaaagcttttctgaaaacgctcggagatcctcagcggaaaatgaggatcatccatgtggcgggaacaaacggaaaaggttctgtgtgcgcgtatctggacggaatgctccgttcggaacagaaacgaacggggctttttacgtctccccatcttgtaaagatcaacgagaggatcgttatagacggacagatgatttcggatgaaagatttctcgaagtatttgaagaaacgatgcaggcagtggacaagatgaaagaagcagggctttctcatcctacttttttcgagttccttttcggtatggcggtgcttgcatttgcagaaagcggcgtggaatatgccgttcttgagacaggactggggggaaggcttgacgcgacgaacgccgtggaatctccggcggcatcagtgatcacttcgatcggttttgatcatgaacagtatctcggagatacgttggagaagatcgcatctgaaaaagcgggcattatcaagcctcatgttcccgtatattatgcgcagacgacgggagaaagcgattcggtaattgaaaaagaagcaaaaaagcgcggaagtttctgtaaaaaaatagggaaagatgcgtacgaaattcttggaatcgaagacaaacatattgcattttcatgtttgaatgattattatggaactaccacgtggaaattgaacaatatcggtttgtaccagccgcataacgcattgcttgcgatggaggtgatgcgtggtctgttcggagaaaacggacatccgcatttatggaaagaggctcttgaggcggtgagatggcgcggaaggatggaagaagttctgcccggagtatatgtggatggagcacataacataagcgcggtcaaggcgtttgcagagacagtggaaaaggccgggtttgcagatgcggttttgttttccgcggttcgggataaagactatgaagaaatgataaaatatctctgtgagcatacagaggcggcatgctatatcgtgacgcagattgaagacgcgagggggacgcgggcggacgaactgggagtagtttttcggaagtacaccgacaaacccgtccgtgtgatcggttcggtgaaggatgcttttgaatatgcggtgagcagcagaagaggcggcaatgtatactgtcttgggtcgctgtatctgaccggaatgatcgaggggtatctcggcagcagggaaaaccagattcggggaggtagataaaatgctggattacgaagaagaattaaaaaaattcaagccaagccttgaagtggatgatattgaaaatgcggtttatcaggaagacttgacggatatgaccgatctgttaaagcaggtaatggatcagaagaagtagaaagataatggtgggtataaatggaatatacgaaaaagatcgtatatcagtcaaactactggtataacgacggtctgagaaaggcgaagatccgcgatatgtcgggagcgatcatgtctttgcggaaaagtcttcagttcaacagggagaatatagccgcgagaaatcttctcggtctcgtgtattatgggatcggagaagtgccggaagctcttgtggaatggatcatcagcaagaatttaaagtcccgggacaacattgcggattattacattaaaaatgttcagtcgtccgccaaggagcttgagcagatcgatcttgcgatcaagaaatacaatcagtgtcttacatattgcagacaaaacggggaggatctggcggcgattcagttaaaacaggtgatcgcggcacatccgacatttttaaaggcgtatcagcttttaaccttgatctatctgcatacggggcagtattctcaggcgagacagacgatcaagacggcgagaaaacttgacacgacgaatgagatcactcttttgtatatgcatgagctgacaaaaaaggggaaaaagaaaacaaaagaagagaaaaagaaagaagaagcggttgaatacagttttggaaacgagacgatcatacagccgaagcattccagattcagacaagttacggcccagcttgcggttgccaatatctttatcggagcggcgatcggagcggcgatcatctggtttcttgtggcgcctgccgtgaatcagtccagatctgagcggatgaacgatcagatgagagaatacgcagacgagatcaagtcgttagaagcgcaggtcagcgctcagacgcggacgcttgacaattacagagcttcaggcgaagatgcgcaggcgaatgccgagctggcacaaaagacagcggaaggctatgaaaaactgctgagtgtggaagggcagttcctttcaaatgattatgatgacgccgcattggcagatgctcttcttgggattagcagagacacgttgaaacagacaggacaggtcaagtatgatgagatagcggctgccgtttatcccggagcgtgtgaggtgaaattagcagaaggaacacaggcgctgaattcaggtgattatgcaggggcgatagaccccttgtctaaagttgtgctcatgaacgaaggatataacgacgggcaggcgcttttgaatctggcgcaggcttataaaggaagcggagataacgaaaacgcgacagtttatttccaaaaagtgatagaaaaatacgcgggttcggaatatgccgcagaagctcagagcggacttgatgagattacaaatgaaaataattaatacattacgaaagaaaaggagatgccgggaggcatgtcctttttttgtataggcaacgagccaaagtccgggcttgcccgagaccttggcgactgcttacaatcccggaatgtgccttttggcacttccggtgattatatagatttttgaatttaagatgccgaaaaggagacgacgaagcgatggaatatcaggtacaggaaaattgtctgacgatttatcttccggcagaagtggatcatcataatgcggaggagatgaagcgtaaggcagataaactaatcgatcgaaatcacattaaatacgtgatctttgattttgaaaatacagattttatggatagttccggtatcggagttattatggggcgatataaaacgatttctctgatcggaggagaagtgtgggcggtgcatacaaatgcacgcatccgtaaaatactgactttgtcaggggtgacaaaaataatgcagatctatgaggaggaagaagaatgacacctgcaaatgaaatggaattaaagtttgacagcaggtcggcgaacgaaggctttgcccgcgtggcggtagcggcgtttatgacgcagttgaatccgacggtagaggaggttgcagatgtgaaaaccgccgtgtcggaagctgtgacaaacgtcattatccacggatatgaaaaagaagtacgcaaagtatatatcaaatgtatgattgaagaaaacatatttacagtggaagtgtgcgatcagggaaaaggaattgagaatatcgaggaggcaatgtgtccgatgtatacaaccagaccggatcaggatcggtcaggtatgggatttgcgtttatggaggcgtttatggacagcgtggaagtagagtctgaactcgggaaaggaacgcgggtgcggatgaaaaaggcagtcggaaaaggcagagatatatggacgacacaatcgctttgatcagaaagtcacacagtggggataaggcggcaagagaacagcttgtaaaagaaaatgtcggactggtgcactgtgtcgtgaaacgttttcttgaaaggggcgcggaacgcgaagacttgttccagatagggagcatcggcttgcttaaggcgatcgataagtttgatctgacatataatgtaaagttttctacttatgcagttccgcttatttccggggaaatcaagcgttttctgcgggatgacggaatgataaaagtgagtcgttcgctaaaagagatcgcttataaaagcgtacaggcaagagaacgtctcatcagttcgctggggcgcgatccgacaatagaagagttatcagaagaagtcggagtggaaagagaagaacttgtacaggcgatggaggcgggatgcgagattgaatccatttaccggccggttcatcaaaaagaaggaagcgagatacggcttcttgataaattagaagaaaaagagaaaagagaagacaagatcttggatctgatcgttctcaaagaacttctcgagacactggatgaagaagaaaaacagttgatttttcttcggtattttgctgatcggacacagagcgacgtaggaaagatcatgggaatttctcaggtacaggtgtcgagatccgagaaacggatcattgaaaaattaagaaaaaaaggaggaagataaaagaatcgtataaaatccggcaaaggcagcatactacagtaaaaagaagtggatttactgaaaaatgcagtgaaaaggagtcggatcatatgatggaagatggaaacggacgaaaaaaagtatggatttgtctgtcgattgtcgtgcttgcggcggttgtaatcggagcagtgtattacatgaatatgccgaaggaacactcggaagaaggatttttaatccggagagaaagcgaggactgtgcggatggcatcagggaaaacgctctatattaaaggtgatagagatgtggaggtgactaagccggatgtaacacttgcagatctgctttctatggagtgctccgatcagtcgcttcttccgaagcttaaaacaatgaaaatattgaagtttaagaaaacgggcaatcaaagatgtgtgatttcggtgctgaaaataatcgcatgtatccacggccaatatccggatatggaagtgcagaatctgggagaaacagatatgatcgtaacatacgaagatcagaaaacaccgtcttatgcatggcatcttacaaaaactgcctttgtgacggctgtgacattttgcggggcggcattttcgatcatggcgtttaataacgatgtagatgtaacgcaactgtttgatcagatttatcatcttgtcaccggaaataagccgggcggcataacgattttggaaatcgcatattctgccgggcttatgatcggtattttgatctttttcaatcatttcgggaaacgccgttttacagtagaccctacgccgatggaagtgcagatgcgggtgtatgaaaacgatattcagacaacgcttattgaaaatgcggcaagaaaagaaaaagagatcgatgtcggaaaaggaggcggtattcatgggacaggcggctgaggtgatcgtggaacagcttgtgctggctcttgtcggattgagtgcaggggcggctgtggcaggcggcttattttcttttatcgtggaactcggagtgatcgctgattttgccgatcggacacacacgggagacaaattgcttttctatgaaacatgtgtggcgcttggcggaataatcggaaatatcgtttttcttttttactcttttgcgccgaatgcggtatcgtttgcttctgcgtcttttgcgtccggggcggtacaagttctgtttgggatttttgccgggatttttgtcggatgctggtcgatggcgcttgcggagatattaaatgtttttccgatctttatgcgccgcgcgcgaatcgtcagatacgcgtctgtttttgtgatcggcgcagccataggaaaaggattgggagcaggattgtttttcttaaaaggctggtagaagatgaaagacaaggcgggatttcaacaggaaaattatcttgaaagaggcagggttttggactatcattaatcttagtattctgaaaacaggaagccccttggcttcagacaatggtagttcactgcagaaagtctgtcatatagggtgtatgagatattgtttggaagatgacgatagatttaagacacggaaaggaacgaaaacagtatgcttcagataaaagaaatatgtaaggaataccggacgggaagtcttgttcaaaaagcgcttgataaagtgagcctgaatctgcgtgataatgagttcgtggcgattttaggaccaagcggttcggggaaaacgacgctgttaaatgtcatcggaggattggacaggtatgacggcggagacttgatcataaacgggatttcgacgaagaaatacaaagaccgggactgggattcgtatcggaatcacacgatcggttttgtgtttcaaagttataatctgatccctcatcaaacacttttggcaaatgtggaactggcgcttacgatttcgggagtaggcaaagcgcagcgcagagaacgtgcgagacaggcgttggagaaagttggcttaggcgagcagatccacaagcgcccgagtcagctttccggcggacagatgcaaagagttgccattgcaagagcgcttgtaaataacccggatatcctccttgccgatgaacccacaggggcgcttgacagcgagacaagtattcaggtgatggagcttcttaaagaggttgcgcaggacaggcttgttgttatggtaactcataatcccgagctggcgcagcagtatgctacaagaatcgttgagttaaaagacggaaagattcgttcggacagcgatgcattttatgtggatgaagaaacggcagacgttccggaacataaaaatatggggaaatcatccatgtcgtttctgacggcgctttcacttagctttcataatctcaagacgaaaaaagcgagaacattattgacttcttttgccggatcgatcggaattatcggcattgcgcttattctctctttgtccgcaggagtgaatgactacataaaaaatatagaaagagaaacgctttcccaatatccgcttcagatccaaagtacaggatttgattttacttcgatgatgacaggcggggaagattcggaagaagtaaaagcggtgtctgcgggaacgggaacatcttcaaaagagcggcgggaaaaagaaaatatatgggtgatcgacatggtcacgaatatgttttcgacaatggattcaaatgatctggaatctttgaaaaagtttttagacagtaaagaaagccggatcgatcaatacacaaatgcagttgagtattcttatcaggttgttccgcagatctatgcgcaagacggagagaaagtccgtcaggtacatccggaccgctctttcgaggcggcagggcttggttcgtctgtcggctcaaacagtctgatgtcttcgatgatgagtacagacgtcttttatcagatgccggcagattccgatctgtataaagatcagtacgatgtgaaagccggcaggtggccgaaatcatacaatgaatgcgtgcttgtgctgacgtccggcggaggtatgagcgaccttttgctgtacacgctgggcttaagagatccgttggagctggaagagatggttgcgggattcgtcgaggaagagcagatcgaagttccgaaagattcaactgtctatacatatgatgatattctcggaaaagagtttaaactggtaaacagtgcggattactatgagtatgacaacagttatcatgtgtggaaagatcgttcgggagatcagacgtacatggacaaagttgtgaaaaatgccgagccgatccggatcgtcggcatcgttcagcctgtaaaagatgcaaacggagcagctttgatgtcaggcatcaattatcccgcttcattgacaaaacatgtcgcagaagaagcggaaaactcaaaaatagtcaaagatcagaaggcagatccgaaacgaaacgttcttacaggggaacatttcgggacagaaaatgtaaagggcaacgttaatatggattctctgattacgatcgacgaacaaaaacttgcccgggcatttgcatttgatcaaaatgccttttcgggaatgcaaaaaacggatggtctttctgagattttccgttctgccggaagttcagtcaatctttcgggaatgttagatctaagtaagattcaagttcagcttcccgaactgccgcagatgaatctggaagaattgctgggagaccttgatcttacagtttcgccggaaggatttttgccgctggcagaaagcctgacagaagggtacgcagaatatgcggccgcgcatccggaggcggactattctgcgcttgcacaacagttcggacaataccttggaacgccaaaagcgcaggaaatcatacgaagaaatatcagtgagatcatccagtcgggcggcgggatgtccgtgacgatggaacagcttcaggcaatggtgaaagaaatagcggaaggatacggaaaatttatcgttgaaaacggctatcaggatccgtctaagtttgatgaatatttggcggaatatatgcagacagaagaagcgaaagcgatattgaaccgatatgcaaatgagattttcggaggtattgcaggtaatgttcagattaccgcagaacagcttcagaagctttcaaaagagctcacggaagggtatcttctctatgtggcggaaaacgggctggctgatccgacaaagatcggagagcattttattgcatatttaaaaacggaagacggacggcaaagactgtctgacgggatgaaaggaatcgtagacgcggacagtctggaacagcagatcacagacgcgttcggttcttatatgaaaggcgcggtttcctcttatgcgggagccgtaggaacagcggttgagaggcagatcacatcggctatggagcaggttatgaatcagatggcagaaggactgcagttttctgtaggacaggcaatgacacagatcggaagcagtctgcaaaatgctatgcatgtagatgaagatgcgtttgccgaggcgtttcagatgaatatgacaggagaggaactggcagaactgatgatgtctatgggagcagcgaaaaatgcgacgtatgacaataatctcaaacagttaggttatgttgatttcgctgtgccgactacgatttcgatctatccgaaagattttgaaagcaaagaagaagtcgtcagaattcttgatgattataacagaaaaatggaagaacaaggaaaagaagaacaggttatcacatatacggatatggtcggcgcgctgatgtcgtctgtgacacagatcatagacgttatcagttatgtgctcgttgcgtttgtagcgatttcccttatcgtatcatcgatcatgatcggtgtgatcacctatatcagtgttcttgagcgaaagaaagaaatcgggatactgcgcgcaatcggagcttctaaaagtaatatttcacaagtatttaatgccgagacgtttattatcggtttgtgtgcgggcgtgatcgggatcgggataacgcttctgcttttgatcccgggaaatgctctgatccatcatttggcaggaacgaatgacgtaagtgcggttcttccggtaattccggcgatcatacttattattctcagcgtaatactgacgctgctcggaggactgcttccgtctaaaaaagctgcgaaaagtgatcctgtaactgcccttcggacagaataatttcttgcataagcaatcaagacagataaccaatgcttgcggctgtgtatgtatagaaaatcttgatatgaactataaaagcgatggagaagtgatttttgattatggaaaataaaattgtcatacagaattttggaccggtaaaagaggcacagattaatttgaataaaaaatttcagatatttataggcgctcaggcttccggtaaaagcacaatttgcaaggtggtatattttgttcaaaatatagaagaaaatatatcttttgtctaaagaacggatgccatattacaaaaagaaataccgataagatatgaggtggaagaaaaatgaaaaatttaatctttagtttaaatgcgacagtaccggttttcctgttaatggcgcttgggtttctctttcggaaactcggatggctcgacgaagtatttgcatcgaaaatgaatcagttcgtctttcttgtgccgcttccgcttcttgtgtttgaagatcttgcatctgtcgattttcagaaagtgtggaatttaaaattcgttttattttgtttcttcgtgactcttgcaagcattgctcttgccggtatactttcgttattatggaagaacaggggaataagaggagagtttatacaggcgtcatacagaagcagcgcggcgcttcttgggatcgcattcatccaaaatatatacggagatgcgggtctggcgcctcttatgatcatcggaagcgtgccgttatataacatgatggcagtcgtcgtcctgtccttctttcagccggaacaaagaaaacgagataagttgttatggaaaaagacgctgaaagggatcgtgaccaatccaatcataatcggcatagccgcaggtcttttctggtcggcgcttcggataccgatgccgtatgtaatagaaaaaacagtgtcaaatataggcgctgtcgcgacgcctcttggattgatggcgctcggcgcttcttttgatgttcaaaaagcgcttggaaagatcaaacctgtcattgctgcctgtatgttgaagcttgtcggatttacagcggtgtttctgccttttgcggtgatgctcggatttcgcagagaagaattgatcgcgattctcgtcatgcttggatcggcgacaacagtaagctgctatgttatggcaaaaaatatgggacatgaaggcacgctgacgtcaggcgtcgtcatgctgactacagtattcagtgcgtttacattaacagggtggctgttcattttaaaaagtatgaatttggtatgaataagaatggtttccttataaagtgaaacttcgtatccgcttctctttggaaaacctgaagttggtctcatacagtataaaattatctgtgtgagattaggagcgcattgcatcagttgtgttttgtgtacaaaactcacataaaacaaacgaaaataggcacatattattacgggaaatcataaaaaattccgtttttactctaatctataaggaaaaatgcataaaaaactttaaaaaaaattaatttatgatagaatataaacaatactggtctttcgtgggaggagaaaaaccaaaagacagtttagcaatagcagaaaaaacagtatcgtagaatggagaaaaagtatgaaaaagaaaatgtggaggacggggttgtgcggattgacagcgtgcagcatgttgttcactatgccggcgttggcatgggcggcagatgaaccccaaaacacgaacattgataacggactcattgcgtattatgactttgagaatgtgaatgagaagaaagtcccgaatgtacaaggtgaggagaaatatgcgggaacattgtcaggagataatgtttcggttgaggacggtacactttttggaaaatctctgaagtttacagagggcacacagggtgtgatgaccattcctcagattatgaatacaggggagaaaagctattctgtttctatgtggtttaagtatgatacaactacagacagagggggcaaaaaaacagttcttctgcagcagaatggagctggacgtacgttcttacagtttacgagtgataacaagtatgcaacatatgtaaatcagacagatgtgtttagtgacaagacatttgatgcaaaacaatggcagcacgtaacgattacatatgatacagatacgaaaaaagttacgttttatgtaaatggtgagtctgacggggaaaaagcagcaggtaatgcggagacgaatgcgttgacagatcttctgatcgggcgtcataaaaatgcaggaaatgacccactttctatgagaggtcttgtggacgaaatccgtgtatatgataaagttctcacagcagaagaggcaaaagctgtttatgaatcaaaagcaggagcaatgctcttcccacagttacaggaaactcttaaagaggcgaaagcattagatgaatcgggaagtttgggcgcagaagtagaagaagcgaaagttttgaaagaagcgattacagaagcggaaaaattaacttctcaaagtccgttgtctgaaatatccgagatgattgaaactcttgaagaagcaatgaagaattatcgtgctgaggtcggagttgtacttacagtttctccgacaaaagaggagcgctctattgacagaggaacaataggtatcaaccaccgttatgcgttcaacggatatggttcttttgacagcacgacaatgaaaatgaaagatgagtttacagagctttacaaagatgcgggatttggttctatccgttatccgggaggaacgatctcgaacctgttccgttggaaagatacgattggggataaagaagaccgtgtaaatcagatccatggcttttacaacaatccgaatcagggtggaatcgctccgaacttcggtttgacagaagttgctgattttgcatatcgtgatgacgttcagtcagagattgtttatgtatacggtttcggacgtggttcggcacaggatgctgcagatcttgtagagtatttgaacgctccggcaggaagtaatccgggcggtggtgttgcatgggcagatatccgaaaagaaaacggacatgcagagccgtacaacgtacgttactttgagattggaaatgaaaataatcaaccgggtactgatggaacaacatctcagcagtattggatgataggaacgcaggatgccgaaaaagcgtatgtagaaggtggagttgcaagctttacaaaacagtatgcggtgaaaaaagatgactggaataaggcagcatctgtcagtgacggaactgcaaatcaggttcgttacatgcgttatgcaaacccgaatccgatgacaggaaaagatggaaagacattggttgagaactttgaagctgttcaaaaaggaagcgttgaagtatgggtaggcactgacggtgaaggaaacaatcataaatgggaggttgtagaaagtcttgacaacgcaggagcgaatgaccagaaagtgacaatcgactacagagacggatcaatccacttcggagacggaacacatggtaaaatcccggcgaagggacaacaaatctatgtaacatataaagttaaaagagacggatttgtagctgtttctaaagcgatgaaagatatgacggcagagattaacgaaatcaatgctaaaagcggaagtgcagaaaaggcatcctgctatgtatactccagttgggaaacaaaaggttttattgataagatggcagcaggtaactggaacaattattatgatggtctgacaattcatccatattgtggagatccgggtgcggatcaggacaaaggtgcgttttatgactcggcaatgcgtcttgcggaaaatgtaggtattcagaaagttaaaaattatgtaaacatgcttccgcaaggaaaagttccggttatatctgagtatggtattttcagatctacatcgccgcttcttcgttctcagacacatgcagtatatattgcaaaagtgcttatggagtacgttcgtctcggtagtccgtacatccagaaacactgtcttgtagactggtatagtagtggtgcagactcacttggacctacacagcaggcggttatccaggcagtaccgcagacgggcgctaatcagggaacaggagaagggaacttccgtttcttctcaacaccttcagcaaaagtgttcgagttattctctaactcatttgcaaaaggaacgaaagtagtcggaacagagtttgaacacgtagaaacattggcaaacggaacaaaagcatattccgcaatcgcaagtaaaggtgatgacggaacgttgtatgtaactgtagtaaatacagaccgtgaaaatgataagaaacttcgcgtgaaagtagacggcgtagatctgacaggaaaaacagtagaagtacagacgctcgcgggtgaaagcttcgttgatgaaaacagcttggcagagccggataaagtaacgattgaaaactcaacagttacggcagaaggcacagatcttgagctgacggcaaaagcacactccgtaatgtcaattacagtgaaagaaaaagtggatccgcctgcaccggagacatatacagtaacagcaaaagcaaacaatacggacatgggaactgtaacgattgaccctgtaaaagataaatacaatgcaggcgaaaaagtaacagcaacagcgacagcaaaagaaggatatgagtttgtaaactggacagtagccggtcaagaagtttctacaaaaactacatatgaacttacagtagaaaagaacacagaactgacagctaactttaaagcaaaagctccggtagaagagaagtttacagtaacagcaaaagtaaatgactctaagatgggaacagtaaaacttgatcctgacaaagcagaatatgctaagggagagaaagtaacggcaacagcaacggcaaaagaaggctatgagtttgtgaactggacagtagctggtaaagcggtttctacagaagctacatatgaatttacagtagataagaacgtagaactgacagcgaacttcaaagagacagaaaagccggtagagaagtttacagtaacagcaaaagtaaatgactctaagatgggaacagtaaaacttgatcctgacaaagcagaatatgctaagggagagaaagtaacggcaacagcaacggcaaaagaaggctatgagtttgtgaactggacagtagaagggaaagcggtttctacagaaactacatatgaattcttagtagataagaacgtagaactgacagcgaacttcaaaaagacagaaaaaccggtagagaaggttacaataacagtaaaagcaaacgactctaagatgggaacggtaaaacttgatcctgcaaaagaaagctatgaaaacggcgaaattgtaacagcgattgcgacagcaaaagaaggatacaagtttgtgaactggacagtagccggcaaagtagtttctgataaagcagagtacaagtttaaggttgacagagcagcggagctgcaagcaaactttgtaaaagtgtcagaagatccgaaaccggagaatccgaaggatgaggataaagcagttcagacaggagacaacggcgtatcaccgatcattccgcttgcagggttgatgttagcggcaggagcggcagtcgtagctcttcgcaaaaaagaagactaatctgaatatttgaacagtctgaaaaacagatcggatagcataaagattgtcttgataaaaagcaaaaaatgaaacaaaaccagaggcgccgcgctatgcggcgtctctttctgtataacgaatggcgcgggctgaactgctacatatttataatcaggtatcaaataaagataggaaaagaaataaaaatcggttataataagtataagaaggttgactggtggagcaaataaaaatggatagatatttgaaatgaatgcttatgaacgattgatttcgtggaataaaggataatgttcataaaatacaaatttaaggtattggaaagtatgatttttaataatagagagttggtaaaagaggtggtatatctatgacaacaagagagttagtgagtcaatatgttgaagtgctctgtaaaatatacggaaaacatttgaaaacagttattctgtatggttcttatgcaaggggcgattatacaaaggactcggatatagatattatggtgcttttggatttaagtgatatagacattaaaaagtatcgtcatgagttatctagtgcaacctatgattttaatatggattatgatgtagatattaagccgatagcaaagaatcaagagcattttaataagtgggtagaagtgtatccgttttattcaaatgtggcaagtgagggggtaaagttatttgacgcagcataatgaaaaaggtacaaggcgagatttggttctatataggttggaagttgctaaaagtgatataaaatcagcaaaaattcttttagatgcaggagaatgcaggggagcgaataacagagcctattatggaatttatcatgctatttcagctattcatgctttagatggaaacgcatataagaggcataaggatgcccttgcaaattttaataaaaattatatcaagacagaaatcttcccaagaattttgggaaggaaaattgctgaggctgaagaaatacgacatgccagcgattatgatgacttctatatagcgactagagaagaagctgaggaacaaattgacacagcagtagaattggttgaaaaaatagaagaatacgtcttgaaagagatgggataatcgtttttgtatcattcatgaaatatctatggagatttttgaagagcaaaatgcattgtgggtattggaagatactgatatatataaatatagacttatagaattgtgacaaaataatatattattatcctacacagaaagtgatatcgtttgcataagcgcggaggtatcactttttcgtttgtgttataatctgatatataaaaataagaataaagaaaaggagactgttgctatgagatacatagaagaaaggtgttttgatatgaaagaaaacaaacgaacaatttctgtagattaacttcttttttgtaaagattgtgaaaatgaaacactgtttctacatacgaaaagactctatgcagacaacgaagaatatctctgttatcctctaaacattctattgtgaaattacagtgcaaattgtccgtaaaatgtgttacacttctaatacagcaaaaaatagcttttgatttatcaccgcaggctgatcggtttctataatggcagaacgatgagcgcggcggagctgataggctgatttttgtatgctgtgttgatataggagggaacgactgtggaagcgtatacaagttttgcgtatgtttatgatacatttatggataatgttccttatggcgaatgggcgaggcacatccgcgagaagctttgcgaacatggcgtgacagacgggatcgtgctcgacctcggatgcggaacaggaacgatgacggaacggcttgccggatatggatacgatatgataggggtcgataattcggaggaaatgttagaacttgcgatggaaaagaaaacggagtcaggatatgatatcctctatctgcttcaggatatgcgcgggtttgagctgtacggaaccgttcgggcggtcgtaagcgtctgcgattccgttaactatataacagaaccagacgaactggaagaagtcttccgacttgtaaacaattaccttgatccgaaagggatttttttatttgacttcaatactgttcacaaataccgcgatgtgatcggtgacagtacgatcgcggaagaccgcggcgtgtgcagctttatttgggataacagatactatgagaaagaacagatcaacgagtacgatctgacgctgtttatcgcggaagattttaaccctatggaaaatgcatatgtttcagaaagaacggcagattcggaagatgctctgctttcagaagaaggagcgggtgacttggaagatactatgttttcagaagaagagggtggcgaaaacggaagtttatatcggagatatacggagacgcattatcaaagagggtatacgcttgccgagatacaagaacttctggaacgtgcaggtcttgtatttatagaggcttacgatgcggatacgaaagagacgccgaacgatacgagcgagagaatatgcgtgatcgcccgtgaaaacggaaaataaacagaatgagtaataataaaataacgataaattcatgataaataaacagagcaagcgacaaaaagaaaatagaatgaagtaatgataaaataaaacagaacaggagaaagattgatgaaagattatattgtaagagcatctgcggcgaatgcacagatccgcgcatttgcggcagtgacaacagaactgacagaggaggctcgcaagcgtcatgagacaagtcctgtcgcaacggcggctctcggaagactgctcacaggcggagcaatgatgggaagcatgatgaaaaatgacacagatatgctgacgatacagatcaaatgttccggtccgatcggaggtcttacagtgacagcggacagcaaagggaatgtcaaaggttatgtgcatgaaccgaatgtgattcttcctccgaaaaacggaaaactcgatgtaggcggagcgctcggacagggcgtaatgacggtgataaaagacatggggcttaaagagccgtattcaggacagacgattcttcagacaggggaaatcgcggaagatctgacgtattatttcgctacgtcagaacaggttccgtcttccgtagggttgggcgttctcatggaaaaagacaatacggtgcgctgtgcaggcggattcattgtgcaggtaatgccgtttatcgaagatgaagtgttgaacaaactggaagaaaatattcagaacatccgatctgtaacttctatgctcgatcatggacatacgccggaagaaatgcttgcgcaagtattagaaggacttgatcttgagattacagatacgatgcctgtaaaattttattgcaactgttcaaagaagcggatcgaaaaggcaattatcagcatcggtaaaaaagatattcagtcaatgatcgatgatggaaaagatatcgaagtaaaatgtcatttctgtaatgaagcatataattacactgtagacgagctgaaagaattactgaaaaaaagcagataaggcagaaaatcaggcaaaacagttattacggatgaagatagaaaatagagtaagacggcttgtgccgatgatggggaaaccagaaaagccgggagcggaaaggtggagttaaagatgagacatggttttgtgaaagtagcggctgccacgcctgatattcgagtggcagatgtggaatataatacagaacagatatgcagggcgatcgatcaggcatatgaaaaaggggcgaagatcgtcgcatttcccgaattatgcgtaacaggatatacatgcggagatctttttacgcagaacgttttgctgaacgcggcatacggcgcagtgaaaaagattgcagggcatacaaaaggcaaaaacattctggcgtttgtgggaatgccgcttacagaaggcgggaagctttataacacggcggcggcagtcaacgatggaaaagtgatcggatttacaacgaaaacatttcttcccaattacggagagttttacgagatgcgtcaattcactccgggaccggacagtgtgaggtggattcagtttgacggagaaaaggttcctttcgggccgaagatcctgtttcaggatgatgagacggcggatcttatagtaggcgcggaaatatgcgaagacgtctggtctcctgttcctccgagtattgaggaggctttggcaggagcgacgatcattgtcaactgttctgcaagtgacgaaacggtcggaaaaggaagttacagaacccgtctgatcgcaggtcagtccgcgcgcctgatcgcgggatatgtctatgcgaacgcgggagaaggagagtcaacgacggatctcgttttcggaggacataatatcattgcggaagacggaacgatcctccggcagtcagaacgttataaaaacgagatcatttattcagagatcgatcttgaaaaaattgtaggagagagacgtaaaaatacgacgttttcaccggaaaagctaaattgcggttgtccggtagttgtgccgtttcatgtgggaatatgcgatactgttcttacgagaaacttttcacagcatccgttcgtgccgtctgacgaggcggcgcgagcgcatatttgtgacgaaatcttgacaattcaggcaatgggtctgaaaaaaaggttgtcgcatacgaatgcaaaatcagcggttgtcggcatttcgggcggtctggattctacattggctctgcttgtcacggcaaaggcgttcgatatgctgggacgggataaaaaagagattattgcggttacgatgccgtgctttgggacaacagaccgcacatataataatgcgtgtgagatgacgagacagaccggagcgacgttgattgaagtgccgatcggagaagcggtgaacgttcatttcagagatatcggacatgatcccgatgtgcatgatgtaacttatgaaaatgcacaggcaagagagcggactcaggtgcttatggatattgcgaatcgggaagccggtatggtgatcggaacaggcgatatgtcggagcttgctttagggtgggcgacatataacggagatcacatgtctatgtacggcgtcaatgcgtctgtaccgaaaacgcttgtgcgtcatcttgttcagcatgcggcggatacaacagaaaatgaatcattaagacaggtgctttatgatgtgcttgatacgcctgtaagtcctgaacttcttccgccgaaagacggagacatagcacagaaaacagaagatcttgtcggaccgtacgaactgcatgacttttacctttattatatgctccgcttcggtttctcaccggagaaaatttttactttggcggtgaatgcgtttgcaggcgtttatgaaaaagagacgattttgaaatggctgaaaatattttatcgtagatttttctcgcagcagttcaaacgttcttgtctgccggacggaccgaaagtcggaagcgtagctctttcgccgcgaggcgactggagaatgccaagcgacgcatgcgcggcgttatggctgaaagagttggaacaactgcaataactgtaaataacaggaataaccggaaacaacaaggatagatagaaacaacaggaatcatcggaacatctctttgggaaacgaggtgttgacggaactgttatataaaatgagtgggaaagtgtgagaatatatgaaactgatcaagacagaagaagcggtcggaagtgtactctgccatgacattacacaaatcattcccggcgttgtaaaagacgcagttttccgaaaagggcatgtggtaacgcaagaggatattccggtactgctctcggttggaaaagagcatctgtatgtatgggagaaacaagaaggaatgcttcatgaaaacgaggcggcggaagttttaagacgagtatgtcaggggagatttctgaaagcgtcaaagccgaaagaagggaagattgagctgacggcggaaacagacggactgcttaaagttgataaagaaaaactgaacgcggtaaatgggttaggacaaatcgtgatcgcatcacgccacgggaattttcctgtgaaaaaaggagacaaggtcgcaggaatgcgtgtcgtacctctcgtgatcgaagaagaaaagatggaacaggttaaccggatgtgcggaaacgaaccgatttttacgattctgccgttttgtcagatgaaagcggcggtcgtgacaaccggaagcgaagtgtatcacggaaggatcgaagataaatttactcctgttgtaaaagaaaaactaagagagtgcggtatggaagtaatcggcgatactctttgcagtgacgatgccgatatggttacagaagctgtgaaaaagtggatcgaacagggggcggaactggttgtctgcaccggaggaatgagcgtcgatcctgatgaccgtacacctcttgcaatccgaaatgcggcagatgaagtgatcacttatggagctccggttttacccggcgcgatgtttatgctcgcatatgcaggaaaagttccgatcatgggactcccgggatgcgtaatgtatgcaaaacggacgatattcgatctgatactgccgagaattgcggcgggggaacggctgaaagcagaagattttaccgcgctcggagaaggcggtttgtgtttgaactgtccggtgtgtactttcccgaactgcagtttcggaaaataggaagaaaaataaatcataaaaggaatgagaggaaaattttcggaggtagtaaaatgagaaccggtatacaggaagaattagaattgtatatgagtaaatctgtggcgcaggcatcaaacagagagatttatgaagcgttgcttttgtttgtgcagaaactggcggcaggaaaagaaagagctgcagggaaaaagaagctttattacatttcggcagagtttttgatcggaaaattgttgtcaaacaatatgatcaatctcggtatttatgatgaagtaaaagaaatgctctttcaaaacggaaaagatatatgtcagatcgaggaggttgagccggagccatctcttggaaacggagggcttgggagactggcggcatgttttcttgattcgatcgcaacactcggactgcccggagacgggatcggactgaattatcacctcggcctgttcaaacaggagtttaaagaccatcttcaaaaagagcttccgaatccgtggattgagaaacagtcatggctgacaaaaacggatgttgtctatccggtttctttcagaggattgaaagttaatgcaagaatgtacgatatcgcagtgacgggatatcatgatcagacaaacaaactgcacctttttgacatcgattctgttgatgagggaatcgtggaagacggaattcattttgataaagaagatatcgcaaaaaatctgacgttgtttttatatcctgatgacagcgatgaaaaaggaaggcttctgcgcatttatcagcagtatttcatggtaagcagcgccgcacagatgatcttggatgaatgtgtgcaaaaaggaagtacattgtatgatctgccggattatgctgtcatccagatcaacgacactcatcctacaatggtcattcccgaactgatccggcttcttgtggaaagagggcttgatatcgatgaagcgatcgatgtcgtatcccgtacatgcgcgtatacgaatcatacgattttggcagaagcgcttgaaaaatggccgatcggatatttaaaaaaggttgtgccgcagctcgttccgatcattgagatacttgatgataaagttcgcagaagattcagcgatgaatcaacagccatcatagacagaaacgatactgttcatatggcgcatatcgacattcattacggattcagcgttaacggagtggcggcgcttcatacggacatcttaaaacaatcggaactgaatcatttttataaaatctatcctgataaattcaataataaaacaaacgggattacgttccgcagatggcttcttcactgcaacccgcgtcttacggcgctgcttgatgaaacaatcaaagacgagtataaagaagatgcctctaaacttgtcaaactgcttgaatacaaagacgacgagactgttttgaaacgccttttagagattaaaaaagaaaataaaaaagatcttgccgcgtatctgaaagagacacaggcaatagagatagacgcagatacgattttcgatattcaggtaaaaagacttcacgagtataaacggcagcagttaaatgcactgtatattattgataaatatttggagatcaaggaggggattcttccgaaaactccgatcacagcgatcttcggggcgaaagcggctccggcatatgtgatcgcaaaggatatcattcatcttatactttgcctgcaggagatcattaataatgatccggaagtaagtccttatctgaaagttgtcatggtagagaattataatgtgacaaaggctgaaaaactgattcctgcatgtgatatatccgagcagatctctcttgcgtcaaaagaggcaagcggcacggggaatatgaagtttatgttaaacggtgcagtcactctcggtacagaggacggggcaaacgtagagatacatgaacttgtaggagacgataatattttcgtgttcggagcgtcaagcgacgaagtaatcgaacattataaaaaagcggattattcggcaaaagattattataaaaagaatccgaagatcaaagcggcggttgatttcattacagaaaaacagatgatgaagatcggatgcaaagaaagtctggagcgtctgcaaaaagagctgataggaaaagactggtttatgacatttcttgattttgatgcgtacaaaaaggcaaaagacaaggcgctggcggcgtatacagatcaaaaggaatgggcgaaaaagatgcttgtcaatattgccgaagcaggctacttctcatcagacagaacgattgaacagtataatagagatatttggaaattaaccagatcataagattaaagaaaaatattagtaaaacggtatattgatgaaaagggggatggttatggaacgggcaagcggcgtgctgcttccgatattttcactgccgtcaaaatatggaatcggatgtttttcaaaagaagcctatcaatttattgacaggcttaaggcggcagggcaaagttactggcagattcttccgttagggccgaccggatacggagattctccgtatcagtctttttctacatttgcaggcaatccgtattttatcgatcttgaaacgcttacaggagaaggtttgttgacagcgcaggagtgcgaatacggatgtgagagaatacgggaagataagatagattatgaaaaaatatataagatacggtttcaaatacttgagaaagcgttttcgcgttttggagaaaatgacgaataccgcgcatttgtttcggaaaatcaattttggctggaagattatagcctctatatggcgatcaaagaccgaaacggcggcgtgagttggaatgaatgggaagaaccgcttaaaaacaaagagtcacaggcgattgaaaatgcaaaagcagagctgtcgcgtcagattgccttttacaaatttcagcaatatgaatttgacagacagtggaaacgccttcgctcttatgcgaacgaaaacggcatagagattatcggagatattccgatctatgttgcgtttgacagcgcggatacatggtcggcgccggagatgttccgttttaatgacgctcttgaaccgatcgatgttgcgggatgtccgccggatggattttcgcagacaggacagttgtgggggaatccgctctacgattgggaatatcataaaaaaacagggtacgactggtggattcgcaggatcgaacactgtttccggctgtatgatgtcgtgcggatcgatcatttccgcggttttgatgaatattatgctgttccgtacggagaaaaaacggcagtacacggaaagtggatgccgggaccggggatagagctgttccggacgctggaagaaaagatcggcagaaaaaggattattgccgaagatctcggctttttaactccgagtgtgatacagcttttaaaagaaagtggatttccggggatgaaagtgcttcagtttgcattcgattcaagggaagattcaaactatctcccgcatacatatacaagaaactgcgttgtatatacgggaactcacgataatgatacgacaaaaggatggtatcacacggcggcaggatcaacacggcagtttgcaaaagaatacatgtataagccccgtcttgatgaagatacgcttgcgggagattttattgctatggcaatgggaagcgcggcggatctgtgcatcgttccgatgcaggattatctgggacttggaagcgatgcacgaattaatacgccgtccacacttggcgggaattgggaatggcgtatgaaaccgggagagccggatgaagggacagttcgggagatggagcgaatgacaaaaatatacggacggctgcgttttacttaaataaagttccgaaccagtagatcagtcccagtccccagcttgtgaaaataccgtacaggataacaggaccggcgatcgtaaaaattttacatccgatgccgaatacctgaccttcttttttgtattcgatggcaggggcagctactgaatttgcgaatccggtgatcggcacgagcgctccggcgcctccccaggctgcaagtttctggtaaattccggttccggtgaacaaaacgcttaaaaggatgagcgacagagacatccagcggctgcactcatcgggagaaagatttcgtaattcaaaataatgataaataacttgtccgagcaggcagatcagcccgccgaggaaaaacgctttgcacatattcagaaaaagattatgtcggggcgttttttcttttacatattgttcatattgtttttcttgtttcagtttttgtattttatccatagatgaaacacactccttgcatttcgcgcaacacgcgcgtttttaatttcttttctgttagtatctgaaataattttccgaatatgtatataaattcataataatttttcgcaaatatgccgacaataaaaataataaaaataaaactgtaacagttcagcccacgccatgtgtaaaacgcaatgtgtgcgtaacgtggctgatggaagacggagtcagggaaaggaaggattatggatcagataaaaggggcgcaaagcattatgtttcgggaagcgccgtatcttatcagcgctgcgtctgtcgcaggcagcaaagaggcggatggaccaatcgggaaattatttgacgtgacagataaagacgacctgttcggagcacagacatgggaagaagcggagagtaacatgcagaaagaagcgtgtgttcttgcggcaggaaaggcacatgtggacttgaaaaagatccgatatctttttggaggggatcttttgcggcagggaatagcaacttcaatgggggtagaggctttgcagattccgatgttcggcctctacggagcatgttctacatcaggagaagcgcttgcgcttgcatctatgagcgctgccgcaggatacggaggaacgatgatcgccgtcacatcaagtcatttcggaagtgcggaaaaagagtttcgctttccgttaggatatgcgaatcagagacctctttcttcacattggacagtgacgggaagcggcgcgtttcttgtgcagtcggcagaggaatacagaaaacaaaacacaaagtcgtacttttctaatattcgcattacaggagtaactgtcggaaagatcgtagattatggcttgaaggattctcaaaatatgggcgcgtgtatggctccggcggccatggatacgattgtacagaacttccaggatatggaaagaaaagaaaaagattacgacaggattattacaggagatttaggaagcatcggaagaacgattttattcgatcttatcagagaaaaagggtacgatatatgcgaaaaacatatggattgcggaatgacgatttttgataaagaacggcaggatacgcatgccggtggaagcggatgcggctgcgccgccgtaacgctggcatcgtatgtacttcctaaattagaaaaaggagaatggaagcgggtgttatttgttcctacaggggcgcttatgtctaccgtcagtttcaacgagggggcgagcgtaccggggatcgctcacggaattgttctggaaagcgatgcatagcataaggaaattaaaaagcaagaagatagaaggcaaaatgataaaagcaagaagaatgagcagagtagaaaagagaaagggtgaaacaaaatggattatgtaaaagcgtttatcgtaggaggtcttatatgcgcggctgtgcagattttattagacaggacaaagctgatgccgggaagggttatggtgcttttagtatgtggcggagctttgcttggattttgcggactgtacgatccgtttcagaaacttgccggggcaggggcaggcgttccccttccgggattcggcaatgtgctttggcagggtgtgaaagaagctgttgacaaatatggatttatgggtgtgttcatgggtggatttcaggcgagtgccgtcggtatttccgcagcgctgatcttcggttatattgcgtcctttatctttgaaccgaaaatgaaaaaatagatttttatgaaaatgtgtacagaaatcaagaaaaataaaataaagaagatttctgtacacactgtgtctgcagagaattataattgtttttctctatataagtcgcttcggttattggggtattccaagatgaaactgttcgatcaggcgtccgatattttcttccgtatcttcaagctcgtctgcaatctgggaaagagtttttcctttctcgagttttttctgaatgagattgcaagttttccctttttcgcccttccgaataccttctttaagtccttccttttttccgtcttcccaggcgtaactgcgttccagccggatatgttcttcttcgtcatattcgtaaatgcacacgtttttcacctccgctcgatttttctcaagaaatgattttaaaatcccttcgtggatacattctgtgatggcatgttcaaccgcatcttcaagcgacattgtttttgtgtaccgacgaacccggtctgtatactctgcgtattgatgcagcatcgtacatgcattcattaaggctggattatgtccgagattaatgttgagcatgacagcttctaattctaatttgcagtgttgatcccgtatggaatataaatcggataatcgtaagatccggcggttcggctgatcctggatcccattataaaagatgacgaattccggcggaatcaaaatttttcgtgaaccgtataatttgtttttgtcgatcatacccgagtataagtccgaaatataaaacagatatctcagcggtaaattaggattaaaagttgactgatgttcgtataaagacagccgaagtccgatcatgaatgaaacatcgttctgcattgccatatagatcgcgttttctaaggtgttgatttccaacagttcgggatcggtataatgctttatcgacatcatagcatgaaagtgtagaaaacgccagttttttatgtgtatattacatccacaaaacgtctgtgaaaattgcgctaagaaaatgcaaagattttgttgttttttgacgctgataatggtatcgtaagaatgcagggttgcacacttttgcagctctgcataaattatgtgaaaaaagtgaatgaaaaaactcttatagctacggaggaaagagtagaattatgaactatgcatctattatcatcccgtttgtgggtggcttgggaatgtttatctacggaatgcagatcatggcgcaaggtttggagaatgccgcgggcagcaggatgaagtctctattggaagcgctgacgaaaaataaactttttggagtgatgctcggcgcatttattacggcagtgatccagagttcgtcggcaacgacagttatggtcgtagggtttgtaaacgcaggtatcatgaatctgtctcaggcgatgggcgtcatcatgggagcaaatatcggaacgacggtaacgggctggctcgtgtcgagtgtggaatgggcgaagtttttaagtcctgccaatctcgcgccgattgcgattattatcggtgtgatcatcatgctgacgggcaagagacgttcgtcaaaagatatttccagcattatcgtagggttcggtatccttttcgtcggaattacaacgatgtcgtcggcggttgcgccgcttcaggaatcagaagcattctgcagcattttcgtgaagcttggacacaatccgttccttggtattcttgcaggtgcgcttgtgacggcgatcatccagagttcgtctgcatcggtcggcatcttgcagagtctcgcggcagcaggacttgtaccgtttaatgcggcggtatatattatcatggggcagaatatcggaacatgtgtgacggcgatcatgtcaagtatcggagcgaaaaagacagcaaagacagcggcgatcatgcatcttttgttcaatgtgatcggaacaatcatattcagtgttgcggcgatctttttcttcaaagtgctcaacccgggtatgggcgcgggtatgattacgcagacagagatcagtacggtacatacaattttcaacatcggaacgacactgctgctcttcccggtatccgactggatcatcaaactggcaagaaaactccagaaagaggaagacggagtagtagatgaaagccgtgtgctccttgatgaaaggatgttagagactccgagtattgcgattcagtctgttgtaagcgaagtatgccggatgggatatattgtaaaaggaacgatggacaagactcgccgagtattatttactcaggatgaagagacgatgaacgagatccgagaggaagaaagtatcgcggaccggctctgcaagggaattacagattatctgatacggatcagctctctggcgattaatgaaaaagagcatcagcacgtggcaagccttcttcagattgtttcagacatcgaaagaatcagcgactattgtgaaaatatttccgagtatgcagaaaaccttgcgaaccagaaaaagaagttctcgggtgtcggggcagcagaaatgaaagagatgctggaagtctgttcagacagtttcacttatgcggttgaagcatttgaagagaacagtgcggagaaggcgctgaaagtgattgaaaaagaaagaagcgccgatgatctggagatccgccttcgggcagatcatatgcagcgtcttgcaaataagcagtgcgatacggaggcgggaatcgtatttcttgacgcgcttgtcggcttagagaggatttccgatcactcaagaaatattgcggaagaagtgctttcggcaagtaataaataaaaacttattccggctgcatggcagtgaaagctgcggtgcagccgtattctttatcgtatactgacattagagtgcagatccttgtaataaaatatcattgttcctgatttgtaaatatgttatgataaatccactcacagaaattctttctgtgaaaagcgccggcagtctcgtctgtccgcggagaatgctgacagtatcgtcagtccgaggaattccctcaaagttacccgattaacaaaattatttttgcatggagagtcttgtagagcgccgctttttttcgtatactgattcttaagaaagaaaataaagtttattgtgaaaacttttctcttagttcataggactcgttcatgcgcatgaaaggagaagcctatgacaggaaaagaaaacagagaaatcaaaaacagcgtcttcgtagatctgttctatgaagacgaatcagcagaagcaaatgaaatcgcgctctttaacgccatccacgacgagcccctcccggaaggaacgaagatccggaaattccgcgtagacaatacgatctatatgaattttcaaaacgacatttctttcgatgcaggtgggaaagtgatcgtattcggcgagcatcagtctacgatcaacgaaaacatgccccttcgcagtctgttgtacatcggacgggcatatgaaaggctcgtgccgccgagaagccgatataaaaagaaactcgtcccccttccgatgccggaattttacacattttataacggaaaagaaaaatgggagaaggaaaaagagctccgtctgtcagacgcctatattgtaaaagacggtgaaccgagtctggaattaaaagtaaaggtcatcaatatccgcccggaagagcatcatgagatcctggagaaatgtcaggtgctgaaagaatacagccagtttatggaaacggtacagaactatcagatctccggtgtggaagaaccgtataaagaggcgatcaaagagtgcattgagaaaggaattcttgctgattatttaatgcgaaaaggaagcgaggttgtcaatatgctgttggatgaatatgattatgaaacagatatcgaagtgcagagagaagaagcaagagagcaagggcgagcagaaggcagagaggaaggacgagaacaaggacgagcagagggaagagagcaagggaaggaagaaggcagagaagaaggtcgaaaagaagaaaaaagagctctcgttcagaaaaaacttgaaaaggggaaaacaatttctcaaatcgcagatgatcttgaagatacagaagaaaatattgctcacctgatcgaagagtttcatcttcgggtgtagagcggcggcagtttatcaagagatcggatagcgcccatatgcagacagattttcccgaaacagcaaaagaaataaaaacaaaagcaaaaaaaataaaaaaattcgtttgttctattgacatttcataaaaagtggtggtactattatgcacaaaatttttatgtataaatacaggcatcaaaggaggatgtggaacaatgtgtggaattgtaggattcatcggagaacagccggcagcgccgattcttttggaagggctttcaaagctggagtacagagggtatgattcggcgggaatcgcggttcgtaatgaaaagacggataagatcgcgatagtaaaggcaaaggggcgtttgaagatccttgcagaaaaaacagataacgggaaaagtgtgcgaggcacatgcgggatcggtcatacacgatgggccactcacggcgaaccttccgagaataatgcacatcctcactgcacggatgataaatccgttgttcttgtgcataacgggattatcgaaaactatcaagaattaaagacaaagcttcagaaaacgggatatacgttttattcacagacagacacggaaatcgcggtaaaactgatagattattattataagaagaccggaacacctcttgaggcgcttacaagggctatgcttagaataagaggatcatatgctttcggagtgatgttccgcgattgtccgggcagattgtttgcggccagaaaagacagcccgcttattatcggaaagagtaaaaaaggctgcctgatcgcgtcagacgttccggcgattctggatcgtacaagaaacgtatattatataggcaatcttgaaatagcggagatgacttcggaggaagtgcatttttataatattgaccgggaagagatacaaaaagaaatgacagagatcaagtgggatgccgagtcagccgaaaaaggcgggtatgaacactttatgttaaaagagatacatgagcagccgaaagccgttcaggatacgctgggcgcttatataaaagacagtgcgattgacttttcggaagcaggtctgacagacgagcaactaaaaagcattgagaggatctatgttgcggcatgcggatcggcgtatcatgtcggagttgtcggaaaatatgtgacggaaagtctggcaggtattccggcagaagtggatctcgcatctgaattccgttatcgcaacccgattcttgcgccgaattcggcgttgatcgtcgtatcacagtcaggagagacggcagacagtcttgccgccttgcgtcttgcaaaagagaaaggaattccggttatcgggatcgtcaatgtagtcggctcaagcattgcaagagaaagcgatcatgtcttatacacatatgcaggccccgagatctcggttgcgacgacaaaggcgtacagcgcacagttggcggcaatgtaccttctcgccgtacagatggcaaaagtaaaaggcagaatagatgagaaacggcatggagaattgctcgaggaactgtgcagaattcccgataagattcagaaagcgcttgacgataaagagcggatacagtggtttgcaagtaaatatgcgaatgcaaaagatgtattttttatcgggcgcggcatcgattatgcaatcagtctggaaggaagcctcaagatgaaggagatcagttatatccattcagaagcatatgcggcaggagagctgaagcatggaacaatcagtctcatcgaagacggaattcttgtcgtgggagtcttaactcagaacgatctgtttgagaaaacattgagcaatatggtcgaggtaaaaagcagaggagcatatttgatgggacttacgacatatggaaactacagcgtggaagatacggcggacttttccgtttatgtgccgaaaacagaagaatatttttccgcaagtcttgcgatcgtgccgcttcagcttatgggatattacgtcagtgtcgcaaaaggtttggatgttgacaaaccgcggaatctggcaaaatccgtaacagtagaataatttttacatcgtgtgaagaaattatacttttaatatctgaataaaaatgcatattctctctttttaatatatttataagagaaaatatgcattttgtatttgaaaatatacattttggagagttgacaaggaacagatgttagcctattattaaaaatgtatcgtgaaaattatgataaaagtaatgtttgtttatagtgaatttaaacagcggtctataaaaggcagcatatctatctaatgtgttttattgaaagttgataaatgacatagggatatgctgttttggcgtgtcatgaaaaaacttaaacacattaatgcgttatcgcaatgatagaatgaagcgccgtgaaaatgttgaaactaggtattggaattcaaagttaaggagcggcgcacaaaatggcaaaaataattgatacacacagtcatatattacccgggatcgatgacggggctggttcatggaaagaagcgctttgcatgttgaaaacagcgcaggctcagggaatcagaagagtgatcgcaactcctcactggggaggacctttcggttataccgatccggtgcagatcagagaactctgttttacattacaggaaaaagcaagacgtcacaatatcagtgtgaaaatttatcaggggcaggaagtgatgtacaccgaggaagcggcggacaggattgcaaacggcgagatccttacattggcggacagccggtatgtactggctgaattttatcagggaatcgggtattcgggaatttttcgggcagtacagcgctttacacagtcgggatacagtccgatcatcgctcatgcagagagatatgaagcgctgaaagatatcgggcgtctggaagaactacgaaagcagggagcatatatacagttgaatttcagggcgatcgggggaaagtggcatgattttacaacacgttggtgcaggaaagctctgaaagaaggatttgttcattttgtcggaacggatatgcataatatgagaacgagaaaaccggagacagaatccgcagtagtgtggatggagaagcatctggagccggattatgtaaaaaaactgtttttaaaaaatcccgagaagattttaagaaacgagcgtttgtaagaaaaacattgtaaaacatagtcaatttatgtaaaaaagacgcattgtaaaatgagaaacagggaaaaagtgaagaaaatactggtaaatggaattaatttatttccttatagaaaaatatgatatataattagaaggattaatatattacgaacagagagacggataatagaggaagtgataaaatatggaaaaaacacatgatgaagaaatggcaatcgacctgtgggagttaatttccgcactgaaaaagcgggcgctgattattttggcggcgtgtctgcttggcggtgttgtggcaggtgtatatacaaaactttgcatcaccccgatgtatacggcgacatcatcgatgcttgtgacaacacaggaaacaacgcttacgtctattgcggaccttcagcttggaagcgctcttacgggagattacagtattcttgcgacaagccggagcgttcttgaagaggtgatcgaagatctgggtctgaacatgaatcatcaccaactgagaggaagtattacgatcaccaatccggaaggaacgcatattatggaagtgacggccagaagttccgatcccgagaccgcaaaaaagattgcggacactatggcggttgtttcagcgcagtatataaaagaaaaaatggaggtggctcctcctaagatcatcgaagaggcggaagttccgtcatccccggtcagcccgagtatgaataaaaacgttatgatgggcgcgctggcaggatttgctcttgcggcggcgatcgtgattttgtttgcgatcatgaatgattcgatcaaaacagaggatgatatcgaaagagcgctcggcattccgacacttgccgtgattccggacagaaaagattatatagatgatcatggcggcagtaaaaagaagaaaggcaaaagaaggaggcagagtaaatggcggaacaaaaggtgataatgacagatccgagacaagaggattatttttatcaggaagcaattaagacgctgcgaacgaatatccagtttgccgggatggatgtaaagacaattctgtttacaagctgctatccgaacgaaggaaagagcgatattacgttccaactttcgcaggagatcggaaaattagggaaaaaggtacttcttctcgacgccgatatccgcaagtcgatactcgcatcccggtacggagtgggaaaacaggttcagggattatcaaattacttgagcggtcaggcttctatcgcggagattatttatcgtacgaactatgagaatatggatatcattttttcaggttcatttgcgccgaatccgtcagaactgcttgggcaggaagcgtttggaacgcttttgggagcggtgagagaacattatgattatatcattgtagatacgccgccgatcggaagtattatcgatgcggcgatcgtcgcaaaacagtgcgacggggcggtgctcgtatttgaaagcgaacttgtgagcagtaaggaggcggctcgagtcaaagaacagcttctgatgacagggtgcagactgatcggagccgtgcttaataaggtagatgtaaagaagaataaatactatcacagatatgactattactatcatggatatcaggaaaaaaaggaagttacaaagaaaaataaagaaaaataaaacggtactcagataatgggaggggatcggaaagaaacagatgaaaaagaaaaaatatttgaaatggtggatcgcggcggtatcagcggttttcattgtaggagcgggaatatttgtatatacgcagtataaggcggcacagacgtcgggagacgtcgccacgaaagacggaacatccgcctcggcatcggatattacatggaacggcaagacatacagttacaatgaacatttgagtaactttttgttcctcggtattgatacaaaagaaaaggcagagacaaaaacaggtcaggcagacgccgggcaggcggacgcgttgtatcttctgtcatggaatcggctggaaggagatattacagtgatcagcattccgagagatacgatgactcagatcgaaacgttcggtccgggcgggaaaagtctcggaaagagcaaagatcatatcagtttatcttatgcatacggtgacggcggatatgaaagctgtgagctggcggaaaatgcagtttccgaattgctttacggactgccgatagacgggtactgtgctttgaatatggatggacttcctgttttgacagacagcgtcggaggcgtaacagtaaccgtgccgaacgacagtctggcggaagttgaccccggatatgcaaaaggagcggtggtcactttgaaaggtgaagatacagaacagtttgttcgatacagaaatacggagatcagccagagcgcgatcgcacgtatggagcgccagcaggaatatatcagagcattcggcgaagctttaaaaaaggcatctgcagataaagcgcttgttaccgatctgtacaaggcgattgaaccgtatatggtaacgaatatggggaaaagtcgttttgttgatctgacggaaagtgtatcagaaggcaaaaaggtgaaccgatggacgattccgggagaaggaattcaaggtaaagaatatgatgaatacgtcgtagatgatgatgctttgtatgaaaagacagttgagacattttatgtagagaaaaaataaagtgcagaaagaacagagacggcatatgaaaaagatatctaagataataggaagcgttcttatcacagccgcagcagtttgccttggcatcggagtttatcaatttacgaaagaacaaaacgccggaaaagggtatcaggatctttcggaagaagtgaaaaaagaaccggaagatgaaggttcaaaatcaaaagttgatatcccgatcgattttgcggcgctaaaggaaaagaatcccgatgtgtatgcgtggatcagtataccgggaacggcgatagactatccggttctccaaagggagaatgacaacacatactatttggatcacacgatcgatcatgaagaaaagaccgaaggagcgatttttacggagaattacaacaatactgattttgaagatccgaatacggtcatttacgggcatgacatgagaaacggttcgatgtttaaaggactgctcgactatcgggataaaacattttttgatcaaaacaaagaagtgctgatctatacgccggatgcaatacgacattataaaatattcgctgcgtatccgtatgacagcagacatttgcttagaagttttgactttacagataaagaagtgtatcagcagtatttataccgtatctttgcaatccgcgatatgaatgcgagcattgatacaacagcgcaggtggggacggacgataagatcctgaccttatcaacatgctatgcaaaccagccggatatgaggtttcttgttcaggcagtgttggtttccatagaacaataaggcaaaagaaaatcatttatcagagaaaggaagagtgaacaatatgaaaaagaaaatcatgggtgtaattttggcggcaacgcttatcgtatcacaggcagtaacggcgtttgcaggaagtaaaacgtcagaagttgtgcttccgaatgattttgcggcttattataccgtaacggaaggaacaagagaggcatttgcagaggcagaggcagtttccccacagacagttgacgcgatcatagaagtaaataacggaagcatgactcttgcacagcttgttgcagatatgaaagaactgctcaaagcagaaggcgcagcaggactgaagatgacagaagaacaggtcgacgctctggcggcagatctgggttccagaacgtttgtcacaaagttttttgaccttgagcctgtaaacggcgggattaaagatgacaacggagactaccttgtaacattaagcgtgccggcaatttccacagctatgacagaagtagcgtttcttcacttcagcacagaccgcgcggcatgggaagttgtggaagcgtcagacgtagattatacaaacaaagagatcactgcgtcctttaaagatctttcgccggttgccgtgatcgcaaaagtagatacgtccgcagacaatgcgatcggaacgtctccgcagacaggaagattccctgtttccgtactttggatcggtgcagcagtaatccttggtgcgacaggcgttattgtgttaagaaaacgcaaagaaaaataaatattgaatgtgccttgaaaggctgacggtaaggaatggctcgatgataagaaatattttcgggctattttcttgcaaaaatcaggggaaaaacggctattttccggtaatgtatagtaacaaaagaaccggatacgcaaaagacaaaaatttacgaaacagtaaaaagaaaaagaaagaaatagcagttaaagaagtatgaaagataaactagagggacagcagttaaaaacatcaaaacatgaaagatggatttggagagataacagaggaaattacagatgagaggaaagactacatttcatataagatggaaattatttttttacgatgtgatcgtatttgcagtgacgtctgtatttctgcttgtattatatgaaggaccggtaaaattgacgcagagaggggaattgcagcagatgcttcttgcatttgtatgcgtatttgcctgccggctggtcggaaagatatatgggcagatatggagatacgggggaattcaatgctacatgcgtttagtttgtacggattgtgtggcatttttaatatatgtgattttggaatctgttcttccggtcgctcatatctcatttccgcgccttctggtgttgagtacggtaaacaccatgggagcgctgatcatgagaatgtcttaccgttatgcgtataagtgcagcaacctggaaactttttcaggtaaaattttagccgcactgctgaaaatatttgccggaattgaagtgggggaaacaagagacgatcagaagatcaaagtggcgatcataggggcaggaaatgtcggagttactctggcaggggaactgttggcaaacaagatggcatcctatgtgccgaaatgttttgtggatatcgataaatcaaaagacggacgagagatacagggacttcccgtattatctgaaaacgaggcgacgtttcagaaactgaaaaaatacggaatacaggaaattatctttgcgctgccgtctatggcggatgaaagaagaacagagcgatatctttattataaaaatgccggatataaagtgaagatgtacgattatcctaagatgcagatggcaggcggaaagagagctcttcgagaattcgatatcgaagaactgctgtttagagcgccgagaaagcttacgaacgaaaagacaaaagattattataataataaagtcattctcattaccggaggaggcggatcgatcggttcgtaactgtgcagacagatcgttaaaatgggaccggagaaactgatcattctggatatctacgagaacggagcttatgatcttctgcaggaattaaggatcgcgtatggcaatgaaccgggactcagcgtagagattgcttctattacagattcaagagcgatggagagggtattccaaaaatatcatccgcagatcgtgatcaatgcggcagcacataaacatgtgcctcttatggagaacaactgtatcgaagcaattaagaacaatgtattcggaacagcagttgttgttgaaatgtgtgagaaatacggtgcggaacgttttatgatggtctcaacggataaagcggtcaatccgacaaacgtgatgggcgcgacgaagagaatgtgtgaaatgatcgtacagagcgcaagtattaacggaaaagtaaaatacagtgcgacgagatttggcaatgtgttgggaagcgcaggaagcgtgatccctctgttcaagcgtcagattcaaaacggcggaccgattacaattacagataagcggattatccgctactttatgacaattccggaggcatctcagctcgtattagagagcggtgtgcttgcccataatggagaactgcttgttctcgatatgggaaaaccgatcaagatattagatcttgcagaaaatatgatccacctgtcaggggcgcagaatatcgagatcgtagagacaggactccgtccgggagagaaactgtacgaagaacttcttgttaagacagaagagcttgataagacggaaaatgaccttatcttcagagaaaaagacagaccgctgtctgtagaacagatccgtgaaaaattaaggatgctgaaagatgtatgtgacaacggagatgacgatcaggctagagaagtactgcgaaaagttgtgcctacttttaaaagaccggaagaagtgaataaagaagtaggagcggaagtagagccggaagataacagtttgccgcagcgcagggtaagagcctgagaatttggaaaaagacaaagggtcaacagatgtcatcagacaaatatgcggcgcaagtactcaaaaagaagatgtgataataaacataagtaaaaagaagaatctacaggagagagaagatgaagaggaaagcttatgatggggtttataatcgatatattaagcggggaattgatttttgccttgcattgatcgggttggttattgcagcaattccgatggcaatcgttgcaatcgctattaaagcagaatcaaaaggtcctgtgatctttaaacaggatcgtatcggctataaaggaaaagtatataaaatgtataaattccggagcatgtgcgttggagctgaaaagggtggtgtttattccgataataaagacagtcgtgtgacgaaagttggaaaattcatacgcgccacgagcattgatgaacttccacagcttgtgaatgttttgaaaggcgatatggcgctgatcggtttccgcagtccgcttacatatcacccgtggccatggagtgaatatacagaggagcagaagaagatgtttaatgtgcgtccgggaattacaggttgggcgcaggtgaacggaagaaaaacagtggaatggaataaacgtatcgaattaaacggctggtatgcagagcatgtttccttttggctggatgtaaagattttatttatgacagtatttaaagtacttacaaatgccgacaacgaaaatgtcggagaaacagtgaaacaaaaatagaaacagatagtgctatagaaaatgacggaagatcaaataaaacgatcaaaagaaaagcagacaaaacagaggggatgatcagatgccattaaaactgatgtatattacaaattcagaagatgtcgcccatatcgcagaagaagcaggagttgaccgtatttttgtcgatatggaatatatcggcaaaaccgacaggcagggtgggatggatacagtgcagtccagacatacggcggatgatgtgaggcggcttgcacaatgcttaaataaagcggaactgtttgtaagagtgaatccgattcatgaaaaaacagatgaatataactcgtcaaaagaagaaattgacgaagcgatcgaagcaggtgcagatcttttaatgctgccttattttaaaacggcagaggaagttcagacatttgtaaaatatgtaaatggcagagcaaaaacagtccttttggttgaaacacccgaagcggcggccattgcagaggatctagtacaaattccggggattgacgagatgtttatcggattgaatgatttatcattaggttacggtaaaaattttatgtttgaactgctgcttgacggtacggttgaagaactctgtctgaaattcagaaaaggcgggattccttatggatttggcggaattgcttcattagggaaaggaatgcttccttcggaatatgtgatcaaagaacattatcgtcttggttctgcatgtgcgattttgtcacggagtttctgcaggacaggtcaagtgacagacttaaaagagattcagaagatttttgaaattgaattgccgaaaatacgggaacttgaagaagaatgcagagtacatagtgaatatttttggaaaaacagacaacaggttgagacaaaaataagacagatatgcgaatgtgaggatgcaaaatgaatttattagtaacaggagcatggcaaggggcaaaagacggaattgaacaattaaaaatgttggggcatcaggtacaattcttgcaatttgaaaaagatgagcttccgtgttcatatgaatgggttgaaggagttatatgcaacggactatttctttcccatccgattgagcgatttactcatttaaaatatattcaactgacaagcgccggatttgacagagttgatatgcagtatgtaaaaagacataatattgagatacataatgcaaggggggtatatagtatcccaatggcagaatttgcaatattcggagtgttagaattgtataaacaaggcaagttctttcagcagaatcaggtggaaaaacagtgggagaaacgaagaaatctgtcagaattattcggaaagcaagtatgcattgcaggctgcggcagtgtcggaactgaatgtgcaaaacgcttctccgctttcggatgcagaataacaggcgtagatctgtatccgagagaagatgaaacttatgaaaagatggttggaatcgagaacctgtccgaagttttatccaaaagcgatattgtcatattgactttgccgctaactgaggagacaaggtatttgatgaatgaagaaaaattcagccaaatgaaagacggggcgatccttgtaaatattgcaagaggcgctgtcgtagatacagaagcgttgaagcgggagatgccaagacttggcggagcagtgctggatgtgtttgaagaagaaccgctgggggaagatagcccgttatgggagatggagaaagttatagtgacaccgcataacagttttgtcggagatggaaatgcccggagactggcgggagtgatctatgaaaatataaggagagaattaagtgataaatatacaagttttaaaagtaatgtttaataaaatggattcatgtataaaaatgaaccgggggggataaatcttttttacagaatacgttatggaatgggaattgtttggaattatctaagatataaagcgactatttccgattattttgagttgaggttttttgaaaaaaatagcaaagagaaaaaggaatatttgacatctaaagatggattgcgttttgcacagtatgtcgattcacaagaggtttttactcagttatgcagtaaaaaagaaatgtatcgtgaattgaaaaaatatgtgaagcgagatcaattatattcagccgaatctacaaaggaagattttgaaaaatttgtagataagcataattcatttttatataagccagatgtggctgattgcggtagagggatagaaaaatggacagtttcaaaaggaagtattgaagatttatataataaatttaaaaaaagtccagcagttttggatgaattagtaacacaacatcaagaattgagtaaattaaaccctagtagtgtaaatacaataagaatatttacagttatgatcgggaatgaatgtgaaattataggggcagctttaaggatgggcgtaggagataccgttatagataattattcggcagggggagttgtaggctcgatagatgaaaaaacggggattgtaagagatgatggggaggatgcaatcggaagaagatatgagatgcatccaacttcaaaaataagaatgaaaggatttaaaattccgaattgggaaactgttatagaatttgttcgagaatgcgcacagaactatccgctgaaatatgtggcttgggatattgctatcagagaaaatgattgtgtattgattgaagctaatccaaatggaatggcaaatgtaattcaaattgcgggagcaaaaggaagaaagaagcaatatgaagaattaagaagaaaaatagagaaaataaggagaaactaatgtcatattatagtgcagaagaaatgaaaaaaactttgaaggattacccaaagtttcaaaaaaggttatattgcagaggttttttaatcacaaatgaaaaacaaaatgtaaatttagaatatccgttttatgcaaattggaaagaagaaacgataggatattcattttatatgtatacgcataaggagacatatgcttatacatatgaaagaaatcaagttatatatttcataataggacatgcatatgacccatataatatgcttgttgatgaaaatgaaattttgaaaaaattagcttcggctagggaaaaaagtgaagctgattattgggatgcagagagcaatttgacaggtgttttttgtgtaggatatgtaacagaaaatcaaattgtttatacaactgattgtgcaggaatgcagcttgtgtatcatggattaattagcgataagctttatattacttcacatgcaaaactggtagctgatttaaaaggtttgaaacaacctgaatatataaagcggcttacaacaaataaatattggcattattggggaacatggcttccgggtgatttgtcaccgtttgatgaattgaaaagaatggttccgaatcattttggatcatatgaaaaaaaacaaaatggcatagaagtggtaagattttatccgactgagaaaattgtagagacaaagacacagcaagaatatgaaaatacgattcatgaattaggaagaattatgtcgaatacaatggaatgtattgcagaaaaatggcctgaaaagaaagtgtctatttctgtgactggcggaagggacagtatgacagcattgtcatgtgccaataaagtatatgataaattacattattttagttatatatcaaatgttgatgagtctgttgatgcgtatgcggcgaaagagattttagtacatttaggacttgaacatgaactttatgaaattcctgaaaaatgggatggatataaagatttgccagtgtttaaaaaagttatggaatgtaataatggatgtattggcgcaaacaatacaaatgacttgaaaaaaaggttatattttacagaaaatcctccatgtgatatggaaattaaatcatgggtaaatgagatgggacgcggatggtattataataaatataataaaaagaaatttccgcaatatccgtatgcaagctattggagagcaatgcacaaagtttatgttggtaaatatttgatcaaagagacagataatgtatttgcagaatatttaagaaagtattatgataaaaaaacttttgataatctttcgtggttagaattatatttttgggaatttgcgtggagtggcggagaaggaatttttttgactacagaacatagagtttcttatgatattacgattccatttaataatagaaaatatgtggaattaatgctgacagttccattagaaaaacgtaaggtagatgatataccgattgatttgattacatatatggaaccgagaatagctgagacaggaataacagtgcatgatatttcgcatacaaattttcgggcgtttgttgtgcgtaattatttagaaatattttcaaagattaggtttggaagaaaaagggagaagttttgatggggtatggaataataacactgttgccagcattgctggttattgttgttgcgataaagtctaaaagaacgacagaggcattgttgatagggtgtgtttcatcatatttgattattgctactgcaaataaaagtaatccggtaacattaatggtagattcgttttttaaagtggttacagattacgatacagtatggttgttaattgtttgtggactttttggtagtttgatagcggtaatcaacgcagcaagaggaactcatgcgattgccaattttttggggaaaatttgcaagacagataaaagtacattactgacatcatggatactagggattattatttttgtcgatgattacatgaatattatgacaattagtgcttgtacaaagaaattatcagattcaaggaaggtgcctcgagaagcactagcatatgtcattgattctacaggagcaccggtatgtgttttattaccattttcaacatgggcaattttctttgcaggaattttttgggagcagtccgagattgtagatttgggatatggtagtgcgatggcgacgtatatacatgcaatcccatatatgttttatgcattagtagcacttataattgtacccttattcatatttggggtaataccgaaattaggcgctatgaaaagtgcatataagcgtgtagaagaaacaggacaagtgtatagcaaagaaagtcagaagtggaataaaaatggaaatgaagaagttgataaagaagcaaaaattgtggattttctttttccgattttgacaatgatcatagtgcaattaacagtaggagatatgtttattgcaattatagcggcgatacttgcagcaggaattatttatatcccacgtaaaaagatgagaacgaatcagttttgtgacttatgggttcaaggatttgcggattcggtttctgcattggtaattattgttgctgctttatagatgagacaggcatcagcagatattaatttgccaaattatgtgatgagtgtggttgaaccatttgtaaatgctaatatatatcctatggtagcatttgttgttgtagcaatgttgggctttataacaggaagtaactgggggataccggcagtttgtgcgcctattattattccattaggtgctgcgtgtggagcaaatttattaattgtaatagcagctattgtatgtggtggaactttctgtagtcatgcttgtttttattcagatgctacagttataacatcttccagttgtgggattgaaaatatggagcatgtttattcacagttgccatatactatgattgcagcaggtatagcgagtattttatttttaatagctggtttcattttttgagacagggggggaggattaaatgaaagtgcttttgacagcgactgtacaaagtcacatttgtcaatttcataaaccacttgttgaagtattgcataaacatggatgtgaagtccatgtggctgcaagagataatttggcagaaaaaaatgggttaaagcttgattttgttgagaaagtttatgatataccatttgcccgttctcctaaaagtaaagataatatacaggcttataaggaattaaaaaatattattaataaagaaaagtatgatgtgattcattgcaatacgccaatgggaggaattgttacaagattagctgcaaagcaggccagaaagcaaggcactaaagtttattatacagcacatggatttcatttttataaaggtgcgccgaaaaagaactggatcgtgttttatcccattgaaaaatacttttcaagaatgacagataagctgattaccattacgaaggaggattaccacctagcaagccaaaagtttcattgtaaagtggagcggattcatggcgtaggcgtggatgaaaaccgatatcattccgtacttcaagaagaacaaatggaaatcagaaaacagtttggctttactgatggacaaaagattattttatgtgtaggggaattgcttccaaataaaaatcagcaaatgattattcacgctatgcagaaaattgtaaaaaaatatccggatgcacaactgcttcttgcaggaaatggatcagaaaaagaaaatcttgaaaatttgataaaatctttgagattgactgaaaatataaaaatgctgggatatgttacgaatcttcaggaatatcagaagattgctgatgtgtcagtttcttgcagtaaaagagaaggacttccgctgaatattgtagaagctatgttatcaggaactccggttgtggcttctgtaaatagaggacatagagaattgatacaaaatgggaagaatggatttcttatagatgtaaatgattgtgaaaggatagctgataaggttttaaagatattgaccgataagcagttgtatggagaaattcaaaaaaatgctaatacatacgcacaggcatatacatttagaaatgtaaaaagagaacttacgaaagtgtatggttttaaagatgaatgaaaaaataagtgtgattatggggatttataattgtgcagaaacattagaagaagcacttgattgtattgtaaaacaaacatatacaaattgggaagtaattatgtgcgatgattgttctacagatcatacggttaaaattgcagaaaagtatgttatagaatatccgaatcaatttgtgttattaagaaatgatgaaaataaaggattgaattatacacttaacaaatgcttagaatttgcagatggtgattatatagctcgtatggatggtgatgatttgtgtgcggaagaccgatttgaaaaagaggtagaagcgttaagaaagaaccctgaaattgccattgttagtacagatatgttattttttgatgagaatggtgtgtgggggaaaacatatgcagaattgtatccgataaaagaaagctttttgaaagggactcccttttgtcatgcggcatgtatggtaaggaaagaggcatatgaaaaagtaaaaggatacagtataagtgatagattattaagggtagaagattatcatttatggattaaaatgtatgcaaaggggttcaaagggatgaatcttcaagaatcgttgtattctatgagagatgatcgaaatgcacaaggacggagaaaattcaaatatagattgaatgaagcatatgtgaagaaagttgcgataaaggaattaggattaaaaaaaagaaattatgtgtggtgtctcagaccgattattataggattattaccaggaagcctatatagaattcttcatagaaagaaataagaatagaaggatattgaattatgtttggtggagttatatttatatggttgttttttgttggattgatggcaaaacaattgaagttgtataatatagaaaatgtgaatggagtcatagtaaagaggtggcactggattagtgcggttattttgttctttccaatattttggttagcgtgtatgggaccggcaattaatgatattccaatgtatttgtccgcatacaaattgctcccatcttcttttatggggattcttcaatatctttccactatggaatcaggacaaggctttgtaatcattgaatggttgattaagagtgtgtttggaaacagttttacagcgtttcgtgtaatcatagcattgattcatagcattcctatcatttatatttttagaaaatattcggaagattattggatcgcgatatatctttttgtggcatcatcagttcatattggatggatgatgaatggactaagacagtttattgctgtggcaattatactctttgcacttccttatgtaataaataggaaatatatgaaggcgattttcattatattgttagcatcaacaattcatgttactgccttatgtatgttgccaattatttttattgtacaagggaaagtgggaaacaaaagaactatgttttttattgttatggctataattgcaatgttcattttaagtaaaaaccctgcactgatggatacgattttaggagaaaccgaatatgcaggtgcggttacagaaatgcaaagattgggggatgatggtgttaatccactacgagtattggtcactgcagtcccagtactactggcttttgtgcagagaagacgtattttaagagaagagaatccggttattcatatatgtgtaaatatgtcgatcattacagtaggctttaatttaatagctatggttactagtggtattttgatgggaagaatggcaatatatacgaatctttacagctttattattatgccatatttgattagaaatgcgttcacaaaaaaatctcaaaaaatagttaatatgttaatgattgtattttattttatattttactgttttgaaatgggagtagtgtagaaggagaaattatcatgtctaaaataattcattattgttggtttggtggtagtgaaaagccaccaattgttaaaaaatgtatagacagttggaaagaatatttccctgattttgaaattatggagtggaatgagcagaattttgatattcataataatcgatatgtagaagaggcatatcaaagtaaaaaatacgcatttgtaagtgatgtggcgaggttttatgcactggaaaagtttggaggtctatattttgatacggatgtagaagtaataaaagattttgctccattattagatcaagaagcatttgcgggatttgaaacagatgaatatattaatccagggttagtgctttgggtaaaagaaaaaaataatcgtttgatgaaagaaatgttaaattattatgaaggattgtcatttataagggaagatggatcatttaatacaacaacaatctgcatttactttacagaaattttaaagcaatatggattgattggaaatgggaagatgcagcggtgtggaaatattacaatttatccgaaagagtatttttgcccatttaatgatcaaacaggtgttttaaacaaaacagaaaatacatatgcaattcattggtattctaagacatggatggaaccaaaacagaaaatcagaaacaagatcacaagagtattacataggttttttggaacggagtgctttaggagattcagaaaatgaaaagcatattgattttatcacacgcgatggaattgggaggagcagaaaaaagtcttttgggactcttaaatgcaatagattcaaaaaaatatcaagttgatttgttccttatgagacatgaaggaagcttattagaagatattccggaaaatataaatttattgcctgagatccctgcatatacggtgttagcaagacctttaaaggatgtaattaaggagagacattttattttagcttttggacgtattgtaggaaagataaaagcgaggagttatgagaagaaaagaaatatcattgatagtggcgtggggttagaatatagtcacaaatatacagtaccatatatgcctaagatccaaaagcaaaaggtctatgatatggcaatcagttttttaactccgcattattttgttgaacaaaaggtacgagcgaaaaagaaaattgcatggatacatacagattattcaaaggttcagattaatgttgaatcggaattaaagatgtggaagaaatatgacaagattgtgtcaatttcagatgcagtaacagaaagctttttaaaggtttttcctgatttaaaagataaaattgtggtgatagagaatattttgccggaacagttgatttacaaacaaatggatgagtttgatgtttcagaagagatgttctcagaaggagtaaagttactgtcaattggaagatattgttatgcaaaaaactttgataacattcctaatatctgttcgcgaatgttaaataagggaattaatattacttggtatattatcgggtttggagtagctgaagaacttataaaagaaaaaatcagagaagaaaaaatggaaaatcacgtcattcttctggggaaaaaacaaaatccatatccgtatataaaagcttgtgatatttatgtacaaccaagtcgatatgaaggaaagagcgtagcggttagagaagcgcagttgataaaaaaaccggtaataattacgaattattcaactgcaaagagtcaattagaaaacgaaatagatggcttgattgttccaatggaaaataaggactgcgccgatcagatggtagaaatcattcaagatgtagagaaattgagaaaaatttcggaagcatgctctaaaagagattattcaaataagagagaggtgcaaaagctttataaattatttgaatgaaaaggggggggg

SEQ ID NO: 7725 - DNA, 2632 bp, Unknown
  gut microbiota DNA sequence
taaaaatattgaattgatattagtagatgatggatcgccggatgcttgtccgggaatctgtgaccaatatcaggaaaaggatgaacgagttatagtttttcatcaacaaaattctggtgtggcggttgcgcggaattcagggatgagaattgcaactggtgattatattacttttgtagatagtgatgattatattggtaaagaaatgtattcttctatgcttaaaaagattgaacaatatcagtgtgatgttgcgatgtgtgattgcataaaagaatttagaacacatacagaactatatacacatgatatccgagggggatattacagtagaaagcagttagaagaagaatactatcctcatctattgatgatggagaatgtagaatatccggctactatttcgaattgtctgctggtatttaaaaatgaaaaaaaagaaaatagcttcggtatagagtatgaacccggaatacgatattccgaagatttgttgtttggggcaagactattgcgacaagctgattcgttttattatatgaaggggaaagcatattatcattattgtatgaatccggaatcagctacacataaatttgttcctgacaaatggaacgattatcagaaactccatatgaaaatagaagagtattttgggagtgatgagatatttgattttcaacatcagatagatttatgtttattgtttttcttatataatgcagtaggtgatatttggaaagaaaaaagtttaaatagacatgaaaaacaaataatgatcttaagtattttaaatgagtacaaggtcagaaatatgtttaaaaggttaaaaatattaaaattaccaatttcaaataaattgaaaatagtgacattaatgtataagtatcatatcttttggatattgaatttggagaagaggtaaaggaacggagctatgaatgaagtaaaattaagtgtgatcgtgcctgtatataatgcagaacaatatttgcgaagatgtgtggatagtattttagatgcaacaatttttttagggggggggaaagtgagattattctgatagatgatggttcgatagatgatagttctagaatatgcaacgaattagcagaaaaaaatagagagataaaagtgtttcatatttctaatcagggggtaagtaaagcacgtaattatggaatagaaaattctaggggtaaatatattgcttttgtggatgcagatgattatatagaaaaaaatatgtacaaaataatgattgcacaaatggagagtgattctacattagatgtaggggtatgtctttggaatttcattgaccaaaatgggaagaaggtggttaataaagaaaatatttcattttcggcttatggaaaacaaacaggaagggattttttgaaacacatatatgatgattcttatacaaatggaatagttgtgtctccttggaataaaatttttaagagagaatgtattgtcaaacataaaatggtgggacgatatgcagaagatgactacctgatgagtaaagtttttagtaatgacgattgcagaatagttgttattaaagaaatactttataactattgcgaaaatgatgaccagatgacaaagaaagaagataatattaataaactattttttttggatgttttaaaggaaagagaattattgtttagctatagtgatgaacttgttttcaaaacgcaaaagctatatgtagaaatgtgtatagaatactatagcacttttcattgtaaagcagatatggagcgatatatcacaatattaaaaaaatatttatgtaaattactgagagataatagagttaaagtatctacaaagataagatggataatatttgcacttatgccgaaagcatatttgaaagttatattaaaaaaataataagacggatagatgaaaatgaaaaaaataacaattatcatgccggtatttaataaagaaaaatatatacgggaaacaatagaatcggttttaaaccagacgttaaacgaatttgaatttattatcattgatgatggttcaacagataagtcaggaattatttctgacgtgtatgcaagaaaagacgaaagaataagagttatacatattccgaatggtggcgtgtcaaatgccagaaacattggtctggatatggcagaaggagagtatatcacttttatagatgcagatgatagagttactgaaggatatttggaaaatctatatgactgtattacaaactcaaaggcggatatggtaattagcggttataaaaaagtttgggaagattcagataaagtggaaattagcagcatgaatattctagggttagtagagatggatgatattttaccatattttgcaaagtggcaaaaggaaacgggaatttttgggtattgttgggggaaagttttttctagagaattatgtcaaggaatatattttgatacatccatccggcttgcagaagatttcgacttttatttaaaattatatagaagggtaaaaacgatttattttgataataaacataattatctgtatcttcaagaggcacaaaattcatcggtggcaaagagcgattacgagatagattatgtggctcagttgaaaatcaatt

SEQ ID NO: 7726 - DNA, 12783 bp, Unknown
  gut microbiota DNA sequence
tggaattaaaaaatttttttgaaggtaataatcaaaaaatcttactcgaaaaaattagtaattacttttatttctccttgttttattgtgacttgaataattttgaaaaagttttcgacagcttatataaaatatatagtgatataaaaataaattttgtgacgaaaggtttctttccgaagacattattatttttattaagacataatagaaaaaaagaaattaaatatttaatggggatgagaagatgtgtaaggagaataaaatagtttcgattatagtgccggtatataatgttgaagataaattgaaaagatgtgtggaaagtatacgaaaacaaacgtataaggatatagaaataattttaattaatgacgggagtatagacggaagcggttctatatgcgacatgtattccaagatggatcgaagaatacatgtatatcatcaagaaaacaaaggagtatcggcagcgagaaatacagggattgaaaattcagggggggtatctgttttttgtagatagtgatgatacaattaattttgatacaatttctgaatgtgtcagactcatagaggaagaaaacgcggatttagtaatgggcgggtattcaggaattggtgaaaaaggatatttaagatggtcaataattcctcaaggagtaaaatgttacacaggaatagaattgttagaaaaaaaagaaaacgacgtccctgtaggctatgtgtggtcgagtttatataagaaaagcttatggaaagatgtgcggtttcctgtaggatataaatatgaagattcgtggactactccggaaattttaataaaagctaaaaaagtcgtgacatatccaggaagtatttataattactatgaaaacgaaggatcttttatgcattcagaaatgactgtaaaggaatatcaaatgcgtttggcactgtatgatcatttgattttgctatatgaggaaaataaattgccaaaaaagatgatagagtgtatggaaatatatatgaatcattttgatatttggagaaaaagaggagtcatttttgaacaaaaatacatagaaagaaacaatgaaatagtgaaaaagtatatttgtaaaacaaaaggaattcctttgcagaggaaaattaaagtaatcataaaacaaagtttgaaaaggttaaatcagaaaaatggaattcgagaataaagaagtggtaaatcgtcctttggtttctgtcattattcctatatacaatgttggaactacgatttatagaatgatagaatgtctggaacaacagacatttcaaatgtttgaattaatacttgtgaatgacggaagtacggatgaatcggaagaaatatgtaaaacaataatcagaaatcatcaaaattattatttgtattctaaggaaaatcaaggcgcattttcagcaagaaatctggggattgagaaggcgaatggcgcctatcttacatttttagacgcagatgataaaatcgattctaattatttggagattttatttcataactgtatgggaactgatattgcggtttgcgatgttgcggtatataaagaagatactgaaatttccaggtttacgggtggaaatcaaaaaataacgcagacacaggcattgaataagctgcttgtaagaaaagaaattaattccggaccatacggtaaaatgtttagccaaaagattatcgaagaagttcgttttccctttttgcgtgtatacgaagatatattgtttgtgctggagtgtttttgtaaagtaagagaaataacagtaacagataaaacaacttattattatatgcaagaagatacaggaacaatgggaagaatggcaaaatcaccgtccgtggacatcattgccgcaacagaaaagattatggattttattgctgatcggagggacttgtcagaagaatgtacttacataacgatttctcatctatatcagtatgcattaccagtggcgatacaaaataattacagagggtgcgaatttatattaaagacacaaatattgtatcggaagtacatggaacagattttaaagtgtaaagcaatgccatggaaggaaaaagtcatcttttatttgtatgcgcatggttatgtgtatacaaataaatttataaaaaaaatacaaaggtgaaagggaaaattatgaacaaaatatatatgtatgctcatgggggaagtggaaatcatggatgcgaggcaattgtacgttctacattaaaaattttaaatgatgtaaatgtaaagaaagagctgttttcgactaaacccgaagaagatcagaaatatggtataggtaatttgtgcaatgttatgtcagaaaaaggcacttattcaaaaaaaagtatagaatttgcaaaagcatactgggcgttaaaagtgaagaaagattatatgccgatggataagatggaatatagacacgcaatctcaaaagtacaaaaaggagatattgcattatcaattggtggagataattattgttatgcagataataaacgttatacaatgctccacgatttatttttagagagaggcgctaaaacagtattatgggggtgttcagtagaaccggaattgataaaacgaccagagattgtaaatgatttaaaacgatattcgcttattacggcacgggaaacaatatcatataatgcattaagaagtgtaaatcctaatacggtgttagttgcggatccggcatttgttttggataaaaaagaaattccaataccgaaagtgatggaaagtcaggagtttgtaggaataaatttgagtcctatgatagtagataatgaatcaaataatggtattacagttaaaaattatgaaatgttaatagagcatattttagaaaaaacagactttagcattatgttagtgccacatgtggtatgggagtttagtgatgatagaataccgcttaaaaatctttatgagaaatataaaacatcaggacgtattgttttattagaagatatgtcatgtgagcagttgaaagggtatattgcaaaatgcagattttttataggagccagaactcattccacaatagcagcgtattcaagttgcgttcccacccttgtagttggatattcagtaaaagcgatcgggatagcgcgcgatttattcggtatcgaagataattatgttatttctgttcaaagcttagaaaaagaagaggatgttttgaatcattttcgatggctttgtgatcatgaaaaagaaattaaaacaaaattagaaatcaaaatggaaacttataaaattaaatcttatagtgctggtgatgcattaaagaaactgtggtaggtagagagatgtcatcaagaagtaaatatatagcaaaaaatattacgtttgggtatatagccaatatagtcgctttatttttaaattttgtatctagaactgtttttatttatacattaggagattcttatttaggcattagtggattgtttgggaatgttcttggaattttatcctttgcagagctgggtattggaactgcaatgaattacgaattatataaaccggttgcaaacaaagactatgagaaaataaaatctttgatgaacttctataagaacgcctatcgaatgatagcgctgattgttgcaacggttggtttggctatctgcccctttttaaaatatatagttcatgatagtaatggtgttttaagtggaaatgaaatttatgtgtattatttgatctatctatttaatacggtgatcagttattttgttacatataaattcagtttggtaaatgcagagcaaaaaagctatatattcacaacgattaacgcaatcactaattttttgacagtagtttttcaaattattgtattattggtgtttaaaaattttcttctttatcttctgacagcatcagttatcggtgcattgcagaaaataggagttagtctatatttaaggaagatgtatccatatcttttggaaaaaccagtacgaaaattagataaagaggaattatcgccgattaagaagaacgtaaaggcattattgatccataaaataggagaaatcagcgtatatcagacagataatattattatttctatgtttgaaggaataaagaccgtaggattggtatcaaattatattttaataatttcatcggtaaaaggctttgtagatattatttttaactcagctatcccaagttttgggaatttaatggcgaatagtgaagatgagcggaaatatgaactatttcgttgctataagtttcttggtttttgggtgtatggattttgcagtattgcttttttgattctggcatcaccatttgttactctttgggtaggcagtaacagaacgcttgatcagttgaccatatttttgcttatagcagatttttatcttgtaggtcaaagaatatgtatgaataatgtaaaagtagcgggcggcgtattttggcaagaccgttatgtggcatttttacaggcaattgtgaacttagtagtttcggtggttatgataaataaaataggattgccgggcgtatacgtaggaacgattgtgcaaggcttaataagtacaattattaagcccattatagtatataaagatttattcaaagtgagtccgtttttgtattttaaacaaggattggggaatttaattgtggtggttgcagcatatatcgtgagtctttttatttgtaatacatggctaatggaaaatactattttgaattttgttcttcgtatgctgattgttgtgatagttcctaatttaatatttgtaggtgcatattttagaacaaaagagtttgcatatttgaaaaacacgattttaaggatagtaaaaaggaagtgataaggttggaaaaagagaatccattggtaagtattattacaccttgttataatggagaaaacgtaatgcatcgtctgttagacagtattctgtcgcagacatattctaatatagaatttattttgataaatgatgggtcaacagatcattcggaagaaatttggtatcaatatgaaaaaaaatttaacgaaaaaggtataaaaaccatttatattcatcagagaaatcaaggactgggagcggcaattaatgccggattgaaagtttttaccggggattatttatgctggccggatattgatgattattttgaggatacttcagtagaaaaaagagtaaattttttagaaacccataaggaatatggaagtgtcagcagtgatgcaaatcaatatatggaagacaatctatcagagccggtaggaacaatggcaagctggctgaaacataaagaagatgagtggcaatttgaatggctgttaaaaggacagtctctattttgttcaggttgtcatatgcttcgaacaaccagttttctggatgtgaatccggatagatatatttacccagcgagaaggggacaaaacaaccaaatgttacttccgatttattataaatataaacatggatttatagatgaaccgctttataactatattgtatataaaaagtcgatgtcaacgcctgacataacggaagaatcagcactcgatagaattaatgagtatttggaattgttacgttggacgtttaagcagatcatgtttgatgaaaaaacagaaaaaatgtgcatggaagaattgcgaaaaatacaatggaatgatatgtcaaaaatatttgttgagtatggacatcccatattattcttaaaattgtattttagtttaaaaatgtatcagacagaaatgaagaaagaacttaaaagcgtattgttgtcaatgaaacagaaatggagtaactggaagtatgttaaatgaaaatatcgtaagtctattaattccttgttataatggagagcaatttgttgaaagatgtttgataaatgtattggagcaggaatatgcacaatatatagaattaattttagtgaatgatggttccacagataaaacagaggaaattatttttcaattacaaaagagattagacaatgaactgtggagattttgttatataaaacaggaaaatcagggcgtaggatcagcgatgaatgctgcattaaaagaagtgtcaggtgaatatctaacgtcactggatattgatgatctaatgactaaggattgtatttcgaaaaaagtaagctggttaaaagctaacccatcatatgcactggtacgaagtaatggatattttttatttccaaatcaagaaaaaagacttttttatgcagaagactataaggcatcagaagatgtatttcttgatatcttgaacggtagaatctataattggccaggttcttatatgattcgcacaaagaagttcttggaaaaaattccatcaagagaaatttatccatccagatatggacagaatcttcaactattgttgccagcagcataccaaaatgaggggggatatatcagttctccactgatgatgtattatattcatagtgaatctatgacccaccaagaggataaatcgggagaaaaaaggtggaattatacatatggttttcaggatatttatatgcatgttattgaagagatatgcaaagaaaatcaaaaatcaagcatatatgaaaagatgataaaagccacattttctaggcagaggatggagttggcgattgaattaaaagataaaaatctgtgtaagcgagcgtataaagaattgaaggatacaaaactgcaaacagagcaggatagaattagaatgtatatgtttgtgtcaccgataaaagggattattttaagaataatacggaagcttggagaaaaataacaagaagttttttagaagaggtgacaaatgaaagaacctattacgaaagtgaaacgtaattacggaatagatatgctccgtttagtagcaatgttttttgtcgtaatatgccatgtattaggtcatggtggagtaatgaaaaatgcaacagggtataattatagtgtgagttcattgctgcagatagtggcatattgtgcagtaaattgttatgccattatcagcggatatgttggttataaagaagaagataattatcattacacaaaatatttgaaattttggattcccgtttttttctatagcgtgggaattacaattattttttatgttataaattctggaagtgttggtattaaagagattatatgggcttttttccctgttactacatatgaatattggtatgtgaatgcatatacagctttatttttcttaataccatggatcaatagattaatacaaaatattacggaaaaagaattaaatagattgatatttgtgctgtttatgtttttttctgtgtatctgacattttctacttggtttgcagatacatttacactcgggggggtatgattttgcctggcttataatcttatatattgcaggtgcatggataaagaaaaataaaattaatgaaaaatggcgtgtatcattttggattactatgattactatttgtatagcagcaacgtggctgtgggaaacatttgctccggttgctaagcggctttttgtatcctatattagtgttacaattgttttaatggcagttggaatggtagcaatattttcacgacttcaattaagttcaagaatgatttctatcgtacgtttcttttcaccagcagcttttggtgtttacttaatacattcacagacttggatatggagggagcttatgtcagatagattttcttggattgcaaattataaggtatatacgcttccttttattgtagtaggatgtgcaggcggaatttttataatatgccttttaattgaaaaattaagacttgtcttgtttgaagttctaaaaatcaatcgattgatacaaattttggagagaagattggagtcagtgttgaataattgctttaataaaattggtggataaggaatgaaatagtagggagaaatcattttatctaaaaagttgagaaaaaatatcagttataaatagaggactggagggtggtttatatgaagccaattttaacgatacatacagcgacatacaatcgtgcatatattttagaaaaagcatatcggtcgttacaaaagcagacggaaatgaattttgaatggctgattacagacgatggttctaccgatggaacggaagaacttgttgatggttggataaaagagcagaatccttttaatattagatatattaaattagaacatcaaggtttgattagagctgtaaactatgcaatatctgttgcaaatggtaagtactatttccggttggactcggatgactatttgcgttatgatgcagttgagcaaattgtcaaaagactaaatgaaattgatgataaagaagagtttgtagcggtagggtttgttaaggttacagaagacggagaaccgctaaaaggagtgtggccaaatgtaaacaaaaaggggtttgtagattgtactaatttagaacgaaaaaaatataatctggatgcagatatgtgtgaagcatataaaacggatattatgcgtaaatataaatttcctgtttgggagggggaattatttgcgccggagcagttacaatctgataaattggctatgcttggatataaaattcgatggtacaatgaaggaatttatatttgcgaatatcaagacattggattaacaaagggaaattgggatttgttaagaaaaaataaaatgggttatgcgatgttaagcaacatgcaaatgataacgaatgaagagtttaaagaaaaattcaaggcggcaggacagcatatagccctttcgattgtagcgggatatccatcttatatttttaaaactaataaaaaatggcttacagtattggcattaccttatggaatattattgagctttaggcggagagagcagtttaagtgggatgatcctataaataaaagaaattatatttagatttaaagtgatttttgttcggaatcgatatttatgagggaaggggaaggaaaatgatattaacgaaaaaacagaccaagtctttacaaggaatcgcaattttatttatgctgggattgcatttgtttaacagaattgatattgcagggttctatgatgtaaaaatttactggggggggataccgctattaacatacatttcatatatatttgatgcgtgtgtgccaatttatctgttctgcagtgggtatggtctttatgtcagtgaggcttccgggaacactatgaaaaagaggatacaaagagtttttaaacttctgattcgtttttggattattatgattctgacatgctgtgtaggatatataatgggaatgcgggagcagtttccgggaagttggttgaattttgttttaaatgcgtttctgattaaaagcagttatgtgggctctttttggtttgtacagacttatacaatacttgttttattatccggagtattctttaaattgattaagaagtattcctactggatcgtattaccgatatcacttatactttatgctggtgcatttggtattgaatatattgttttggaacgaattcaaatagaagcggtggcgcttttggtaaatgcgctgatgctctttatgcgttcgcagttttcttttgtcattggaatgattatggcaaaagaagaaattgtggatcgttggaggctcttatctaaaatcagaaacaatccggtattgccatggctgcttttgatacttgtgattgtagtgagagcgaatttacgacacatgatttttgctccgttttccgcagttgctttgattgtgttatttggcacatacagttggggcggagccggagagaagatattattgttcttcggaaaacattctacgaatatgtggctgactcatatgcagttttatatgatatttgcgccaacacttgtattcggatcaaggaatgtgtttgtaatcatgttgacattagtattgttttcacttgtggcatcttatgtagtagactggatatatgatagagtgagtgatatgatttttaggaagtgatgcatagatgtgtgggaagtttaggagatggaatcgttatggttaaaggttttaggatttatgcggagtatttcttttcttttatcatattttccacatttctaacttttttcgtaaacgtcaaatagcaagtacctgttcaaaatcatcttatgtgagataataggctcattactataaataaagtccaaatagtttagcacttaacattttagactttgctacaggagactccggaaagtccgtgaggcttatctagaaactgcggatcatttggaaggtggttttcatgaatcaaaattttatgcgttttatggtggggaaaacgtcttttggaatttcttggtgatagataacaatcagctcctttcgctgggcttggttttgttaatttaattatatcacaaagaattgattgttatataaatttagagtgataaagaggtttgttatgcttcgaaacacgcatagatattgaaagtgtgaagtcagttgattttatgccgaggatggtttgaatgggacgatatgattcataatacattagggtgtgtgtgcggctatttgattgtgaaaaagttgtatgttttaaaacgtaaaaaggcagattattaataatatttctcaatattcaggaggagatgatttgattaacaagaaaaataagacgtatttttttgttgtgatttcattcgtatgcattgcttttattgtgggttttcatattttagacggcagaaatattacattatttgatccgatcatagaatatattaaacaatatcatatcaaagatgttgtaaatatcgttgctattttatcagggatttccgctattcttgttggtattgcaagtatcagaatatctaatcttggcgcggtaaaggagtattttcagcaaggggataataaagagtatacaactgccagacataatttatataagaaatttgacgaaaatgtaccgattgatcctaatgatgcggatgccagtaatacagtttcattttttcacttttggggattaatggtaaagaaaaaatatttgcctttttgggtttttaaaagtgcatccggatatgcagtcataagattgtatgagggacttcaggaaatgatagaaataaggagagttgataatccggaatatgctgaatattttgagtggatatatagaaaatgtcggaaagttttaaaatgttcagaagcaacaaatcctgtgcaggtggagaaaaaacagaatgaggaaaccagtttccttagtgaaagtgaattaaagacaatcggatttttaaaatatggtacaaatgtacttgtaagcagaaaggcaagtatttataatccggaacagatcgtactgggagataatattcgaatagatgatttttgtatattaagtggaaatataaaacttggttcgtatatacatatttctgcatatacatgtttgataggcggtgtaaagggaattatattgcaagattttgtaactgtatcatcaagatgtgctgtttatgcggtgagtgatgatttctcgggagaacaattaaataactctatgattcctacagcttatcgcagcgtgatcgaaggacgagttattttagaagattatgtgagcgtgggaacaggaagtacaattttgccaggcgttaaattagaagaaggagcagccgtaggagcaatgagttttgtgaaacatacacttgaaggatggaagatttatgcgggagctccttgcagatatgtaaaagacagaaatcaaaatatgaagcagctgcgggctgtattgcagaattcaggtgaatatgaagaaagcaggtgaaaggatgaaacctagaatctttattggttcttctaaagaaagcgtaaagatcgcggaaaaagtaaaaagtcttttagacggtgagtatgtctgccagttatggtgcgataatttttttgatttggggcagtgtacttatcatgaattgcttaagaaatcgcttagttttgattatgcgatttttattggcgggaaagatgattatgtaagaagagaatcagatagaacccacaaatatgccgctcgtgataatgtttatttggagtttgggttatatgcgggaattcttacatatgcgagatgttttttcctaattcaagaaggctgtcaaatagcatccgatctgctgggggtcaatgttgtcttttttgacaagatgcaggatttgagtaaaaagattttaacgattacagaaaaaatacagaaagaacagaaagttgctcgaatcagtcttttaccatctactagcttggcagttggatattttgaaaattttctgaagccggtatctcaagcaatacagaaattggatgcagtttgtattgccggaaaaaagtatgatgtgaaaaacagtgctaaaagattagaagtagctattcctgctaaagtatctgaagatttacgcatgtggagcgaatatgtttatgaaaatcatgcagtagaaaaggtgacagtagacagtagtattagaaaaataggtgttaatattgattatggaaaattggagaacacaggtgatcttacggttattgatgttccgttgacattatcggctgcatatagatcagttgagttggcgttgggagtagattatatcggcattgaagagattaaggaacttgcgaaagaaaaagaattgaataactttataaaaactgtgaataatcgagactatgaagaaaagtctgtaaatatgatct

SEQ ID NO: 7727 - DNA, 37105 bp, Unknown
  gut microbiota DNA sequence
ggcgtcggttctggttttacctcttcttcaacttcgatttccacactgtccgtaactttcttttcgccctgcactgccgttgccgtgatcgttgcttttccgactttcagcgctgttacttttcctgcttcatctactttgagcaccgtctcatcagatgttgtccatataattgtaacatcttttgcatctgtcggatcaacttttgctgttactgtcgtttcctctccgactttcactttcttgctctctgccgttactgttacactcttaagctccggcgtcggttctggttttacctcttcttcaacttcgatttccacactgtccgtaactttcttttcgccctgcactgccgttgccgtgatcgttgcttttccggctttcaacgctgttacttttcctgcttcatctactttgagcaccgtcgcatcagacgttttccatgtgattgtaacatcttttgcatctgtcggatcaacttttgctgtcactgtcgtttcctctccgactttcagtttcttactctccgccgttactgttacactcttaagctccggcgtcggttctggttttacctcttcttcaacttcgatttccacactgtccgtaactttcttttcgccctgcactgccgttgccatgatcgttgcttttccggctttcaacgctgttacttttcctgcttcatctactttgagcaccgtcgcatcagacgttttccatgtgattgtaacatcttttgcatctgttggatcaacttttgctgtcactgtcgtttcctctccgactttcagtttcttactctctgccgttactgttacactcttaagctccggcgtcggttctggtttcggattcagattttcaagtttttctgtctcagctttcaatgcgtctgctttttcagaaacattatgatttaatgcatatgcattttcatacgctgattctgcttccatatacgctgcaaagaactctttatacttctcatcaccgtactggataccatactcttttaacttatcatctgctgctttgagcgtctctttcaaatgatctttatttaccgtttcatatgcttcaaattctcttaactggaatgttccgtcaacgccctgcatcttaatataacgtgtctcaagcggctgttcaaacttgattgtatttactgattcgccttttatagatgcttttccttcaatatccttccaaacttttccgtctgaagaaacttgaagtttaaatgtcgccggcgctttatcccactgaaggacaagatgatcgatctgatgtgtctgaagcatatctaccgcaaaactgctgtctgcataaagaccttcaaagaaagagtctttctcactgacatctgttccatgttttccgtctgccgtatttccgtcaccatcaatcgccttccagcctacacgaagctttttatttgcattgtcgtaattattatcgcctttatgctgcgctgttcctgctgcagctttgtcctgcgctacattgacttctgtcactgctttaccctctgccgccaatttaatcgtctttggggacaatgctttgtcataaactttcaagtctgcgatctttccgtcaaatccgtttccgatcgttgtcaacggaaatacaaatgtagataaaagatgattgtaatccgtttctgaatttgttgttctcgtcaatgcttgtttaaattctccgttgatgtaaagttttgttacctgctgtgttccgacgatcgttacatttacactcttattttcaggaattgtataatcaaacttctgctcaaaataagaacggttgatctttaattttccgtctgatccgatcgacaaacgaccgtctcgtccatcaaacaactgtgcgtctccttttttatccactttcagatcaaactgaactgtatatggataatcaacagatcttaaccctgtcgtaagacttccatctccgttcaagtcaagccagtttttaccatcttcttctttcacatctgcgtttataactgttccattatatccgtttcctgccgcatcatatacgactgttccgtcctcgcctgattttacatttttaaaatcataatctaatacaagcgatgtctctgaaggaatatcggatgccagttccactcccggacctgcttttaatttttcaaacttgaggctatactcctcatatgtctggtcttcatccgttccgccccatgttttctcactaagaacagcagcctgacgcatcaatcgttcgtaattatcacgttctgtcacacccatgtctgcaatatctgcccacatcgcagtctttgctccgagaagattcggatctgccggctgaaccgtaccgctgctgctgaatgtaaccggtgtccagttattgaaaatatgctctacattgacaacatcgcgtttatcccttcctgtatttccatacaaatggaaagaatccacattgacgatcttaaatccttcggcgcttcgtttcgccgcattatcccatgaatttgaccagaaatcaatttcgatatctgtataatcttttgtggaaattcctttatcatcaaaatactgcttcatagatccccacatacgtactttttttccgctttcctgaacggtgtcagccatctcacggatgtaattacgcattccgtcaaattcatcgttcttaatactccagtattcgtccactccgatatcaaccgtgtctcctaaaaatacaggatctgcttcgttcagatattcgctgtacagcgccttaagaaactttaacgcccactgtccgctttctccttttacagaaagcagctcccagtcccggtcgcttttaattccgtcttccggcatattttcaaaaccttgtacttttctgatttcctcgatattgtttctcacatatctgttaaataacaacgaatgtcccggcgcatcgatttccgaaatcggattcatgccgcaatccatcgcaaactgctggagatctttatattcttctgctgtatactgcggttctccgccgtaagctccgttttcatcattgtaatatgcattctgctgaggatctgtctttaaactcggaaacgttttgctttccaaacggaacattcctttataatttttccagttattataatcttcgcgtcctgtcgtagctcccgaatgacgattatcgttcagatgaaaatgtacttcattaattttataaaatgaaaacgtcttcacaatatctttcaaagcatccaaacgatacggaacacgcgcgatatcgatcattactccgcgtacttcatattgagagaaatctcttgtcacacctttagggaaagaatacgttccgtcttgtgtataatacacctgctctaacgtctttgttccgtacagacatccggtgtatccgttactgctgatatgaattcctccgtcgtctgctttcagtaaatatccttccttgcctgtgtcgtatgtatcttccggcagtgactcaatcaagatatcgtcttcgtctccgccttctccgctgacaacctcaagttccattccggtaatttctttcatatcgctcttaaactgagacgctactttctcaagtccgactcctgcgccgtcctttaaaacaatacgggaattttccgtaagcttaacttctccctcatatccataccattcttgaagacttggaatcacttccggttcttcattctgattttttatctctggataaatctctgcatgttttgattttttattcggcacatgaacctgaaatgttttctctgccgtatcttcaggatcattttcattcacaacttccaatatcacatccatatcataatcatacatattatgatcactgatctgaccctcatcagaaataacctgaggatattcgcttcccttcacactaatactgaatccatcaggcatcttcggaagcggaactgtctcagaatctaccgtgatcgcctcaagcgcttttacagaatccatcgcttcttttgcatttttcggcgccggatctgtcacctcgggtgtctgtacctgatccccatgtatctcaatttcctgaacagaaacactgttgccgcccgcgttcgtatttactttattgaaatagaaacgcacataacggtcaagacgctttccttctacatctgtgatactatcatgcttattctgctcatttcccggctgacatgtcacatgtttaacagttttccactctgattttttatcagcccttgtctgaatctcatagtcgatcgaatatacaagtttataaaaataaaggtcgatgcttgtaatattcgtaacctcatttctcagatctatctcaagccactgcggggtctgctgctgatttggtgaagttccgtttttcattgtaggtgcagaccatctggaagtatccgacttctgtccgtcaactgcaagatttgcagtcagattcggcattgccgcctctactcctgacgcagacgccgtcttattcaatgcgatatttcctgtgatcgtctcataaccgctttcacttttcttcgttccaatcacctgaaattcccgcaccccgatactgcggtttgccgcctgactgtttcctgatgtaaagtaaagccttatatagcgtggaatctctctcgcttttccgttttccttcacatcaacagtttttttcaagttcagatctgtaccttccggcatgtctgcagtcgcaatcgttgtccacactgcgtcttctgcattggaatcagaaacttccacacggaaatctccgtacagccttgcaaagaaatcaaccttgatctctgatacaacgcaaattcctcccaggtctacttccagccactgctctgaaaactccgcgtcctctccactttgccatctgctgttatccgcttctccgttattatcggaaattccgtcaaacgcaagccccggttctcttgcgggaaggttgcccgatgccgcaagaaacttagatgcccgcgcagtgcttcccctgtctgccgcaagatttatttcttgctgttcagcctctccactcatttctgtgtgagcttcttctgcctgcacaactccaatacccggaacagaaaatcctgtcacaccgagtattgctgccattacaagcgccgctactcttttctttttcatattattctttttctccttctatgtatccatctctcagcccagctttaatcatccggacacacgaatacagttatttctataataatcctttcaacttgtttttgtctacactttttaatatttccacctgtttttaaataattttgtgcattttttacataactttattattttgatacagtaaaaaaccgggtgcattatgcactcggtcttatccctatcttactctgtcattacattttttcatttacaagtagaagtttttcagctcatatcgtataatgtataaaaagcaacccccctctttaaatcctgagagcagccgtcatatgtacgcgaataatatgtggtgtttttcggaacaggttctcaaatcatgtactgattattagttgccgaagcgtcaatgtgacggctgctctcaagacttaaaaaggggataattcattatatgcactttatgggattaatattccatctgtaaatgatgcatcttcttcatatggatattcatttcccgcgatatgattacaatgaactctgtaataatatcctctatctacttttaatgatcttgcagtagacatatatgccgtattctcatcttccgcaacccatgcgtctatctgcccccatcttcctgtttcttcgttatatcggtcaacatagacaatcgttgcaatatatttcacatcatgattcgcagtcgttgagccatacgcatatatgcgggagattccggcttttgatatgatagattctccatccatcagatgtactccccttagatcaggagaagatgtatatcctatagacttctcctcagtcgtaagataagaaccgtcaacttgttttaactcttttcctgatgcactgacatttgtcacagaccctgcaacgattccgcataacagaacagcgcttcctaatatagataaaatacgtctcttcataacttttctcattcctctttgatgttctactctttttttgcttctctattaagtaaacaactaaataggaaaaaacttacgcgttttacttagaaaaatataaattttttaaaattttttcaaattcttccttttcaactactcctttaatctcatattgagcgcctgcatattcaaactctgcctcatatctttttacttttttatccttttcttcatattcttttaccttgatttctactccattatctgaaatgattaaaaattcatctgttaacttatcggtctctttctccccaaaagaagaatctgcattattcatatacattgtatattttactgtttgttctttatacttatacaataacatagctttttgtaaatcggtatttaactcatacttttcaatttccattccctcagggctataaactaatcttaccggaagtattcctaattctgatctaattttcttataaatatgaacttcatctaaatcttcagttttttgtgaattcatatcatccacattgataacagatgccttttcatcccccacatccctatcccaccatactttccaatatgatttacttcctactccagtcatcacgcttccaaatacaagaataaacacagccgcaacagcaattattgcataactctttttctttttacgatatacaacttttgcccgtttttcatattcataatcttgtattttttgaaacaaagcttcttccatatcttcagatacggttatatggtcaagatcttttcgtcctgaaacttctttttcaagtgcttctgcttctctttctatttcttttttcagtgataattttttcagttttttcattccttacccctttttctgtcctatatttttccttgacatttcaccaaataaggttaagatgaaattagctttagccatgtgctactattaccggaggtaactttatgaaacgaatcattttaaccggcggcggaactgccggacatgtaactcctaatatcgccttaattcccaagcttcgggaacttggttttgatattcactatatcggctcttataacgggattgaaaaggatctgatcgagccttttggcattccatatcacggaatttcttccgggaagcttcgccgttatttcagtttacaaaattttaccgatcctttccgtgttattaaaggttttggagaagcccgcaaactgattaaaaatttaaaacccgatgtcattttttcaaagggcggatttgtatctgttcctgttgtactcgccggaaaaaaatgtaaagttccggtgatcattcacgaatcagatatgactcccggtcttgctaataaaatcgcaattccgtccgcagcaaaaatatgctgtaattttcctgaaacattggattgccttccggaagggaaagccgtccttacaggttctccgattcgacaggaacttctctcaggcaataaaatcgcagcaatggatctctgcaaattcactgcagataaacctgttatcctcgtaatcggcggaagtcttggttctgttgttgtaaacaatgcggtcagagagagccttccatgtctgctgaaagatttccaaatcattcatttatgcggaaaaggaaaaaccgatgaatctttaaaaaacacaaaaggatactgtcaatttgaatatgtaaaagatgagcttcgcgacatttttgcattatccgagattgtcatctccagagccggtgcaaacgcaatatgcgaactccttgctcttaggaaaccaaaccttctgattccgctttctgccaaagcaagccgtggagatcagatattaaacgcccgctcttttgaacgtcagggattcagtatggttttagaggaagaagatcttacaaaagaaacccttacttccactgtatataaactgtttgaaaaacgtggttcatacgtcgatgcaatgcgtaattccaaccaacaagattcgattgacacgatcatctctatgatcactcaggcatccaaataaatgttttcaaaaacaatatattattccaagcgtttatccaaacattcatcctgactcttatttaagcagcaactatcttagaagtagctgctgcttattttctaaggaattctaccatctttatcctgcatctcttcatactccgcaccgaactttttacgtatccatttcttagccctatgcagcaaagcatgtaagacttctttcctaatttccattatttcggccacttttacctgcggtatatccatgtaataaacaagtatgattgcttcataccatcttggattcttctttgacaatgctgccattattttctcatggaattgctttttgtataaaacttcctctttctctataaattccgtttctaagctttctccaaactgctctttgtttttatacaattcatcatcttcagacagcacttcccttttgaacttcttattaaaattcagcgcagaattttttgctgttgtatataaccatgccgaaacatttccatctttcagctcttcaaatcctatgtatagtttaagaaatgtatcctgagttatgtcttctgccgcatcgtaattatcacctgaataaatatacgcaactttcaggacgagatttttatactttttataaatctcgttgtattcacgattacctgttaacataatttctccggtttacttcattttatccaaaatttcttttttatcttcttccgacaactctcccatcttccaaccaagaccgacttgatcccctttatatctcggtatcagatgcatgtgaaaatggaatacgctctgacctgcgcactcttcattattttgaacaatattatatccgtcgcaatcaagaacttttgttaatttatttaccatctttttagcaagaatcatcgcttttgcaactacttcctcatcaatatcatataaattgcggtaatgttctttcggaagaatcaatgcatgaccttttgatgccggtccaagatccagtattacccgaaaatcatcatcctcataaagcgttgcagacggaatttcacctgccgcaatcttacagaaaatacaatctttttctttcataaaataacgcctcttttcctttgtttattatgattacatatacctcattttaccacaaaagaaaaactttatcaaaaattcctatttattttgtagtatactttctgttgcattttttgtcgaatttcgtcgtatgaattatattgaacaagaatttttctcatgctagacttaatttatgcgtacactgtttcgcatatttatttcagtatgaaagcgagaaaatatttatgcttactaatatcaatattaacaaaatgaaccaattaacaagtgaaaacgaaacggcaaaacaaatcgtttcacaactccttgaaaaccatcagacgattgtatccatgatttcccatgaaatcagaaaccctctgactctcgtatcctctgctctgcagattatagagatacagcatcctgaagttattaactttcacggttggtctcaggcaatcgaagatattgaatttatgtgtaacctgctcaatgaactttcagatttcaacaacggaagtacgctgcaccactctgtcttttcactggaaaaacttctcaaaaatattgccgtttcctttgcaatgtcacttgattcgataaattcaaatattgagttcacatcaaaaatatcacttaattccgacaactatacaggtgataagataaaatttgaagaagttattttaaatcttctgcaaaatgcaaaagacgctgtctctgaaaaaacttttaccgactcaaaaggatctatttttctttgtgccgaaaaaatatctgattctattgtaatttcttgtaccgacaacggatgcggaatttccgatgatatcgttaatactatttttgatccgttcgtcacatataaaacaaatggaaccggactgggacttgctctttcaaaaaagattatagaagctcacggaggcactttaatcgtaacttcttctgatgaaaccggaactgttttcactataacattgccggtctgatcgaatatcagtattcgttataatgtatttttttcggtctgtataaaataacagcaaaaatgaatccgcatatgagcccccctatatgagccatattatcaactccgctgctcgtcaacccaaaataaagactcagaacaaccataaaaatcattcctcttcccgaaagctgtcctaatcttcctctgttcgcaattactacatagagaagcgctcccatcagtccgaagaccgctcccgaagctcctgcagaaaccgcagattctcctgcagaaattgctgcaatcaaagaaagtatatttcctccgattccactgagaaaataaattataataaaacgaagctttcctatttcaagttccagattccaacctaatgctccgagcattaccatattattcattaaatgtgtaattccaaaatgaagaaacatacacgtaaatattctataatattcctgtccttctgtaataaacggttcatacatcgccccatgctgaagcataaaggctgcatcttccgtatctcctaacattgacaagattaaaaatactgcaacattaataactatcaaaacagttgtacaaaaagcttcgggttttcttctcacgtcaagtcctcttttctactacaatatatttcttttttaattataaaatacccgatgtgctgtgtccatccatttccgtaatcaaatcatcccactttccccatctgtcaccttttattctatttattactttttttactgtgctttccttcatgtagatttgctcttctttacatatttctgatattttatctgtacttatccgctcttccgcaggggaaaatattgctttttccgaaatgttttcctgtgcttcgtctcttttcttcttttcttctatttttcgtattcttttttgcttttctgcctgtttctgcttttttacgtcttttttacaagtttctatcacctttttaaggtcataattttcttttaatgtttccctgtgtatttttgaaacaagaaaaacaccttctgtatctttataatcaagatgttttacaaagtattccgtaagttcatgaaacgcttcacacattgtcggttcattttctttttttataatcggcagataacagaaatagtattgttctgcctttttaaaaatcaatttcggatccaaaataatatgattattattcagaaaaaatatttttatctgttctgttataacagaaagttgttccataaaatcttcaatttcttttccgcttatttctgcttcttcataaattttatccatactcattccattttccagacgaaatgtatatcggctttgcccgtcgcgtccgataccttgtaccggcagcattccctttattttattataatgtatcatcttaatctgataatcttcctcatacggaataggaagatctacatgtatattggtatattcccattcattctgatatgtaatctgcattttcttttccactccgctttttcttctcaattaaaacaactccgctttttactgtcttattttagcaatctgatctttttttcaggatttacaatatcagccgtacgttttacatttgttttcataaatgatcttttcgcctctgcaaatacttgaacttcctctttatttacttctgcaataacattaacatctgtcatataaattaatttcccgtgaattttctcttgaaaaaatgcttctatatcataatttttatcatatcttctgacatactgcgctcccataacggcagactcagccgcagcgcctcctataatcgctttatcatgataataaaacaccgtatgaatgataattacaaaaagactgaaaaatagcggcattatatatgacatttctattaccgaatttccactcacccatctcatctttttagtatccattcaaaatgatccctcctgcatatgctgccattaaaaacggaataaacggaaactttgattttttatgaaattttgtttttagaagcataataaccgaaaacaatcctgccataaaaaacgccataaaaagtactgacataagactccaaaagccaagaaatgctcccataataactattaaaatactatctccgtaaccaaaagattcctttgttaatttactaattaaaagaaaaaatgctcctgcgagtatgcctgcgataatctctcctgttgaaactgtcctttcacatattaccgataaaattacccatataattcctgataacaaaaatccaagatgcacttgtcttctttttatatccatgacggcaagtattatcatgtagatcaaaaatgtaatctggcagaacacccatccgttcttcaacacaaaacctgcaacatttatttccctgaacatctcgaacaccctcctataccttgtacttccgtttttttcactgctctgatcgttctttttaacccgctgcatcctaatgaattatggtatttacttccattttcggtaatatacaccccggtcgatgcatcaccgtatacacatttttcacaggcataatatattccgccgttttcattgcgtatttcttccaactgttcataaggaacaaatctaatagacaactgcaaataagaacaatgataatcttcatgataaaccgattgtttttctgttatataaacaatttccgaatcttcggtttttttgtcctttccataccctgtccatccatggattctgaatgtttcttccatctttgccgatggatttccgaataaaggaagcggaactctcacctcatacttaacatgaatattcatttctcctgttttcgaggataaatatgaattccaacaagaaattccttcacttccatcaacaatgatacttctttcaattctctcttttccaagtaaacgaataatatctgattttaacttgattgtatttagaaccggaatgactgctgtatcttccgccgcacttttagcagcactataagcagcctgttttacgcctattttaatgctctgtatttcgatcatccatataagacaaagtgctgcgaaaagaaacaacggaatcgcaaatgcggcttcaatcgtaatgcttcctttttgttttttggttatctttggtacagatgctctttcagattttgccaagtatttatttttattcgtattgtatttactcatcgcaaccgacttttcctttcatttttttataagatgatttttccgcatgagggagtgcgggagagagaaagagcatctgcaccaaagataaccttattcgtacccgtaatatgacggaaatgtatacgcaagatcaccgaatatttcaaccttatttcttatctcacacttcgttacacagtgatctgctctaaatttttcacagttttgttctaaccgcatattttcttctatacgatcgatcgtacgcattgttgtctcctcttccggttgtaaaaacaaaaatgccctcaaatattctttatatgtaattccttcttctgcatccgcacctgaaataccgtcatctcctattcccagtgtgaataatgacgcaagcgtcaactgccagttatccgatgtttttactagcggaactttatttcctgaaagaagagatcttatatctataacaccttctcctgccgcccatgctaacaggatcagttgttttacagcttccgctgcttccggaattaataataaagttgaaattgtcgctgccaatgccattgcttccgactttttcacagaatctcccataagataaacataatttaaagccatccttatgaaaaatatttttgtaacgacactttccagattttctttatcagaagattttcccgaaataatatattcaatctcgtaatcaagagatctgttcttttcgtctgagtctggatattccgaaatattttctttggaagcctgcgtaaagttctgcataatatattcgttaaacaacaatttttctttcgccttatctgtatttttcctcataggaaacttgcctcttcctgtctgcagactcctttttgaagcctgcagatcaagatcgatctgacgccctgaaagcggcatatccttcggcattgcaacagataaaattcctgttctttctatctgctccaaacattgaaagggattttcttctaactctgccaaatcttcagattctgtttcttcttcatccgctccttcattctctgattgtccagatgattttatttcttcaaactcatcaagtatcgtttcttccacctgccggatttcttctccttgtatgctttcttcttcccatacagatgtcctgcctgccagatcttctatcagtcctattccatatttttgctccatatatgtaagaacctgttccctaaaagcctgtcccttgttgtcagtaagatattgaatcccgtttatcttataatctatatttttattactgtaataatgcatcctgcctattatcttatcttcattaaactctcctgttccataactcccatcgagtccgaatatatggtacgcttccatcagttggctttcatattctccgaatacggaaaatattgctccgtcagcacatatcctgctaagattcttttctgtctgtatcacagtaatttctataattccaaatataaacgaaataagaagaacaactataagacttaaaaatgccgttatttctgctttctttactttcatattttctaattaaatgcctgaactttcagatgtgatcttatcgaaaatcgaattgatcagattgatcagttctgttttaaagatcaacagaagcgctatgacaataactaatatcagcacgagttctatcactgtaattcccgatatatattttctttccgtgaaaaatctgcaaatattttcttttaagtttctttgaccggaaattacacagctttttattttcataatctttttttccatattttctcctttcctacggcattttttcccgactttttaaactttgctttttctcttacttgctatcttttattcggattttatattctgattgagaaaaatgccggaacaattacaatcgcaaaaacaatgatcaacattaaaaataacggaatcattaattttgttcctgcttcttctcctgcttttttcgccagattttttcgctgctcaaacgcatcctccgcttctctttcaagtaattctgtaagtcctctcgttccttttcttaagttttgagacaacatcattccgaattttcgatattcggacagattacatcttataccgtattcctcataacattctccctcagaagctcctccgctgatcttatacattacattaaccatttcttcataagcttttttcctgccgcacgctttagcggatatctgttctttctctttttgatctttctcatattctccggcaattttaaaccatgcttttctgatcgtcattccggatttgatataaagattaaatttattaataatttgcggatagtccagtttcatttctctgaattcttttttcttttcttctttctctttttgtgatgatgatataatcacaaaaactgcaaatccgattcccataacaagaattccatatgctctcgtctgaactccatatgcccatataactttttttccgtttacctgttcgggaagaacgatatagtcttttgtttttgtctttttatcagcttcttcaaccttttcttgaagctgcctcatctcttctttatcagcgcttaattccgacggaaatacttttgcataaaattcatatcgttcttcctcatcttcatatgttaaaatcactgtaagttttatcaatgttccttctgtcgataaattatcctgctgtaaatgtccctgtatatccataacgtcataacgatccagttcccatgaaactttcatatttttttccggaacagatgtgattagattcaagtccgatcttacttcatccaaacttttattttttccgagaacagcttgttcaacttctttttcagcttctgaaaatgcatttttcagctcttcttcatcatattttttccctgaaaccgaaatactgatgtcttcctgtttttcatcaatctttactttcatgtttttgagttcatcttttccgctctcattccgtcttaatatttcccttcctttctcatctttttcaagctttttcccattatctttactatatacacatccgaaaataataatcgaaatgaccgcgatcatccctgctttaacataaacaggatgcttttggaatattttatttactgttgctctgttcatagcctatacctcaatatgaatgatttttcttccaaagctgtacgctgcaatatatacgattaaacaaattgtcatgaaacacctccccgctgcattttcgtataaaacacttagaaattctccgaatgtcagcttcatgtataaaataataaaaaacggaactgcacacataatttcaaattctaatttttttgaagcgaacatcgtttggatttcctgttccgtatcaatcttcccgcttataatctttactgcatttcgtatgattgaaatactgtctcctccgctcatcttcgcagatgaaaatacagtgacaaaatcttctgtatcctcttgtttcattctttcggaaaactgttccatcacgctgactgccggcattttcatatcaagctgatgtaccatttttctaaattcttttctgatccttacattttcttcatacataggtgcgagatctttttctgcttctcttatcgcattttctacagagtatcccgctttcaatgccgctcccattgcctgtatcgcattactgaattgaactctgaattccttttcttttttacggcacaaatcacgaagtccgtctcttgcatatataacccatatgggaatcataaaaaatatcggaagaaaagattcgtaaaatacatatgtgatcaaaaggatgaccgctatcgactttactgccaaaaaaatgtattctgtttttttaatatcctgcagccacaagttttccggtattttcaagttcagcaaccttcataatgcttcctttaactttttcattttctgttcccacctccttaaactcatataatgtttttgtctgtatcttcccatcctcatatccgagtatctcttcaatcataataacttttctcgttttatccctgattcttccaagatgaataataatgtccagagccgatgcaacctgcctttgaatcgcctgcaaaggcaggtctattcccatcatcatcatcgtttcaattctgtgaagcatgtccttcgggttatttgcatgaccggttgacattgatccgctgtgtccgttcagcatcgccgatgaaatcatatctacagtctcttctcctctgacttcacctacaataatgcgatccggtctcattcttaaagccgatttgatcagatcacgaatcgtaactgctccttctccttccagattcgcttcacgcgcttcaagtctgacaaggttttcaactccctgaatctgaagttctgcattatcttctatcgtaataatcctttcttcttttgggataaaatccgacattgcattcaaaaaagttgttttcccggctcctgttccaccgctcacaaaaatattatattttgaacggacgatcttcctgataaactctgccgcttctttcgttaaacttcccattttgatcagatcattcatcttaatcgcttttgacggaaattttctgatcgtcatgatcggtccgttcactgccactggctttaatacaacatttaccctagatccatcagctaatcttgcatcgacaataggtgaagtctcattgacatacctgtttgcctctcctacaatttgctgtatcacatcgcacaatcttgactctgagaaaaaatgtctgtttgtccgatataactttccctctttctcataaaaaatgttctccgttccgttcaccataatctctgtaatactgtcatcttcaatcaaatcctgtaatatatccagtctgcgaaaagcattaaacagttccctgctcaatctgattttttcacttaaggggataaattcttttttagactcatcctctaatacagtccttataatttcctgaagttcttcttcctttgtttcttttgtcatatccatgcgatgcataactttctcatacatcaattctgcagatatcatactatgtcacttcactctcatctgtcgcttcatggttcgttttaatatgtccgaatatcctgctgtttttaaattttcttcatattgcctcatttttgccatagaaatttcatcttgtatataaggcgtatatatacgactacattttttcaatatgtcgtaaagccccgaaacacaatcaccaagatcaaggattacagccttatatatgcattggtccataatcgtatccaaaaaatagatccattctttcttcgtcacttctcttagatcattctcatttgagataggcatgatataatccaattgcttatattgccctgtcataaggcttgctttcaaaccataatcaattctctcttgctttaagtaatacagaagatctcctaaatcttgatttttttcacctttgaaataaaaatcatttcccgaatatccttccatgttgatataaagagtcggaactttttccgatattttttcgcctaaacaaagtgcaaactctgtttttccgattctgtgtatcggagaatagataccgatcagaccgctttcttcaggttcgtcacgtattcctatttttctttttggagcagtaaaatcactttgaaccgcatcatatttttcttctgtttttttctgcggcttatgtgcggctttcgcctcttcttctcctatccccgattgaatgatcttaagaatctcatttgccgactgatatcggaatatcgtcgtttctccctgtttttcctcttttttcatactttctgacaatataaatttcttttttgcttttacattcccccttatttcagagacgcagtcttccgcaatcaaaagaatttctatctctgctttttccgcaaactgctctatctttttcacattactgaaaaaatgaaattgaaaacgcattccgaaacgttttactaatatgcttaataaatgttccgcatattctttctgcacatcacaaatcaaaaaattacctgcaatgcctttatattgtttttccgtcataatttgaattttgccgtgaactatacagcacgaataaaaatatacgatatccggtcttttttactcccggatttttgaatatctgctttccctcaaaaacagatgttccaacagttgatctctgtcggtaaaatgcattataaacagcagattctattttgtctacaacaaattttaaatctgctgttttttgtaaaaaactcacaaaatctgataacaaacaatcccataaagcagtccaaccccaggaattccaagcattcccgatgtcaaaaaagagactgcattcaaacctacattaattgaagattcaggtggaataacgtattgatttataaaaaaaataagcgccattcctatcaccgcacggatcataaaattcactgccatgtacaaaactttctttcccagttgtcccgctccctttctttttacgtattacctttttactttaatactttttataaattattttattctatatcatcacccattattacatcgtattcttaatagaacatcatccgtacttctgttcgcagcgccgcaaaaaaagaccgacaatgaactttttttcaatctatttatcgcaaacttctaacgattgaaaaatcagttcattatcgatcttttcacacagattaaactatttatcaacaatgttttctctgtttttatttgttttccacatcatctgatacgttatcttctgaattatccactataatttcagatgtattttccggcgagtcgtcctcttctttgatttcaacttcttcaccgtcaatttccgctgaagctgttcttacttttgctacacttgccactctttctttctcaggaagattaatcaattttactcctgatgttattcttccatattgagaaatatcagaacatttcattcggattacgattccttctgtattgatgatcatgatctcgctttcttcatctacagctttcataccgactacatttccggtcttttccgtaatcttatagcatttcacgccttttccgccgcgattttgttttgtgaattcttccatgcttgtacgttttcccatacctttttccgaaacaatcagcatatctttgccctgactgctcatctgcataccgatgatttcatcattatcgctcaaattcattcctctgacacccatagaaacacggcctgtggaacgaacgtctttttcgttgaaccggatacactgtccatattttgtaacaagaagaatatcctgtgcattatctgttacttttacttcgattaaaagatcgtcttcccttaatgagattgccgcaagtccggtctttctcacgttcatataatcttggatcggagtctttttaacaagacctttctttgttgccataaacagatactttccgtcttcatattctttgatcggaattgtcgccgtaattttttcatccggcataagctgaagtaaattaataacagccgttcctcttgccgttcttccagcttccggtatctcatatgctttcagcctgtacacacgacctttatttgtgaagaacataatataatgatggctcgttgtaacaaataattctcttataaaatcttcttcaagcgtctgcattcctttaattcctttgccacctctgttctggctcttgaacgtatccatgctcatccgcttaatgtatcccatatttgtcacagtaatgacaacattttctctcggaatcaaatcctccatcgaaatgtcaaattcatcatagccgatatgagttcttctttcatctccgtatttttcggaaataacaagaatttcttttcttataactccgagaagaagttttctgtccgcaagaattgccctatattcttcgatttttttcatcaattcagcatattccgcttccagtttttctctttccaaacctgtaagagcacgcagacgcatatccacgattgcctgtgcctgcacttctgaaagatcaaatcgagagatcaactctgcttttgcttcctgaacatttttcgatccacgaataatcttgattacttcgtcaatattatctaaggcaatgagcaatccctgcaaaatatgagctctttcttccgccttattcagatcgtattttgttcttcttgtaacaacttcttcctgatgctttagataatatttcagcatatcaagaatgttcatgactttcggctcattatttacaagtgcaagcatgatcactccgaacgtatcctgaagctgtgtatgtttataaagttgatttagaataacatttggatttacatcacggcgaagttcgatacagatacgcattccttccctgcttgactgatcgcttaaatccgtaattccatctacttttttgtctcttacaagttctgctattttttcaataagacgtgccttatttaccataaacggaagttctgtaacgataattctattttttccgttctgcatcggctcgatatttgtcacagctcttactctgatttttccgcggcctgtcctatatgcttcttctattcctctcgtaccgagtatctctgctcctgtagggaaatcaggtcctttgataatttgaagaatatcttcaatcgaagtttctccgttttcatcaatctgatcgtctataatctttacaacggcattgatgacttcacgcagattatgcggaggaatatttgttgccataccaaccgcaatacctgacgttccatttacaagaagattaggaaatcttgacggaagtacaacaggttctttctctgtctcgtcaaagttcgggacaaaatcaaccgtatctttattgatgtccgccgtcatttccattgaaattttacttaaacgtgcttctgtataacgcatcgcggcagctccgtctccgtcgacagaaccaaaatttccgtgaccgtcaacaagaggatatcttgttgaccattcctgtgcaagatttactaaagccccgtatatagaactgtctccatgagggtgatatttacccattgtatctccgacgatacgggcacatttacgatgcggtttatccggaccgttattcaactcgatcatggaatacaaaattcttctttgcaccggcttcagtccgtctcttacatccggaagagctcttgccgcaataacgctcatcgcgtaatcaatgtaggaagtttccattgtctttttcaaatcgacttcatggactttgtcaaaaatattatcttccattctttatctcctttttactgattaaattcatagaattacttttagtttgcttccgctcctatccggtaagaaaatcttcgttccttgattttcttaccggtttggcatttccaatgccaaaccatagaattgcttttctgtaaaaaatcaagtaaacctgattttttacctcaatcaattccatgaatagtcactgtaaagtgctatatatccaaatttttaacgtattttgcgttttcttctatgaattcgcgtcttggttctactttatctcccatgagagtcgtaaatgtgagatcgagttcagatgacgtttcttcatccatcgttacacgcagcaaaattctatgttcaggatccattgttgtttcccataactggtctgcatccatctcacccagacctttatatctctgaattttattattactgtctcgtcctacttctgtaagtatctgatttaattcttcgtcgctgtatgcataccatacttttttatttttttccagcttataaagaggcggctgtgcaagatatacataaccttctttgataagatcgggcatgaaacgataaagaaacgtcaacagcaatgtgcttatatgtgctccgtctacatcggcatcggtcataataatgattttatgatatcttaattttgaaatatcaaagtcttcatgaattccggttccgaatgcagttatcatagctttaatctcggcatttgcatatattttatcgagacgcgccttttctacattcaaaatttttcctcgaagaggaaggattgcctgtgtggcacgatcacgagccgtcttcgccgaacctccggcggaatctccctctacgatgtatatttcacaatttacaggatctttgtcggaacagtctgcaagttttcccggcaaagacattccttccaacgccgattttcttctcgtaagatctcttgcttttcttgcagcttctcttgcccgctgagccataactgatttttcaaccgtaattttggcaacgcttggattttgttccagaaaaatttcaagctgagtagacagaatactgtttaccgcacctcttgcctcgctgtttccaagcttttgtttcgtctgaccttcaaattgaggatcttcgatcttcacgcttacgattgcagtaagcccttctctgatatcgtctccggaaagattcggttcgctatctttaagcagtttatttttccttgcataatcattaaacgtctttgtaagagcgcctctgaatccctcgatatgagttccgccctccggcgttgtaatattatttacaaaaccataagtattttcactgtaagaatcgttatgctgcatcgcaatttccactgcaacgccgtctttcatcccttcacagtaaatgatctgctcgtaaagcggagttttacttttattcaaatatgtgacaaactctttgattccgccttcatagtggaacgtatgctctcgtaattcttcgcctctccagtctcttaatacaatcttcagaccttttgttaaaaacgccatttccctgaaacgctgtttcaacgtatcataatcaaacaccgtatcgtcaaatatttccgcatccgggaaaaacgtaaccgtcgttcctgtgcgatcaggttcacattcgccgaccacttttaatttatatacaacttttcctctttcataacgttgcttgtatatctgaccgtcatgatatatttctacttcaagccattccgaaagtgcgtttactacagatgcacctactccgtgaagtcctccggatactttgtatcctcctccgccgaattttcctcctgcatgaagtacagtaaatacaacttcaactgccggaagtcccgctttgtgattaataccgaccggaatacctcttccgttatcacacactgtaacagaattatctttgttaatatttacttgtatttcatcgcaatatcccgccagagcttcgtctacggaattatccacgatctcatatacaagatggtgaagtcctctcgtagaagtgctgccgatatacataccgggccttttccttacggcttccagaccttccagtatctggatctgatccgctccatattccgcgtcaaattctgtacttgatgcacccatgtaataccctcctaatttgcatttactgcatgtccgttctttatgtgaaatatcttgttaatagaaaatctgtgattgacaaactcatccagccctgtgcatgttatgatcgtctgtatattatcgatactatccaataaatagttttgccgatgtttgtccagttcagacaatacatcgtcaagaagcaggataggcgtatcatttaattcttcttttacaagttcaatttcagataatttcagcgataaagccgctgttctttgctgtccctgcgaaccgaatttccgaatatccagtcccgcatctgtcgtaaaacagatatcgtctctgtgcggaccgactgtcgtactcttcattcgcagatcacgttccctatatttgctcaaagcagtttcaaacgttatatttccgagactgctctcatatgtcaatgtgatccgctcttttcctcccgtcagcttgtaatgaatatcggcaataatatcattgacctgttttataaactgtttgcgccgctctaatattttttttccatattccgcaagctgcatgtcccatatatctaatgtctctatcagatttctctgtccgtatatatcttttaacaaggaatttctctgattaatgattcgattatagttagaaagattattgagataaattttatcgagctgtgaaagttccagatcaataaatcttcttctccctgccggtccttcttttatgatgttcaggtcttccggtgaaaagaacacaaaatgaacgatcccgaaaagttcacctgctcttctgatcggaactttatctatggcaatcccttttggactgtttttcttaagatgcatgtctatctgaaaatctatgttccttttctcaatgatcgtctctatatgtgactcatcatacccgaattgaatgacatctctgtctttcgttcccctgtgagactttgttgtgcccgataaatataaagcttccagtatattcgtttttccctgagcattatcaccatacagaatatttgtcttcggatcaaatttcagatcaagaagatcataatttctgtaatttttaagcttcaaagatttgataaccataactttcccatctaatttattttacacgctttttacatttttttcaatgttcggattcaccctttattgtttgaccgtcaactcattttcttcgtaagatacaacgtcgttcggatacagtttacgacctcttctcgtctcaacttctccgtttacactgacaaatccgtcttgtattacttcttttgcctgcccgccgttctcaacaaatccggctgcttttaaaacctgtccgagccggataaattcttctccggctctcaaatgaaaaaattccatattttactccttttatactgctgcgttaaaatttacaggaagaataagataaatataactttgtgcctcgtcttttatgaaacacggcgcctttgcattcatgaaataaagatctacttcttcatcttcgatcactcggagcgcctcgatcaaaaacttcggattaaatccgataagaaggtctttgccttctttgatacacataatatcttcatccattgaaccgacctgtgattttattttaaattccattgattcgtctctgatatcgataataagcggttttttgtctccttctttgataagcaaggtagcgcggtcgatacattcaagaagctctcttttatttatttttactttcgtttcataatcgcttgagagcatctgatctatacggaaatattctccttctatcagtcttgatactacgatcgtcctgtcgaattcaaatacgatatgatttttcgtaaatgaaatatctacatcggcttctgcttccccgcctatgatcttactgatttcctgaagtgtttttccgggaacgattacctttttaggcgcataagaatccttcagttctatttttctgattgaaattctatgaccgtcaagtgatacgactttcaaaatattatcttcgatttcaaaaagttctcctgtcatcattttattcgtatcgctgtcggcgatcgaaaagatcgtctgacggattacttcttttagtgtaaactccgacactgttataaaatcatctttctcaatgttcggaagataagaaaattcatctcccggaagtgatgcgattttaaattttgcttttccacctgtgataagcgcctgattatcgccttgtgtatctatgataatttcgttgtcgggaagtttcctgacgatctctgcaaatatttttgcgttaagagccaaaatacctctttcaatgatctctccatctatagacgtttcgattccaagttccatatcgttagctgtaagtttaatgacgtctgtagatgcgtctattaaaatacattcgagaattggcatcgttgtttttgacggaacagctttggaaacgatactcactccttttgccagattctgttttgtgcatatgattttcataaaaaagtaactcctttcgatctgtgtggaaaagtcagacgcgcacgaaataatatagatttatataaaatcaattccgcattcgtcgtattaggggctgtgaataagttgaaaaccatctcaaccccttgaaaaatcaaggttttctgcttgtgataactgtgtgggattcgagttgaaacgatgaggaaagtgtgggtataaatctgaacctcttcaggtcgatattatgttattcacatcttttcccatagtttttaagaagtaatctacatagttatccacaattatatcggatttatcttcttttttataatgttgacggtattattaagagcttcatcggtttttaattcgttttcgatcttcttaacgccgtgattgacagaagcatggtcttttccgcctaagatagcgccaatcgccttaagaggcgtatccgtcagagtacggcaaagatacatgatgatctgtcttggaaggacgatttctgcatttcgcttctttccttttaactctgaaatcggaatattaaagtgttcagatacaatatcaatgataagttcaggcgtcacctctcggttattatccggagagatcatatcctttaacgcctccgccgcaagcgggatatcgatctttttattttcaaggttagaaagagcgatcagcttattaagagagccttccaattcacgaatattcgatttgatattattggcaatatattgcataacatcgtccggaatatggtatttttcaagtccgtcaagttcttctttttttcttagaatagccattcttgtctcataatcaggcgacgagatatcggcaataagtccccactcaaatcttgtcctaagacgggcttcaagcgtctcgatatctttcgggggtttatcacttgatatgataatctgttttcccgatacatgaagatgattaaaagtatggaagaattcttcctgtgtactttcttttcctattataaactgaatatcgtcgattaaaagaacgtcgttatttctgtacttttcacggaattttgtcatggcaagttcacttcccgttttaccggctttcaaagcgtcgatcaattcattcgtgaaagtttcacttgtaacgtacaatacttttttagacggatcgtttgcaagtataaaatgagcgacggaatgcataagatgagttttacctaatccgacgcctccgtatataaagagaggattgtaaatctctccgggtgattccgcaactgcaagtgaagcggcatgcgcgaagttgttgttacttccgactacgaaagtatcaaatgtatattttggattcaggttcgctttttcataaatcgcgttaacacggtttttcttaataatattttcctttttttcctgaataaccgcttcattgtctgtaacaaaagcaacttcaaattcaattccggttacttccgcaatgcagactttaaaaggaagaagatatttttcttcgatatgttcaaggcttgcccttagttggacgagaatataaacggtattgtcctttacttcataaactgtcaaaggcgcaatccaagtagtataagaaatattagatgagcagtattcaagtttcatcttatttaatatcaaatcccagttttgttctacaatattcatcaaaagtaactcctaatcaatagaatagagagatataaaggcagaatctctctattacattttacatcaaaagcggttcttaggcaatgagaaataatgtgtataactttattcacaacaataatctgcgtaatatagacgtttttttgaaaaaaattgttttattcacagcttatcccaaagtttttaacaagttatccacataaaaaacgaaaattttccccattctgtgaataacttttggaaaagtcaaaataacttgcattattttaacaattcagcgtttgttatttgtaaaactgtgatgtatgcttattatagtagcgttattgcaaaatatttctatgaaacccttgattttgcttgacttatagctggtttcttactataattaagagcagtgttttttcaaattataataagaaaaggttaaatttgataaaagcgcggaaaaaaaacgttaattattgtgaatactttattataaggtatatcagaaaagaggaggtgtatttgatatgaaaatgacatttcagccgaaaaaaagatccagatctaaagttcacggattcagagcaagaatgagcacaccgggcggaagaaaagtattagctgccagaagagcaaaaggaagaaaacagttatcagcttaggccgcatatatgtggccttttcttctatttatttttattaagcagtcaggacagactgaagaagaggttttgaatgaaattttcccagtctttaaagaaaaacagagattttcagaatgtttataaaaagggaacgtcttttgcaaacagttatcttgttatgtacattttagaaaatggacttcaggaaaaccgaatagggatatcggtaagtaaaaaagtcggaaacagtgttgtcagacatcatctgaccagactgataagagaaagttacagactgtcggaagaacatttccggtgtggaatagatatagttgtaattgcaagaacaagtgccaaaggaagaaattatcatgagattgagagcgcactgatccacctcggaaagcttcataaaatatataaataattaaaaggaagtggcgcggatgaagcaggtgatgttatggctgatccggttttacagaaagtatttatccggtatgaaaggatacagcacatgtaagtattatcccacatgttcccagtatgggatcgaggcgatagaaaaatacggtgcggttaaaggcggtgcactgaccgtctggagaatcctgcgctgcaatccgttttcaaaaggcgggtatgatccggtaccttaaggaggacaagtaatggaaatttttgtaatgtcggctgcaggaatttatgactggccgatcattaagcaagtatcatggctgttaggtcaggtcatgaacggaatctacaacgcgttgagcgcaatcggaattgaaaatatcggtgtggcgattatcgtatttacgattatcgtatatacgcttcttcttccgcttacgatcaaacagcagaagtttacaaagatgtcggcagtaatgcagccggagattcagaagatccagaaaagatatgcaaataaaaaggatcaggcttccatgctgaaacagcaggaagagatgaatatggtttacgataaatatggtctgaagatgtcaagcggatgtcttccttcattattgcagctcgtattcctgttcggactttatccggtagtacaaaatattccggaatatgttacaaaagtaagaaacgtatatatacctcttgttgagaaaatccaggcaacaacagggtatgagaagattatgtcatctcttgcgacaggtcttgttccgggagctgaatcattagattatactaaagcgggcaatatgatcgaagtgatgtataaattccaaagttccacatggaatgagctggtcgataagatgccgaaacttgaaagcgttgtaaataatactatgtcagaagtttctcatctgaataactttttgggagtcgatataggagcacatccgtggaatcttcttacagatgctttggcggcggcttcgatcgcaggagttattatcgcagtactgattccggtacttgcaggtttgacacagtttatcagcgtgaaactttcacaggcaggcgcaggtggagcggcaatgagtgatgataatccgatggcagcttccatgaagacaatgacttatacaatgccgttgatctctgttgtattcggttttacactcccggcaggacttggtttatactgggtagccagcgcggctgtacgaagcgttcagcagcttgcggtaaataaatatttgtcgaaaaagagtattgatgatattataaaagaaaatcaggaaaaagcgaaaaagaaacgcgagaaaaaaggtacttcggcagaagaaatcaataagatggcaacaacaagtacccggaacgtaggaacatcttcttctaaggcaaagggaagagcaatcgatgccgaaaaagaagaaaagatcagaaaagcacaggaacttgcgaaaaatgcaaaacccggaagtcttacatcaaaggcaaatcttgtaaataaatataacagcggtgtaaaaacagaagaagtgattccggagaagcaggataataaaaagaagaagtaaactgtttgcgggaaaggaatgaatggtatgaaaggtagtatcagagtatctgcgaaaactttggacgatgcgattacagaagcgttgattcaattaggtgttacaagcgacagacttgaatataatgtcattgaaaaaggaagcgcaggttttcttggaatcggtatgaaacaggctgtgatcgaagcgtggaaaaaagaagataaagaagaagaagagtttctgaaagctgtcgaagaaacaataagagagaatcccgtaaaagagtattttgcaaaagaagacaatgtaaaagaagatgatgtaaaagaacatcaggcagaagaagcagcgaaaaaggaagaagctgtgcgggaagaaaagacagaaaaagaagaagcttcagcaaatgcaaaagaagaaaagtcagagccggtatctgtaaaagaaaaagagcttcttgcaaaagtagaagatgagacgatcagatatgtagagcagtttgtaaaagacacattaaaagcgatggatatggatgttgagatcacatcgtcaatcgacaaagacggagctctttatgttgatatgaaaggtgagaatatgggaattcttatcggtaaaagaggacaaactcttgattcccttcaatatcttgcaaaccgcgttgcaaacaaacatcagtcaggttatgtaagagtgaaactcgatacagaaaattatcgtgcaagaagagaagagacattaaaacatcttgcgaaaaatattgcacataaggtaaaaaggaacagaagacctgttatacttgagccgatgaacccgtatgaaagaaggattattcattccacactgcagtcagatccatatgtaacgacacacagtgaaggtgaagagccgtacagaaaagttgtagttacattaaaaagataattaaataaaataaaagacgtctgatagtttgcggatatcgtgaaacgtcaggcgtttttttgtgaataaataagtggataaataagctgacgtttacggaaatgttttaagttgacgaatgggaactttcaatctaaaataaaatgtaatgctttatttttagtttgcgggaagttaagtattaaattaagaaatcgggagaacgggataaaatgagaaaagaaacgatcgcagccatatcgaccggaatgacaaactcgggaataggaattgtgagaatcagcggagaggaagctgttttagttgcagaccgtatttacagaggtaagaaaaagctttgtgaagtaaaaagccatacgataaattatggatatattgtagacagagaaatatcttcggcagaaaagaaatcggaagaagtaatagacgaggttcttgtaactgtgatgaaagctcccggaacatttacaggagaagataccgtggagataaattgtcacggcggaacatttgttgtaaaaaaagtgttggaactcgtgttaaaaaacggggcaagtcccgccgaaccgggagaatttacaaagagggcatttttaaacggaaagatggatctttcacaggctgaagcggttatagatgtaatcaattccgaaaacgaatatgcacttcaaagttctgtcagccagctaaaaggaagcgtaaaaaagaagattaatgatataagagaaaaaattatttatcatacggcatttatagagacagcgcttgatgatccggagcatatcagcgtagatggatattccgatactttgcgcagttcggcggaagagattattcaggaattggaacgactgattcattcggcagatgacggtcgcgtgataaaagaaggaatcaaaacggtgattgtcggaaaaccgaacgcaggaaaatcgtcacttttgaatgttcttgcaggacatgagagagcaatcgtaacagatatagaaggaacaacgagagatgtattagaagagacgatcaaattaggcgtactcaacttaaatgttgtcgatacggcaggaatccgccagacagaagatctgattgaaaaaatcggcgtagataaagcgttagaatatgcagagacagcagatctgatcatttatgtagtcgatgcatcgagaagtctggatgaaaatgatgagaagatcattaatatgatcagtgacaaaaagtcgattgttttattaaataaatcagatatcgacactgtgatttcggcagaacatataaaagaaaaagtttcaaatattccgatcatctcaatatctgcaaaagaagaaagaggaatcaaagacctggaagataaagtgaaagagatgtttttaaaaggcgacatttcatttaatgatcaagtgtatatatcaaatgttcgtcagaaaaacgctctgttggaagctctcgaaagtatgaaaaaggtaataagaagtatcgatgataatatgccggaagatttttattcgatcgatttgatggatgcgtatgaaagtctcgggtatattacgggaaattcagtaggagaagacttgataaatgaaatattcagcaaattctgtatgggaaaataaagatcaatatgatattgcggttgtaggagcgggacacgcaggatgtgaagcagcgctggcgtgcgcccggttaggatttaaaacggtaatgtttacggtaagtgtagacagtattgcattgatgccgtgtaatccgaatatagggggaagttcaaaaggacatcttgtaaaagaaatcgatgccctcggcggagaaatgggaaaggtgatcgacaagacatttatacagtcgaaaatgttaaatcagtcaaaaggtccggcagttcactctcttcgtgcacaggcagataaatccgactatagcaaagagatgcggagggttttggaagaacaggacaatcttgatatccgtcagatggaagtgacagatattatagcagacgatccgaatgaatctggaattcggaaaataaaaggggttcagacatattcgggggctatatatccgtgtaaagccgttattttgtgtacaggcacatatttaaaagcccgctgcatttacggagaaataagtacgcagacaggtcctaacgggctgcagagcgcaaattatcttaccgacagtttgaaatcacttggaattaagatgtatagatttaaaacgggaactcctgcaagaattgataaaaactcaatcgattttacaaagatggaagaacaaaaaggtgatgaaagagtcgtgcctttttcttttacgacagatccggaagacgttcagatcgatcaagtgtcatgctggcttacatatacaaacgaaacgacgcacgaaatcattcgggaaaatctggacagatcgccgctgttttccggtgcgattgaaggaacaggaccgagatattgtccgtcgatagaagataaagtagtaaaattcccagataaaaacagacatcaggtctttattgagccggaaggaatccatacaaatgaaatgtatgtcggcggaatgtcgagttcattaccggaagacgttcagtatgcaatgtatagaagtgttccgggtttggaacatgcaaagatcgtaagaaatgcatatgcgatcgagtatgattgtatagatgcaaggcagttaaaaagtacgttggaatttaaaaatatagaaggattattcagcggcgggcagtttaacggaagttcgggatatgaagaagctgcggcacagggaatcgtagccggaattaatgcggcaagaaaattgcagggaaaagaaggaattgtcattgacagatcacaggggtatataggtgttttaatcgatgatctcgttacaaaagagagtcgcgagccatatcggatgatgacgtcaagagcagagtacagacttttgctcagacaggataatgcagaccaaagattaacaaaattaggatatgagataggccttatcagcgaagaaagatacgagaaactgcttgaaaaagaacggttgatcgaagaagaaatacatcgggtggaacgggtaaatatcggaacgtcggaagaagttcagaatctgttaaaaacatatgaaagcaccccgttaacatcaggaacaactcttgcggaactgatcagaagacctgaattatcgtatgaaaaacttgctccgatagacaaaaacagaaaaaatcttcccgaagacgtggcacagcaggttgatattaacattaaatacgacgggtatataaaacgtcagatgcgtcaagtggaacaatttaaaaaattggaaaataaaaagataccggaagatataaattatgatgaaataaaaagtctccgtatagaagcaaaacagaaattaaatcagatccgtcctgcatcgataggacaggcatccagaatatcaggagtatctccggcagatgtatcggttcttcttgtttatttaggaagcagatgagaagtatttagaatgtagatagagaataaaatataaaatagattttatatttgtatgaagtattatcattaaaatccctattctattacaaatagaacagggctgaaaagtggaacagttaaaagaggaaaagatgatggcagaaaaaagtaagtttgaagaagaacttgaaaaattgaatattaatcttacagaacatcagaaagagcagtttgatcgctattatgaaatgctcgtagaatggaataatgtaatgaatctgacaggaattaccgattatgatgaggtaaatctgaaacattttacagatagtctgacgcttgtaagaaatatagatatgaataagatagatgcggtaatagatataggaacaggagcaggttttcccggacttccgataaagatagcgtttccgcatattcacgttgttttgcttgattcattaaataaaagaataaaattcttaaatgcagttatagaagaattagatcttgcagacgtcgaaacacttcacggaagagcggaagattatgcgaaaagaaaggaatacagagaacagtttgatctttgcgtatcgagagctgttgcaaatttatcaactttgagtgagtattgtattccttttgtaaaaagaaacggatattttgtttcatataaaagcggctcatctgatgaagaaattcaacaggcagaaaaggcagtgaatatacttggcggaaaaatcgaaaaaacagacaaatttttattaccggaaacagatatgggaagggcgcttgtaaatattaaaaagattaaaattacaccggcaaaatatccgaggaaggccggaatgccttcaagagagccgttataacatgtcggcatataaaggttgcgcataaaaatattataaaaacggaaatacaagaaaaagagagaatatataactaaaagtgagcatatataactaaaaaatgtgaataagtataattgaggaataaataaaaacgccggaatgcggcgtttttatttattaaaatttaaattttaaaaagtattctataaaatgaatttaaaaagataaatttatgaatgt

SEQ ID NO: 7728 - DNA, 287 bp, Unknown
  gut microbiota DNA sequence
agttcttaaaaatttttctctttaaagaaattttcaagggttgttgtctattgttcagttatcaaggttctttctctgttctgtctcaagcgacagcttttatattctatcaaaagctttatcatttgtcaagaactttttatttttttgctgaccgttcaagcgacagctttaatagattaccgcatcgctgtgatattgtcaacaacttttttcactttctgatcttccgcctccgcgtcttcagataagtttttctgttgtctcccgctatccgatcgtttaca

SEQ ID NO: 7729 - DNA, 3127 bp, Unknown
  gut microbiota DNA sequence
acatcgctgtgatattgtcaacaacttttttcactttctgatcttccgcctccgcgtcttcagataagtttttctgttgtctcccgctatccgatcgtttacagttcccattctttggctgttccgcctccgcgtctccaaaagtctgttcctgtatttcgtatagccgtcatcagcgacaagtgatatcctatcatgtatggaagtaattgtcaatgtttttcttgttttttattcatttcagacaattcaaacaattaccctttttaccgcttcttttcagtcataaatattgctttcaaaatactcattcaaaatccgctcaccgagaccttaccccttgcagatttgtcatttgctatttaatacaatttcccatctcatacgcctttttcagtgcactatgccctttgatcgttcctgattcgtttactcctccggcaaatacgcttcctgaaagatgcgctcgatcaaaacaatctatccatcctgtcaaaccaccgatcgcccgattcggaacttccggttcatcttccgcagcagttgtcaacatataaatatccgtaaatttataatccgaatcatacaagctatttgctctatcgatcattgtcttcatctgtccgctcatttcataataatagatcggtgttgcaaatgcgataacctctgcctcatacatttttcgggcaatcatattcgcatcatcatcgatcacacaacgtcccagtttatggcacgccatacacccttcacaaaacgcgattgttttatcttttaaggaaagaaattccactacattaccggcgtcctcagcccctgatgcaaatgcctctgcaagtttttccgaattactattctttctcagactcgtactgataacaagaactttcttactcataatccgccctcccaaacacctaatacactatcggtaccggtatttcaattttcattttttaaaggtctgtaggaaattcccacagaccttctatacactataatatggttagatactatttttacatcatacccattccgcctgcaccgcctgccggcatagccggtacatcttctttaatcgttgccacaacagattctgttgtcaaaagcgtggatgcaacgctcgttgcattctgcaaagcacttcttgtcactttagccggatccagaattcctttgcttaccatatcaacatattcttccgcataagcgtcaaatcctactcccggatcggattctcttactttatttacaatcacagcgccctcaagtcctgcattagcagcaatctgatgaagcggagcttccaatgctttcagaatgatcttggctcctgtcttctcatcaccttccaattcctctgtcaatttagccacttcttttgaagcatggatatacgcagaaccaccgcctgcaataataccttcttctacggccgctcttgtcgcattcagtgcatcttccatacgaagcttagcttctttcatctccgtttctgttgcagcgccgacacggataacagctacaccgcctgcaagttttgcaagtctttcctgcaatttttctttatcaaactcagaagtcgtctcctcgatcgctttcttgatctgtgcaattctgtcttcaatcgcttttttatctccgcatccatctacaataacagtattttctttctgaacttttacagattttgcacggccaagctgatccatagttgtttccttcagatcaaatccaagttcttctgagatcacctgtccgcctgtcaaaattgcgatatcctgaagcatttcttttcttctgtctccataacccggagcttttactgcaacaacattaaatgttccgcgaagtttatttacgattaatgttgtgagagcctctccttcaatatcctctgcgataataagaagtcttgcgccggactggacaatctgctcaagcaccggaagaatatcctgaatattagaaatcttcttatctgtaatcaaaatatacggatcatcaagaatcgcttccatcttttccatatctgttgccatatatgcagaaatatatcctcgatcaaactgcattccttctacaaggtctaattctgtctgcatagttttggattcttcaatcgtgatgactccgtcattcgatactttttccatcgcatccgcaaccatctgtccgacttcctcatcgccggaagaaactgccgcaactctcgcgatctgttcttttccattcaccttgctgctcatagcacggatcgcttcaaccgcgttatctgttgcctttttcataccttttctaagaacgatcggattcgctcctgcttcaaggtttttcattccctcatgtaccattgcctgcgcaagcactgttgccgttgttgttccatctcctgccacatcgttcgtcttagaagcaacttctctgataagctgcgctcccatattttcaaatccgtcttccaattcgatctcttttgcaatcgtcacaccatcgtttgtaataagcggcgctccgaaagatttgtcaagaacgacatttcttccttttggtccgagtgttacttttactgtatccgctaactgatttacacctttttcaagggctgttcttgcttcagatccgtatttgatttcctttgccatcgttaaacatctccttattcttacctgtgatcatctgtcttctgactatttttactctgttacgattgcgagaatatcgctctgttttacgataatgtactcttctttgtccagttccacgtctgttcctgcgtatttagagtaaatcactttatctcccacgtttacctgcattactacttcttttccatctatatttccgcccggtcctacagcgataacttctgcttcctgcggtttttcttttgcctgtcccggcaaaacaataccggattttgtcgtctcttctgcttctaactgtttcaaaacaattttgtcacccaacggtactaatttcattgtaattcctcctttaaatttgcctgttagcactcatttattacgagtgctaaacttcatgaatataaaatagcactctgttttcaatttgtcaacacagtttatgaggtttttgttattaacttgtgataatgtctcct

SEQ ID NO: 7730 - DNA, 73747 bp, Unknown
  gut microbiota DNA sequence
tatttcagacaattcaaacaattaccctttttaccgcttcttttcagtcatagctgctgccctaaaaacaagcgaatcaccggaagtgccaaaaggcatcttctggaattataagcagttaccaagttctcggacgagcccggagggttttgttctgtaggaaatcgaaatttcctatagcataaaaacagcccgcttcagggattcccggtcgcggaactgtttttatatttcaatcattacttatattacttttctttatactgtcttctatactattttcaaattgctttttatactgcactttctgtcattcgattactttcagccatccttccagtgcctcgatatgtcccatctggattcctgtcaacgtctcatacaatttctgtgtgattggtcccattttctccattccgcttgggaaacagatttcgttaccatgatctaccacttttccgacaggcgaaattactgctgccgttccgcacagaccacactctgcaaaatcttttacttcatcaaaataaacgtctctttcttccacttcaagaccaagataatgttctgctacatacataatagatcttcttgtaatagacggaagaatcgtatctgaatgaggtgttacaattttattatcttttgttacgaaaataaagtttgcgcctcccgtttcttccacttttgttctcgttgccgaatcaagatacatgttttcatcaaatccgtttgcatgagccgtaacaatcgcatgaagactcattgcataattaagccccgccttaatatgccccgttccgtgaggagctgcccggtcaaaatcagatacacagatcgtaatcggttttgcaccacctttaaaatacggacctacaggtgttgtaaacactctgaactgatattcatctgcaggctttactccgattacaggattaatcccaaacatatatggtctgatatataatgaagcgcctgaaccataaggcggaacataagcggcatttgcctgaaccgtctgcacgattgcatcaacaaatcggtcttccggaaagaccggcatttccaaacgttttgccgaatccaccatgcgcgccgcattcagatccgggcgaaaggtaacgatacgtccatcttctgtcgtatacgctttcattccctcaaatacagtctgtgcatattgaagcactccggcacattcattcattacaatgttagcatcctctgtaagcgttccctcatcccattttccgtctttataatttgcaacatatctcttatctgtctgtacatattcaaatcctatatttgcccagtcaagatttttcttttccataataaagcgcctccattcctccattttagaaaacaatcacttctttctttaagacattataataccgccgtttttaaaaatcaagagtgcactctgtttttttcttgtacaatcttctcataccatttctctgccgcgcccttttctttactattaataaatatgatttcatctgaagtatttatctgcaaaatcggtgtacactctacataaatatacattctgcattttccagtcttctttcctctgaatttcccgattttcttttgaccatcatcagatccatttactcgtttgtattcatcattcggaagctttggtaaaagttctgcgctttgcacttcatcaatatcaatttccatatcggaatagccggatgtaatctcgattttatcagatccgacagaaacttttatcggagtaaaatcaatccgaaacatcagcacacacacccacagaagacatactatcgtaatgactatccctgccgcaaacgaaattttccctgccggacgcgccatattcgtcgtatagttaaaagaacacgcccaatcctgcacgatcagccgtttatcattcggattactgtaccatccgtttttccaataaatatcatcatcaacataatgcaaagtttcattattctgcagaatccggtttctttttttctttatataaaatactccgctcataaaaatgaaaatcggaacactttcaagtataatgtatacaatatatacttctgatccgatccacatcttctcatccataaaatatgttacccaaagatacgctccggtattaaaaagacttccggctatcagtgaccatgaccaaacatttttctgcaaccggttcaccgccagattcatcttaacatcttcactgtacaccgtattgcgcgttcgcaatataaccgcatgtacagcagcaaacacaagattaactgcaaatccgcacaaaaataagattcatccatcttccgactcttttaaatatagtctcacttgcggtaataaacatggcaggacgatcaatccgcaaaacaaaatatgccacaacggagacattcccattttctccgattgtgcagacactgttgcatcaactgccgaatccgcagtcataatcttgcttccattactcccgatccaaccgtttttcatcttcagatcatacagttttctgtgcgttctatataatagaagaatcgctccgatgcacacctccacaagccatatactccacacgatcataaagaccgaaatataccagaagcaaaatccgcataccgcaattcctgccagcaagttcaaagtataaaaccattttgtccatgtacggtattttttcataagcatttttacttcttcgctttcagccgccgaacccggcaaatgcactcccataagcatcccttcctcatacttacgtttcgttccgtaaacaccgtaaaaaataccgattgtacctacattcacgatcaaaaaaataacaaacatcatcatctgtcatccctccgttcctgcaaagttccgatcatacaaaccggcaagatcttccctttttttgatacgatctcatactttattttgtattatctacaataatacaaaatatgaggaaaatcaacttcttccaaagccatatcctgattgtgcgtccacaattatgtacacagattgacaatatttttcacctattgtaaactagaaaaataagggagaaaccaatatgaaaaaacggcagaatataagcgcactttttacaatcgcagtgttttatcttattttagaatcggtatttggaattacctgtccgattcttttcctgaccggaatttcctgtgccggctgcggaatgtcgagagcatggttttgtgtactccgtatggacttcaccggagctttccgataccatccgcttttttggatattaccgataggaattatgctgtttctcttttgggataagataccaaaaaagatacagaagatcttacttataactgcctgtgtactatttggggcagtatacatcttacgaatgttggatacggccgattccatcgttgtctttcagccggaaaagggagcgattttttcattgatttctcaactctttacaaaaaaataaaggaaacgaggagggcttttatatgcaatgcaagacatgcggaagagaaatctcagacaccgcaaagttttgtccgtattgcggcagcaaaactgagccgccgcataattctgctgaaaacaaaacagcagaaacagcttatgaaaccactgcgaacacaaacgccgaaacagcttacggtacagaaacaaacaaaaactcagaaacagcttacggtacagaagcaaacaaaaacgcagaaacagcttacggtacaaaaacaagcaaaacaccagaaacagacagagaaacttttaaaaacaatacagaagaccgctttcaaacagcatcagcaggcgacttagatgagacgaagaaatttttacagatcggctttttcattttagcagcactctgcttcgttatggctttccgcaatctactctcaggcattcagaatttttcttacagcctcatcatgcaaggtctgggaaatcttcttaacatggtatgttatgcaggaatagcggcagtattggtaatgatcgcactttcaaaagaaaaacagaggatcaaaacatttttcgtaatcttaagcggattagcggcaatcatagcgctgtgcggaatcattgaatttattacatctatgttccgaagcttcagatattatttttcttttgatacatttttctggatcttatcttctttattattaacgttaaccattatggcggcggttgtcggcatcacttatacactcctgcatctctcaggatcgacaccggatttatcaaatatcacaggagtcatcggcggatctgcccgcagcagtcagacatccgaaacagcacagggcaatacaaataaaaaaaccaactatcaaaacgccggaacagatcatatgaatcaaaacagcaagacaaactgcgaatcacaagccggcagtacaaactatgaggggcagaacatgggtacaaactacaacaatcaaggaacaaactacaataaccagggaccaaactacaacaaccagggtacaaactataataaccagggaccaaattacaactatcaaagttccggtccgaactattcaggaccgggtgttacgccactgaaaaccgaccgcggactgctcggttatatcgttctttcgattcttacatgcggaatttacagttattactttatatacacagttgcccgcgatgttaatactgcttgtgccggagacggaaaatcaacaggcggattagtacagttcatcctgctttccatcctcacttgcggaatttacagttggtggtggcagtattctctcggaaaccgccttgcagcaaacgcacctcgttacggtctgtcatttacagaaaacggtactactattttattatggcttttctttggctctttcctctgtttcatcggaccgtttattgcaatgaatatcattattaaaaatacaaacagcatctgtatggcatacaatcgttacaacggattaatttaatcatttaacattataataaaaggttctgcccgaacgatctgcatcctgaaacttcagatacaagtcaaacataaaattcggtcagaaccttttttatttctcctataatcttttcacaatctctttacaatctctttttaccatttcctaatatatatccgaaaataatatcccgcagtcaaaatcaaaatattcctgtcacggacacatatactcataaatctgcgccgaaatctctcggataacagatcttgcggcagaagtatcagataaaccgctcatcatcacacaaactgtatatgctccgttttccccaaatataattgccgcgtcattttccacatcggaaagttcccccgtcttatttgcagtctcaatattttccggcactcctgccgggatcttccccgtacgttcctgctgccgcatcagatcaagaagtttttctgatccaaccagcacatttccgttcatttcccgcagaaactttccgcagtcgttgacagaagtataattatcatccatatcattcggtgcaagaagcagccttcccatatgagtatctgcaaaaccgtgcaaccgacaaaactcattcacaacttccattcccgccgaagcatccccaaaaccaagcttacgaacaagctcatttgccgcgtcattgtcgcttaccgtaatcatcaaacgcaaaagttcttctgtttctcctgcgtaaacctcctgttctttcacaaaatccatctgttcgtatacacatcccgcaatataaagcttgatcaaacttgccgctggcatctgactgctgttgatcgatgccctcgctccgtcagaaagattttctgcatatacagaaaccgaagctccggtactttcaagcggcgccgccgtcaactgtatccgatcaattaagtcatttaaaataggaaacgcggcttcctcttctagttccggatcggatgatccgacttcttctgtatcttcaatatcatcttttttaatcacaatctcttccttgttttcttttttgttttcttttttgttttcttttttgttctcttccttttcttttacagtttcttccttgccgcaggcagtgaacataaaaaccgccgtcacaaaaacaaacaagagcgcgcataagaaactgtatctgaaaacttttcgcctcatacttatttttactccgtcacataaaaatatctaaagaactcaaaacccgtaatatgcattgatcccatctacaatcccatcgaccatcaactcccgataggtggcatccgacatgtttgtatcatcttgttgattcgtcataaatcccatttctaatatcacaaccggtatctgactccagttgatccctgtcatcgtatcattacaccgaatcccgagattctgcattccactcgcactgcaataacaatttaaaatcgtttccgccaaacgataactctcttcgtaaactccgcctacataaggattttcagcagaaccgatcagagccatcgcaccgtttaccgatggatcttcacttccatttgcatgaattctcaaagaaaactccgcccctgcatcatttgcaagacaggctcgttccgcattgcttatagctgtttcgttattttcccgcgtcaggattacatcatacccttgttccgtcagacgatctcgaagcatcaatgcgatttcaagattaagttcatattccggtatcccggtgaatctgccgacagtaccgccggcagatttttgtttaaaatcacctgacccaggagcatttggctcttgcccgctcatatctatatccgggctttgatgcccgggatctatcgcgatcaaaatatctttttttaccggtttttgtatgtcagtttgtcctgaatgttcctctgcgctcacagacgcctccgtttgttccgatgtttgttctgattcttctgatgaccgatcagtagttttgggattctcagccgaagctttctttccttctgaaggatcggaaacattttccctgccgcacgccgaaacaccgaaaacaagaagacagataaatacaaaaaatgtaaccccttttttcataattatgatcctttaacaattactctgcatccaactgatatcctttcggatccataccaaactcgacctgagccagaaaatctgcatttttccgttcaatttcagaaagcatcgaattgttaaattcttccggactgaccgtaccgtgataccatttcttactattaaaataattctgcagttcagccgattggaaaagccggccatgcctcgcatagatttcatttttggcataattaatctcgcggatatccaagccttcaatatcgctttcagttaaaagataagaagcgctctgtggaagaatataatctttatttaaaacttcatcctcctcttttgatttttcaaaatcttctatcaggttttccccatattcatcccaaattacaaacggtgttatataaagcttatcgttgtcaaaataaaattgtccttctatctctatcgtctgattagatttaatgctgtcgagcattccttccggaagaacagattgatcgatatatacgtttctcgcatcttccagcaaaactttttcaccgtaaaaatcttctccgtaaaaagtatattcttcttccaagcgcagaacataatcgccattttctgtctttttaataaagccttcaaagaataactcatcttcatcaagcaggttataatctacatcattcaaaatctcattttccgacggttctgtaatatccgtgttgacggaatcagaagacggtttcggatcttcttttttcaaaacgaaaaacaacacagcaatcactatagcaactaaaacaattcctccgatgaccacaccgattataatcggcgctttgctctttttcttcccataagactcatccaaagactgccgcatatccggcacatttccttgattgcccatgtcaccccgaccgtctctttgtgatccgaactcttcaaactcttcttcatcccgcacctttaacaactcttcagagtcttccggagacgatatatacggcatttcctcagtatcctcaaaccgcgtaccactctgctgctctgaccgtgcataaggcgtaccacattcagggcaaaacaaagttccctcttccatcacagtgccgcataccgggcaaacttccggctttgattcctgtgttgaatcaaaacttgactctgcatgaaacgatagctcttcctgacgctgtccacattccggacaaaatgcagaatcatcaggaatttttcttccgcaatattgacatctcataatcgtgtccctccttataaataactgctgctatatttatagtatatttttccatccttccggtcaaacaaaatttacgaatggcggggactgaactattgcttttgttcgatattctatatttatttcttcgtgcatttttatccgtattatgatatcattgtaatattacttacaaaggagtctgttgatttatgaaaatgaacgaattaaaacttatttatttcagccctacaggaacgacccataaagtcgttatggaaacggcaagaagtatcgatttaaaatcagtctcttttgaccttacgatcaaaaaagatctgaaacctgtcgcaaaatttgcgccaaacgattttgccctgtttgcgatccccgtatactacggtcgtgttccggcgctctttctcaaatatcttgatctcttttccggaaacggaacacctgccgctcttgtcgctacatacggatgccgcgaatacgaggatgcacttttagaattaaagaccgaagtagaaaaaagaggattcaaagtaatcggagctgccgcatttccggcagaacactctatcgtgaactctatcggcgcaagacgtccgaacaaggcggatttaaaagaagcttccgaatacggaatttcactgaatcggatcattaaaaaagaagattctttcgcttctttcgatctgaaagtaccgggaaatactccttacagaaaatacggaaaaaacgtactttttccgaaagccgacgtttcgctttgtacagaatgcagcgcctgcgcaaagatctgtccggcaggagcaatctctcttgataatccgaaaaagacagatcacgataaatgtatcggatgtatgaaatgtgtccgcttctgcaaacagaaagccagatatgtcagcgcttttaagttgaatatggcagcaaagaaattaacaaaggtctgtcagagcgataaaaaggccgagatatttctttaagctacaccgtcatctgttattcaaaacagcggttcaaaaatatataaacagatatcgatcggtcgtcaagtttccgggctttcccgccctttggcttaccgccttcgcaaaagaatcgccgaatccggctttactgccggatccggcgattcttaactccaggtcatcttatatcttttaatattatcatgtgaacctgttttaaatcttattcatctttttcaaaaaatcccagaaaagttttacgtttcataaacgccgctatcatcaagagtgacaggaataatccggctaatgctgaaacattcactgtatctccggttgcaactgctccgtttgaaacagttccgtttgaagaacttcctgttccgttgcttcccggtttctgtacaagacctgcctgtgcagcttcaaatgcagatttcgcatttgcaaacatttctgccgttgtctcctttgaatccagagccatcagcgcatcatatgcatttttatatgccgcatagctttcttctgtataaccttccggtttcttcaatacgatagagtctctgtactcatccaaaccaactgcacgtttgtccagacccttgatcgccgcacggattgcagccgccgcattggcagcctcttcttttgtaccgtttactttcaacggctctgcatttgtcacagcatctttcaaaagcttataagaacttaccgtataagtacctgctttatgctgagcagcttcattaagagcagccttcaaatctacgatacttacaagcgccgctttcgcttctttcattgcagtgatattcgcctgatctaatgccggatcgttctgatctttatctgcttttgctttgctgatcgcatcctgaagtgcgccgaaacttacttcagtgtaatctttgccgtttattttttccatttctgcaatgacatcatctacagttacttctgttttttctaccagaccattcactgcattttccagatcggaaaccgctttatctacctgatcttttgttccgttttccagataagcctctgcattcttcactgcatcttgaagctctttccaactgtctttcgtataaagattctcatccagttttccaacttctgcaagttttgctttcaatgcggctacattgacaagaccttcttctgtctgcgcaaaagtatttcgtgcagtatagacttctttcgggttcttccgctctgtcttatctgctttcacaatcgcatctaatgctgatttcgcgtctgtatatgctttgtaagaaacagttgtatagtcgtctttattatattttactgcgttttctaactctgtttctgccagctctctctggatcgatgaatatactagtgctttttcggctttttcaagttttgccgtcagatcttgcgcttctttctccgaaacattttctttatcctttaacgcctctctgatctcattcatcaccgactcatatgccgcataagttctcgccgaatagatctctacataaacaggagcttcctctgctccgacgttttctttgcctgctttcatgttgttcaaagcgttttccaatgcagtaacatcgcctttgacaaccgcgtttttgtgtgcggcaagaagcgctttttctgccagatctacaacttcctgagtcacgtactcatttgccgcgatctcttctgccgctgcttttgcttcttctgccgcccgtttgctgtctgcagtccacttatcgtcgatcggctttttgattgcctcattcagcgcatctttattgaccgctgctttttccttttcacttgtctttataatagaaatctccggaatgtcttctgcccatgtcacgataacttccagaatctgactgtcttttccaaccgcaaattcattgatcgtctgattcagctttccgatcgcagctgcttcttgttttgctccgtctttatagagaactgcctgtacatctgcattcgacgcctttccgttctgtatgatacggatcgttctctgatccggctcactgatgcgatatgtaaacgaaccgtttgccgcagatggtttgtatgttgtcgcaaagtttccgtcaaatacattagacgggatcttgcccgcttcttccgctgtttctgatatgatgtcgcggtttgactctgtcgtcatataagctccgccgttgatctgaagctcgtacagctcaacccatctctctgtatatgttgtaagcggtacgattcttaagtaacgtcccgacacattcaatccggttgcctctgcatacatatttcccggatttgtagtatcatgaagcagatagtctgcatctttcgctgtcgcattagccgacatctgcacagcctctgcgtttccgacttcaaggatctttgtccactgatcgtctgtggcatctttcctgtcagctacttcaaattttgcatgtcttaagaagtcaagacatgtctcttttacatagtatctgaacgattcaaaattcacagtctgtccgagatcgaatacgatctttttccctgcatcctgtgttcctgtgatcttgccaagcgtattaagctttccgtcgaatacatttccgacttgtccgttgcttcgcatatcgtttgccgaatctttctgagcaaaatcactttctaccgttttctctccgataaacgcatacgtcactttgaattcttgaaccgaaacattttgtgtctcatttcccgcattgtaaagtcttacatatcttgcatcttccaatgctcctgcattaacatcagtccagatcactccgttcatagagctttgcagtttcacattcgcattttctcctgcgttcactgcaatgttttcgatcgctttgatgttctttaagtcaacaccgatatactgatcttttttcagactgatcgttcccggctgcaaagaagacatacctgcttctgtcgttccgagcattccgtgatcctttacatttgtataaatattctctgttgttcctgtctgatcaactttctgttttacagtaaactcagagaattttgcccacgtaggtttcttctccagattgcggatacggatgtaacgcgccgtcacacctttcagatcaatgttcagtacgtcttttccttctgccgctccagtatactctgcatatccttctgccggagtccatgtgctgttatctacagacgtctcaaccgcatattttacaagcttgtctccgcctgtatgtccgactacgatatgagcgctttccaatacagcttctgttccgaggtcatatcctaagaaatcatctttcagaacagagtcacttgttgaatttccgtctccatcaggatcgtaccatacgaatgtattgtcatctccgtcataaagactcgtttctttcccttgcgctactttccaacgctccgtcttgatcactttgtatgtgatcggagtcgtcatattcttcggcgcgcggatatctaattcaccgatgcgtacccagcctgccgtctgctctttattcacaagacggattcctttgatcttgtcagttacgttaatgtttactgtctgatctttcgcgttcgtaaactctcctgcctttttccaaccgctctgtccgtctgtgctatactgtatttctacttttttaaacacatccgcagaagaagttttgccctgtgtcattcttatgcttccgatctgcttcgcttccgggaaggtaatctggatataagcgtctgccgcgatcgtatcttttccttcgccgctgtacggtcctttagcgatccacatttctgtagacagatctccgtcaaacatttttgccgccgtatgatcatttccctgtgtggaaataccgctgaacgtcacatctcctgtgtaacgctctgtatcttcggaaacttcttcttttttgttgatctggatttcgcgtacctcaagccagcagtcatttacatttgccgctgtcgcaatgaggcggattccttttgctttcagatcactcggaagatttgcttcttttacattgatgtcctgaactttaccgaattctccggcaaaattgttttccatgcctgtcaacgtcagatcttcccatgttccttcttctgtcatatactgcagttttgcatgttcaaaatgatcttttccgcctccgagaaggaaacgaatgctgtcaatatcgattactttgttgtattctacaccgatataatcatctttcgacaatgaattcggcgttttgtaaactgcacttgtagactcgtcgccgtcaaaaatattttctttagaacctgtcggcgcgtcttttctgcttgtaatgaattttgggatcactttgtcgggattgaccgctgtttccgcttttgcagatacatactctgccaatgtattgataaacggaacaatgtgctgtacgccgacctcggcatattcctgatgatccacatataaaaagtcatatgtttttgaacggtcgaacgccgtctttcctgctgtattatagctgatcacagaagatacgtctcctgccagagcgctctttacgccgtttaagtatgcgatcgccgcttctgtcgtgtcatcccagcagttcagccaatatacgatctgacctttgatcgcctcgtttccgcctgcacgatatgtctttgaagctttttgaagcacttcaaactctgcgattaccgcatctacttcttccgccgtgagagtctctgcttccagtttttctttaaatgcatttaacttctctttcagtacaacagattcctgcaaaggtgttacacgcgtatccatcgcctgattgatcatatgctttgataattcacgcagggcgtcgctcgcatcattcataattgccgaattatgatctacaaaggaaaatgcatcattccatgacttgtctgcctcttcctttgtctcccaaatattccatgcataatctgcattaccgaaaatagcaaccttgctcggttccgactgctgcatcgggttaagcatgattccctggattttagacggctctactcccggatgaaggaacgtatcataaccgcccatgatcaaatgtttcttagagttatccgtacacggccagttgatccacataaacggtccgcgtccaacgttatttgtaaacgtagaagtaaagttatttgttacttctccccatactcttccgccggtcataacgatctgaacattagccggagcctttttcaactcctgaagttctgcgctgcttccgttgcccatatagtcatacggaacataagggatcgtcatcttcatatcaggatactgctttttcacctcttcaagccatgcagtcatatcgtttaacagacgtactccattcggtccgcccggattccaaaagtcgtctgcaaggattgcgatctgacgtacgccctgatcgatcacctgtttgaattttgcctgaagtttcgccaaatcagcttcataattatcatcaaaacgaagatgattgccctgcgggaacggatgaagggcataaacaaatcggcattttgattcatttcccgcctctgcaagcggtctgatcttatttgccagctcttcttccgtataaagctgatcccactgtgtacgatgtttcgggtcgtctttcggcgcatagaaatacgcgtttaatttgtaatatccaccccatttcatcaagtttacacgatcttctgtagaccacggatttccataatagccttcaataaaaccacggcttactacgtccgcatagtcctcgatctcaaagtttctgattgtcaggctgtccatctgtgcaaaaacatgatacagcgtagtcaatccataaaatgcagaatctgcatcttttccaagtacggatattacattctcatcacttgccagaaagtaagaatccgtctttccaaacaaagagtcttccggctgatattcttctgtaatataatcttctgccgttccgtcctgtccatgtacaccgacatatacattggttgcgccttcttttggctgctctgcttcgtttacctcgattcctttgaggtctgccgcctcttgcagacggttctttgtcgcctcatcgattcctttgtcatagattacattcaattcttttccgagaatgtaatctccttcctgatactccaccttatgtggattcggataaatgaggtagtcttcttgcggttcttccgctgcctgcgccggaacaaaattgcccggtatcacaacggcgactgtaagaacccctgcgagcagtcttttgatcactcttcctgccataaaccttttccttccttttctcataatattatcaggatactaccatctatcattatatcattttttactcatttacgatgtactttttttgtttttttcatctattttcatcatatttacttccttttctatcaatcattttgtcatttcaccgtctttttgaacagtttcgctctcttatttcctccattacaaaacggcatagccaaagatacgataaacgcctttgtctatgccgtttctatttatattttcttctattttgattcctcttcttttcttcgcaaaatatcatatacgtccgggatttcacttagttcaacatagagcagctgtttcgagtggggcgcactttcctgctcttttccctcttcattcaggatgcgcagcacttccgcttctatgtttctgccgtccggcttcataatttcaatcgtttccccgacagaaaatttgtttctctgctctatcctgcacaatccgtctttgatctccccgacaatgccaagataagtatactctttattgtatgtgttgctgtcatagatctgtgtcgtctcatccggtttcccaaagaaaaatccggtcgtaaactggcggtaagtacaatttgagatctgttctttataccagggcatgttctgttcatataacttcggatctttcttatagtcatcgattgcttttcggtacgtccttgccactgtcgccacatacagagcggttttcattctgccttcgattttcagactgtcgatccccgcatcgatcagctccggtatatgttcgatcatacacaggtcttttgagttaaaaatgtaagttcctctttcattttcataaacaggaaggtactctcccggtcttttttcttccacgaccgcatatttccagcggcacggatgagtacatgctcctctgttcgcatctcttcccgtaaaataattactcaaaagacatcttcccgaataagagatacacatcgccccgtgaataaacgtctcgatttccaaatcttccggaatatttgcccgaagttcttttagctcttccatcgacagctctctggcagatacgactcgactcgccccctgtttataccagaaattataggttgcataatttgtattatttgcctgagtgcttatatgcctttctatctcggggcatatctctttggcaatctcaaatactcccggatctgcaatgatcagtgcatccggtttgatttcctttaactcttcaaaatactcacgcaccccggcaaggtcatcgttgtgcgccagaatattagcggtcacatatactttcacaccatgctcatgggcaaattgaattccttttcgcatctcttccgttgaaaaattcttcgcttttgctctaagaccgaaagcttctcctccgatatagaccgcatcagctccgaaaataactgccgttttcaacacttccagactgctcgccggaattaataactcaggatgtctgctcatctttctcttcattctcctacttcttctttttctgtttttatggcggcttataattttgcgctttactgcgcaatgtccgttccgacttcctttttcacactcagcgccaccccgtctcctaaaggaatgatcgatgttacaagcgcatcgttatgttttaattcgtacagatattcccgcatccgcgcatgaatcgtacgatcccgccgttctaccgcgaaacgtgactcgatcacatcaccgtcctgcatcacattatccgagacaaggataccgccctttgcaagcagacgcagtatctccggcagataatgaatgtactgacctttcgccgcatccataaaaataaaatcatacggtccttccaatgttttcagcacatccatcgcatcgccttccagcaaagtgattttcttctcttttcctgcacggacaaaattttgtcttgcgatcggtattctcttctcataattttcaatcgttgtgatcgcacattcttccggtacatattcactcatcaataacgcagagaaacctacggcagttccgacttccagaacgcgcataggtttttttaccataaggagcacctttaagaagctctgcatctcacggcgtattataggcacgttatcagccagagcctctctctcgatgtcctctaatatttcactgtttttcgtatccagcgaattgatgaatgtaataatacgttcatctactatcataatttacacatccacatccatgatgatcggaatcaccatcggttttctctttgtctttttccaaatatagtcgttcatggaatcgcggatcacaagtttgatcttattccagtctgtatgacgtcccgagagacacttatccaccgcctcggataccgctcttctcgcatcatccatcagttcttctgattctcttacataaacgaagcctcgcgatacgatatccggacctgcaagcaggcggttcgttcttctctcaagcgtaagcacaacaatgataataccgtcctctgccaaatgctgtctgtcccgaagcacgatgtttcctacgtctcctaccccgagtccgtctacaagaatcgctcccgtgtgtactttatctactacttccgcactgtcatcgcacagttccagcacatctccggactgaatgataaatacattttccttcggaattccaagtgattttgccacttccgcatttgctttcaaatgacggtattctccgtggaccggaatggcatatttcggcttcacaagagaatagatcaatttcagttcttcctgacaggcatgtcccgatacatgggcatcctggaaaataacttccgcccctttggaagaaagttcgttgatcacacgggaaacagacttctcatttcccggaatcggattagaactgaagataatcgtatcgtttggctgtatcgtcacttttctgtgcacgtccgccgccattctcgacagagccgccatagactctccctgacttccggttgtgataagaaccattttctccggcggataattcttcatctgatcgatctcgatcaatgtgttttccggcacatccaaatatcccaattctgacgctgtcgcaatgatattcaccatgctgcgcccttccacaactacttttcttccatacttatatgccgaattgataatctgctgcacacgatccacgttagaagcaaacgtagcgatgatcagccttgtattctgatgttccgcaaaaatatgatcaaacgtaataccgaccgtcttttccgactgggtaaatcctcgccgctccgcattcgtactgtctgacatcagagcaagcacacccttttttccgatctccgcaaaccgctgtagatcgatcgcatctccgaacaccggcgtataatcgactttaaaatctcctgtatggattacgacaccggcaggcgaatagatcgcaagggcagacgcatcctgaatactgtggttcgttttaataaattcaatcctgaattttccaagattgatcgactgtccgtggcggacaacttttcgcttcgtcgtccgaagaagattatgctcctttagtttgttttcaataatgcccatcgtaagtttcgtcgtatagatcggcagattgatctctttgagcacatacggaagcgcgccgatgtgatcctcgtgaccatgtgtgataacaaaccctttcactttcgatgcattgtctttcaagtatgttacatcagggatcacaagatcgatcccaagcatatcatcctccgggaatgccagaccgcagtccacgacaacaatactgtcttcatactcaaaggcagtaatattcataccgatctgctctaatcctccaagcggtatgatacgcaattttccgttattctgttttttcaaaaaataaacacctccactatttcccctttttcatgcattctctgcatattccgtaaaactttacttcatgatcaagaacatgaaatccaatcgtacgttcaatgtgacgttccgcttcttccagaaggtcatcatcgaaaggaatgattttattgcaagttctgcatataagatgatggtggttatgtttcgatccgccgtccagcagatgtccgatctcgtaacgcacacatccctcatccaaattaatcttgtctatgagctgcatatcccataaaagctggatcgtacggtacacagttgcaagtccgatttccggatgctcctgcgtcaccagctcataaatatcttccgcagtcaaatgcctgcctttattctgctccaagacagaaaggatcaaaattctctgattcgtaactttcaaccctttttctcttaatttttctttgagcagttcttctgtcctgttctttttcattctatcctcacccgaaacatccaaaagacatttttcactgcgatttcacgcattttgccatactgtcatatcttatatatcactgtccgatttcccgtggaaactctcagaagttcccatagcatacaatgtaattttcttcttagatcagagttcaatactgacatcttcaagaagttcctcaaacaccttggagaccgcctgtaactctttctcattttcaacgatctcataaacgctctcgcctgattcttcatcacgaacgtcttttaatatcagacattccgcatcgtcatcctccgactccgcaacaagaatatacgcgctcccgttgatctttgtttcttcaagtataaaaaattcgtcctcaccgtttccatccgcaaatgcaaactttactttttccatatccgaaccccttacatcttttatttttctatcctgatatcctgcacaaaatcaccgaaagcgccaaaagacacatcccgggattgtaagcagccgccaaggtcttagcatatcccggactttggctcattgcctatacaaaaatgacagacttcattcattctgcctgttttttcatatgcatcagatcaagataaccctgcaaaataaacactgcggcgatctgatctatatgtttctttctgttttcacggcgcacgttgctctcgatcagagtacgttctgcctctacggtcgtcagtctctcatcccacaaaatgacctctaacccggttctgcgtttgagcatctctccgaattccatagactgctgcgcacgctctccgatatcgttattcatatgtttcggaaagccgaggacgatcttctccacatcatactttttgatcagttcctctatcctcgcgcaagtccgccgaagtttattttcttcttttctctcgatcgtctccactgcctgagccgtaagacgaagagcgtcgctgatcgcaacgcctaccgttttcgacccataatcaagtcccataattctcatatctgattattcccacgaatgatgttcgatatacgcttttaacagctcctcgaccaactcatctctctctactttcatgatcaggcttctcgctccgttaaaacttgtaacatatgtcggatctcccgacatgatatatccgacgatctgattcaccggattatatcccttttctttcagcgccttaaacacgatctccaaaatgtctccggccgaaatctgcggtcccggttctacctgaaagaattgtgtattgctgagatcactcatcttgctgttcctccttaccttctgtctttttgtataagaattctattcctcatttttcattttcggaaactccgaaatcactacctacaattctaatatactcccattcaaaattcaacgtataatttgtgaatgattttcaattctcacttttacgatacaattagaaatatttttttcggtttctagtgcaattttcatatactcttttgtatgtcctgtcataacagcctttccctcgatctgcgcgcgttcttcaaaaagaacttccacttcttttccgataaagctgtcctcgtatgcctttttcttccgttcgccgagggcgatcatacgggcgcttctttcccctttgatcttctcatcaatctggccgtccatcactgccgcttttgtcccttctctcttcgagtatttgaaaatatgcgtttcataaaaatcaacccggtcgacaaacgcataggaagcttcaaactcttcctctgtctcccccggaaatccgacgatcacatctgtcgtaagagccggatgatcaaaatattttctcaatatctgacacctgtcataatattctccgcttgtatactttctgttcatccgcttcagcgtcgcgtcacatccgctttgaagagaaagatgaaaatgcggacacactttcggcatctcggaaagctcttttgcaaactcttccgtaataatccccggctcaagagaaccgagacggatccgttcgatcccttcgactttgtgtacttcttttataaggtcaagcagatgtctctgcccgtcaaaatcgataccgtaagaactcagatggattcccgtaagaacaacttctttatatccgtttccggcaagatctctcacttcttccagcacgtcctttgtctgcctgctccgcactctgcccctcgcataagggatgatacaatacgtacaaaattgattacatccgtcctgcactttaatatacgctctcgtatgatctcccggttttgtcaaatgcagttcttcatactctttcgtacggttgatatcttccatcgcatattctgtatgaccgcttttttccatttcatattgtttcaataattccggcagatcttttttatgattatttccgatcacaatatcaatacacggatcgatctccttaccctcctgcgcctgtacataacaccccgccgccacaacgaccgcgtccgggtttaattttcttgctcggtgcagcatctgccgagatttcctgtctgctatatttgtcaccgtgcatgtattgataatataaacatccgccccttctttaaagggaacgatctcataacctgcctgttcaagcatttcctgcattgcttccgtctcatatgcgtttactttacatccaagattatgaagtgccgcttttttcataagtttacctctttttcctattctttctatcattgttccttgacttttagttccctatcccgtagaatattcatagggttttgaccctattttatcacatatttcaaggaggtagcaaaatgaaaactgtacagatttcattaaattcaatcgacaaagtaaaatctttcgtaaatgagatcacaaaatacgacaacgacttcgatttagtatctggaagatacgttatagacgccaaatccattatgggaattttcagtcttgatctctccaaaccgattgatcttaacattcacgcagacggcgacgttgatgcaatcctcgctgcacttgacccgtatatcatcaaataataacagtcaaacatatttatgcgtaaatgcacaatgcaaaaagctgtctcttttgagacagcttttttgtaatggcgacgagccaaagcccgggatataccaaaacttcggcagccgcttacaatccctgaacatgccttttggcactttcggtgattctatgcccctacggtgatcacttctgcagtttcaagcgccgtcttcatcagatcatcgatacaatctgccagattgatctccgacttttcgattctttctacattcggctttgtcaccggatgctttgccacgaaaatcgtgcagcagtcttcaaacggctggattgaaacttcgtatgtgtcgatcttttcagatatttccacaatctctttcttatcaaatccgataagcggacggtataccggcagtgtgcagacagcgtttgtcgccgcaagactctgcatcgtctgactcgccacctgtccgatgctctctcccgtaacaagaccgagacagccgtttttcttcgcaaaatgttctgcgatccgcatcatataccgacgcatgatgatcgtcagctcatcgtgcggacatttttcataaatggcaagctgaatatcggtaaaattaacaatgtgaagcttgatcggacctgaataagcagatacgagtcttgcaagatctatcactttttctttcgctctctcacttgtatacggcggtgcgtgaaaataaaccgcctccagctcaacgccgcgtttcgcaaccatataaccggctaccggactgtcgatccctcccgacagcagaagcatcgcactgccgtttgttccgacaggcattcctcccggacccggaatgatctcggaataaatataaacttcttctcttatctctacattcagacgtacttccggatcgtgcacatcaactttcatctcaggatatgcatcaagaaccgcctcgccaagcgcacagtttaattccatcgaattcatcggatagcgtttattcgcgcgtcgcgcttctactttaaacgtcttgtctgcctgaggatacatctcgcctacataagcagtcacgtcttttttcaatccttccggatctttcacttctttgcggacaaccggacagatccctacaatgccgaatacttttttgagactttcaaccgtctcctcataatcatattcaccctcgcagtccacatagactcttccgtgacatttatgaacaaggaattctccgtctacgctctgaagagcatacctgatctgacgcacaagcgcatcttcaaatatataacgattctttcccttgatccctatttctccatatttaatcaaaaatgaatgaaactccatcttcttctccttctttgcgccatatctttctgtcatgtgaaatcagcgccgtgtatatttccgaagcatcggaatacaattatatagtgtttccaacgtatagtcaatttcttcttttgtcgtaaactccgacaaactgaaccgcagcgtcgaatcaagatattctctcggcgttcctatcgcctgaagaacaccgcttatcgccggatgattagatgcacatgccgagcctgccgacacacagattccacgatcttccagcgtatggagcaggacttcgctcctcactccggcaaatcccgcgctgacaatgtgcggagcgcttccttcatctgtaagtccatgcactttcacattgccaatctgtgaaatacagtctataaaatgcgttttcagttcccgcatatgctccgttttcagctcaagatcctgatagatcatttttgacgccaatgccaatcctgcgattccaggtacgttttccgttcctgagcgcatatctttttgctgaccgcctccgaaaatgatcggttttatcttcacacggctgtccacataaagaaatcccgcccctttcggtccgtgaatcttatgtccgctggccgaaagcatatcgactccaagtcttttcggatagatcttatactttccgaatccttgaaccgcatccgtatgaaataagattgactgtttatactgcttcacgatccgggctgcctcagcaacgggctgtaccgttccgatctcgttattgacatacatgaccgatacaaggatcgtctccggacaaagcgcttctttcagcgcgtcaagccgaattcttccgcattcgtcaacaggaagatacgtgacgcgaaatccttcttcctcttccagataatgcattgtattcaaaatggcaggatgttccacacaagaagtgatcagatgatttccgttccttcgattggcccgcgcacatcctatcagcgcctgattatcactttccgtacctccggaggtgaaaataatttctttagcatttacttttaaaagcttggaaatcgtttcttttgcttcttttatatatctttcagcttccattcccttccgatacattgccgacggattcccgtaatcccgacacatgatatgatagacaagctctcccacttccggataacacatcgttgtagctgaattatcaagataaacttccatgattcctttcctttactgatttcttactattaaattatgactcttctcttttcggtgacacagcgcggctttctatatgatacatcaagatcgaaagtgtcgtaagacccgcagtctctgtccttaaaatccgctttccaagcgtgaccggccgcgcccctttctcttttgccctgagcacttccgcttcttcaaaacctccttcaggaccgataaatattccgaccgactgtcccggttctatttgttcgatcactctcacagtctcggccataccttcttccagttcatacgggataagaacgacgtcaagactttctgcctgttctaatgcttccgtaaaagaacatactccgcaaacttccggaatcacgcctcttcccgactgctctgccgctccttttgcgattagctgccagcgttcctgctttttcaccgctttcttctcatctaactttacgaccgaacgttttgccgaaaacggaacgattttgtgagcgcccagttctaccgacttttgtacgatccattccatcttatcgcctttcggaagtccctgaaacaaaataatttccgatggaagttccgtctcggtatccagctttcggaacacatcgagcactgcctgatctttctcataccgattcaggcagcaaagataagtcgtcccctgaccgtcattgatccttacatcttctcccactttcatgcgaagtacatttttcatatggttgagatccgcgcccctgatcaaaatttcactttctgtgatccatgacggctctgcaaaaaactgctgcattcctcttctccttaccgttttaattttttcgggctgtcacacagacccactcgccttgatatgtaatgtcaagcacttccagacctgcttttttcacagcttccacaaccgtttcttctttatcatcgataataccgcttgtaatatagattccgcccttttttatctgattcacgacaaccggagtcagcgctacaagaacgtccgctaaaatattggccgcaacaatgtcataacactcatatccgactttatcctgtacttctttgtcatcgataatgtttccgatcatcacctcataacggtcttttgagattccgttcacttccatattttcatgagttgcatcgatagcacaaggatctaagtctgttccgaccgaatattttgcaccgaatttcaacgcaagcatcccgaggatcccgcttccgcaccctacgtcaagaatcttcgtattctccgttacatatttgcggatctggcggatgcaaagctgagttgtctcatgcattcccgttccgaacgccgtacccggatcgatatggatgatcattttatcttcgtcttccggctttacctcttcccatgacggaatgatcaaaacatcgtctacataaaactggtgaaaatactgcttccagttgttcacccagtccacatcttccgtttccgactcttcgatcagacactctccgacgtttacataagccgacatttcctccagttcttttcttacatccgacaggatcttctctttgtcttcttccggttccaagtaaaaactcagatacgccacgccgtcatccgcttctgtctgcggaaggatatctacaaacatctgctccttgtccgactgagtaagaggaattttatcctcgatctccactccctgaattccgagatccataagcatactgcttacaatatcttctgcttccgtcgtcgtctttaaccgaaatttattccatttcattttttaatcctcctgaaaccataaattcaaatctacatttcccgtgataccgggaactgcgcccgtttcactgtactgccatattttatattcatacggacactgcggcgtctcatgataatccgcataccagaaatcatactctgtaagctgctccatatcaagcgtaaaagtcatccattttaaatttgcgtaaatcatcggatcgtatcccgcatgttcgatcgtatcacaaaacactttgcaataattcgtaaaatcctgccgcgtatttccatctgttctcgcgctgtcccacttgatctcttctgtatcaaaaacaacaggacccgtaatattataatgcttcaaatgctcaagcacaaattccgcttcctccactgcctcagccggagaaactgcctgtgaaaaaaaatacacgcctacctgcagccctgcttccagagcgttcttcacgttttgctcgtacatcgcatccaatacaagagagccgctctctccgtaagcccgatacccgagacgaaccataacaaattcgacaccggattctttcacctgcttccagtcgatcacttctccttgaaattcagatacgtcgatcccaagttttgcctttgcacctgtttccgggtcctgatagcttttataacctgtctgctcatctgtctttaaatcggaaaaatcgtaagtacatttcggaacatccgaaagcagcggcgcttcataacggttctcttccacatcttgaaaacagtatcgcttcttttccccgtcctgattgccgcctgcattttgtatgagagaaccgttcttctgaacaatccactctcccgaatcgtatgttttatcctcatttcctgttacagactgcgaaatcacctcttttttcggagaacaggctgccagcataagaatcgtacagcttacaaccgcaatcatctttgccgtttttctcatactgatttttattttcagactcgtcctctccccgttttcatctgtcttctttttgaatctgtccatagatacgcctctttctttccgattcatctatatacgcgcttcttcactcccgccccttctcatcctttaaatgaccgcttacttgaaactttccgctctctctgcgaacataatatctccgattttgatctctccgcctcggatcacttttgcaaaaacaccttctctcggcataatgcactctcccatcttctgaaaaataagacacccgtgatgacactcttttccgatctgcgtcatctctaagatcacatcgcggcatataagccgtgttccgaccggaaaagagcgaaaatccaagtttgttactacaagattctctccgaaagcgccgtcggtcacttctgctccttttgcccgaaacgcttcgatcttatcatgagaaagaagactcacctgccgatgccattttccggcatgagcgtcgccttctatcccaaaatcttctataaaatgtgcgctgcccacattttgcttctgcgttcctttttctctgcttacacagactgcgagcactgttccgctttctgctttttctgacatttttctcacactccccgctatctttgttttatcttctttatcttattgctctgattttttgttctgatttctttttcctgtcaaccgccgatctgagacatcttttttgtttcgatttcttcgccttttccagatcttccgaactcatgaccgtcaggtttaaaaaacaccgcttctctcatcttctcctcgatcaaactgtcatccgccccgtttcttaacatttcccgaacgtctgtgccgtttccgtattgcagacacggctttaaaaatccttccgaagtgagtctgatccgattacatttataacaaaatttatgcgaaagggcgctgataaatccgattctcccatcaaaattatgaaaacgaatatactctgccggtccgtttcctactctttttttatatatttcataatcgccgaattcgttgtgaagcaatttatatatttcttcagacatttttccgttgaaatttttcccatttccaataggcatcatctcaatgaatctgacatctattttcctttttttcgccaaaagcgcaagagaaatgcaatcttcttcacagaaaggcacacaatttactttcactttcagatcaggatattttaacgcagattccatgccttccaacgccttttttatatcaccgccccgcgtcatccgaaaataacgtctttcgtcaagcgtatcaatgcttatattaacagaagcaagcccgtttgaaactaattcgtttatttgttcttttaataatatcccgtttgttgtcaacgtcacttcatctatacccggaataccctttaacttcccgacaagatccggtattccccgccgcacaagcggctctccgcctgtcagcttgattttcgtaatgccaagtcttaccccaatcctgcacactctttcaatctcttcaaaagaaaggatgtcttcatgcggaagaaaggaaaagccctctcccggcatacaataaacacaccgcagattacacctgtctgttacggatacccgcatgtaatcaatccgcctgccgtactgatcgttcatcgtccgcactctcccgcctgtcctgtcaatatttcaagtccatgttccactaccggaagaactgcttccagattttcttttaccgctttcggactgcccggaagattcacgatcaacgtatgatttcggatcgcggaaacagctctgctcaacattgccctcggcgtcacttccgccgaagctgctctcatcgcctctgcgatccccggaacattccgatgtgcaactgccattgtagcctcaggagtacaatcacgcaaagaaaaccctgtacctcctgtcgtaaatacgatatcaaccttttcatcatcacaaagtgtacatagacacttttcaatttctttttgctcatccgggagaagttccgttctcacaacatcgtatccctgatccgcgatcatctcacagatcaacgggccgctcttatcttctcgttctcccgcaaatcctttatcactcatcgtaacgaccgcagctttccatctgcgcgtccgtttctcttttttgcggcacacgttctccacatcttctgcctctgcatttcccgcagatctgttttctgccgacagattttcaccgacaagtccggcacaccggtcaaaatcgttccatatatctccgcttttgcctccggtctttttcaaaagacggatatcggtaatctccatcttcttatccaatgctttacacatatcgtaaatcgtaagaagcgcggcgctcactcctgtcaaagcctccatctcaactccggtctttcctgtcactttcactgtacaggtacagaagatcgcacattctttctcattcatacgaaaatccaccttacaattcgtaagcggcaatatatgacacataggaatcagatctgaggtccgcttcgcccctgcaatacccgccgttgccgcaacagccaaaacgtcgcctttaccgactgtccctgctttcacagcctgaaaaacatcccggtttacaagaatcttcccttctgccacagcctctcgtgccgtctcttttttgtcggtcacatcgaccatgaccgcttttccgttttcgtcaaaatgtgttaatcccatatagagtcctttccgttctcttacatttttccaaatcattttttattctaccacagtttcataaatttttcgacgacaagattgtaaaaaaagaatgccctgtaccgtgttgcagtacaaagcactctttttgaatcttctttcgtatatttacatttataaaacagacgccgcttcatgagcggtatgaaccgcatgatataatgttcctattttcgtattacagtctccgacgaaaacaacttctctccccgcatccgcaaatgcctgtactttctcttcatttgcttttacccccagcgaaaggatgatctgttcatatgaaagttctatcgttttttcattttttacaaatacgatgcggtcgccctcaatgttcattttgacaccgccgatcatcttgacctgttctgcttccaacagtccgcgcagggcaatttgattaaatttggcgcctcctcttccaaaatcacagacatcgatcatgtcaaccaaagtaacttcttttcccgcttttgccaaagacagcgctgcttcgcatccggtaagtcctgcgcctacgatcacaacttgcttctttgcagaaactttcccaagctccacatctccgacccatacgacatcctctctgcctttcgcaaacttcggaataacaggctctgctccgactgccacgatcaccgcgtcatagtcttttcccttcagatcttccgcccgaacttcactgttcaaatgaacagaaaccctctcttgaccggaaatagaatgaatcgtccattctacatattttttgatatcttgcttgaatttcggagcgcctgccattgtgaggactccgcctaaatgatcttctttttcataaagatctactgtatgccctctttgcgccgccgttctcgccgcctcgattcccgcaggtcctccgcctatcacggcaatcctcttaggcaaagtgttccccagattcatatacaatgtttccatcccaagttctgcgtttacagaacacctcaccggagcaagatcataatgcgtccggttaatacaataattgcatctgacgcatggtcttgtattctcagggcatccgcttttggcgttcttaaccaccatcggatctgccatcagtcctcgcgccatagaaaccatatcggcctttccttccgcaatatactgttccgcctgctctaatgtaaccgacccgactaccgtcaccggaacagaaatctctttcctgatttttgccgcgtcttcgatgttgattccatgatcgtaatagatcggctgattcatataaggagcaagtttttgctcggaatgcatccctctggatacatgaagaagatcgatatacggctcaatccgttttacaaatgcgataacttcatccagggaaggcgaaccctcgatcatatcatttgcattgatccgatattcgatagccagacgatctttgatcttctcacgaaccgcagcgagcagttccaccgtaaatcttgatgcattttcaatcgtatccgcgccatattcatctgttctttcattgatcctcttgttcaaaaagcatcccggaagctgcccgtgagctccatggatcacaagactgtcaactccgcatcttaccgcgcgctctgccgccaacgcaaaatcttcaatatattccttgatctgttctttcgtcatataagtagggtcaagctctaccgccggcttatcgccgttgtgatctctgtctgcgaagtttccgccatacatattaatggcaaaaagttctattccgatcttgcactgatacatatggacaagatctgataagatcgtcatttcatttacgacactttcttcgctcattcgcagcagatgagtgacaaacggagggagatttcgattgacgcagccacatccgatattaatacatgccgctccgccttttacgatatcccttacccattcaatcaattcacggtttacatgaccgtccgccgtcgcaaaggacggccatacaggagtgaaagaaactctgtttttcaatgtcatggggccgattttgataggacttaaaacatgttcgtagttcattttctgttcattcattttccgatgttcctttcaaaagtatttaatcatcttttgaatgtcttgcaccgatctgaaaatcttcgttatgatcgaacatatatttcacggtgattggatcatcccctgtcagttttttgaaatcatcagtaaagatatccatttttccttctctgatcgcctgcgcaaacgtcaccattccatcgcttgaaaacggagcttcactgtcttccaggaatacgccgtccgtcgttcttggcactcccatagcatcccatatctgataattttcttcatccgttacattctggaacgtcagattgtttcctgtggattcatttccaatctcaataaactgagtaatcgtcatcagctccggtccgttaatatcccagactttctgtgtaaactcacccgatctgtggagcgcgtatgccacagccttcgcacagtcttttctggagatataagccattaatccatcaccttgtgaatttgtaagcggagttcccatttttacataagtaaagtaatttgtgaccatcgcctctgcatactgtgaatttctcataaactgataatctaagccgacctcttttatataattttctgtataaatgtggtctttcttttcaacactaggatttgtctcatcgtctgcattcactaacgaagtataaataatctgttttactcctgccgcttttgccgcatctatcgcatttttatgagctttctgccttttcgctcctacaaacggcatcgaaataagagccagcgcatctgctcctttgaatgcctccgacaatccatctgcgttgttaaagtttgtctgacgagtctcgactcccatatctgcatattttttgagcgcctcttcactataaccacaaaagatcagattctctttcggttctaaagtaagcaaaatttcagcggcagtttcacctaaatttccgtcaacacctgtcaataataatttacccatcgtttcatttctcctttgcttttcatactgtaatgataatattttaacaagcaaaaagaaactacctgcttttctataaagactataagtttttcttataatctttaaaatatgctacaatatattcataaaactgaacaacactttgttttttattttcttttaaataagccaccgcaaaatctgcatgatgatgacttcctactatttttacagtgcacagatcttcctcttccggcacaacctctctgcctgtatatcctattccttcatccagttttatagatataaaatactccgaaagagaattcacttcttttacaatattcggttcaaacccatccaatataaacgccttcataaaatcatcataaaactttctgcccatctgcgaagataacgtgatcatcggctcgtcttttactaaaatggggttgatgcttttatactgacttaatctgttttttctgctgcatacaatacacgtttccgactgatgaatcgtttcataagaaatatccgggtttacagaaaactctgatgacagaccaaaagcaatatcaatatctcctgcctccaacagctttttcccctcttcaaatgtataaacacgaacatcaaaatgcgtttcatgcccttctttatattcattgataatacggggaagatatttattttcaaacggacctgtaatccccactactattttctgcgaattctttttttgaatataacgcgtctgtttctcgattttctcatattcctcagataactgtttgatcttctgataataatatttaccggcttccgtcaattcagggcggtatttactcctgtcaaataaacgaactccgacttcttcttccagtttagaaatctgctggctaatggcagcctgcgacaaatagtgctttttcgccgcctgcgaaaagcttcctgtttctacaactgacataaaaaaaataaaaactcttttttaacatgttgccacctcacctgttcctgagaatactcgttctttaaactgctttcctttttagtattctttcgtgttatatgtgcgaaagatcttgcactcaagcttcggttgtaaaaactcagtgcagttcaactcccatcataccacatacaaaaatcatttgcatccgatcagaactcaactccaccgtccgatcagaccccagttcgatttcatcgcttcactcttcatctcactgatgggcgtccgccctatgcttaaaaaagaggactccgcaccttgtaagcaagcaagcttgctcagcagagaacttcttttttatgcgcaggttatgttttctctccgtccgatcagaccccagttcgatttcatcgcttcgctcttcatctcactgacgggcgtccgccctatgcttaaaaaagaagtctctgccttttgcaagcaagcttgctcagcagagaacttcttttttatgcgcaggttatgttttctctccgtccgatcagaccccagttcgatttcatcgcttcgctcttcatctcactgacgggcgtccgccctatgcttaaaaaagaggactccgcaccttgtaagcaagcttacgctgcggagtcctcttttttatgcgcaggtctgatctgttgattcaaactgtgaattgtatagttcggcgtagaagccgttttgggcgaggagttgtgtgtgtgttccttgttcgatgatatcgccgtctttcataacgagaatgagatctgcgtctcggattgtcgataatctatgggcgataacgaaacttgttctgcctttcatcaaattatccattgctttttggattcttacttctgttcttgtatcgacggaacttgtcgcttcgtcaagaatgaggatcttcggatctgcaagtattgctcttgcgatcgtaagaagctgtttttgtccttgtgagatgtttgttgcttcttcattgatttccatctgatagcctcccggaagtgtctggacgaaacggtgaacatgtgctgcttttgctgcctgtataacttcttcctctgttgcgtcgagttttccgtaacggatgttatccatgatcgttccgtggaagagccatgtatcttgaagtaccattccgaacatttctcttagttcgcttctgttgaagtctcttacgtcatggccgtcgatcttgatcgaaccgctgtttacatcataaaagcgcatgagcagtttgatcatcgttgtttttccggctcctgtaggaccgacgattgcgattttctgaccttcttttacatttgcagagaaatcgttaatgatgatcttttccggattgtatccgaaatgaacattttcaaactgtacatttccgtgaagtccttctaccgaaacagggtgttcaaccgtctgatcttcttccttttcttcgaggaattcaaacacccgctccgatgatgccgccgcaagctgaagcatgtttgtcacctgagcaacttgttggatcggctgtgtaaagtttctcacatactgaataaatgactggatatctccgacttctattgtctttttaatcgccagaaaacctccgagtatcgctactcctacataacctaagttccctacaaactgcatgaccggcatcatcattccagagaaaaactgggatttccatgcagattcatacaatttatcatttgtccggtcaaattcacggatcacatcgtcttctttgttaaatgccttgatcacgttgtgtccgctgtacacttcctcgacctgaccgtttacatttccgagatattcctgctgtccgctgaaatatttctgcgaatgtttcataacgaatgagatcaggccaacggaaatcggcaggatcaacagcgccacaaccgtcataagcggactgatcgaaagcatcataacgagaactcctatcagagtcgtcacagaagtaataagctgcgtcgcgctttggttcaaactctgtccgagagtatctacatcatttgtcacacgggagagcacctctccgacaggcttcgtatcaaaataatccatcggcatccgattgaccttttccgtaatatcttttctcaatcggtacgtcgttttctgtgagattccggtcataatcattccctgaataaaggaacaaagcgcgctgactacatacagaccgagagtaataagaaggatctgtccgatttttccgaaatccattcccgatccgcccgatactttactgacaagcccgttaaaaatctctgttgtagccttacctaatattttcggtccgacaatgttaaataccgttccgcatactgcgaaaacagcgacaaaaagcatctgcactttatatacgctcatatattttacaagttttttaagcgagcctttaaaatcctttgcttttgctcctcctcgcattcctccatgaggacctttcattccgtgcctagacatcgcttctcacctcctgttccgctgtttttgcactgattgcttcttttctttcttctgtttttatcgtttcactttttatatcttccgtttttctgtcttcactttgcattccatcttgaagttctttttcagacaactgggatgccgcaatctgtttgtaaacttcacagtttctaagaagctctttatgtgtaccgattcctgcaatctttccatcatcaagtacaatgatctgttctgcatttaaaatcgtactgattcgctgtgccacgatcagcaccgtactttctttcgtccgctttttcaaagctttccgtagagcaacgtctgtcttgaagtcaagcgccgaaaaactgtcgtcaaaaataaacacttccggtcgttttgcgatcgcccttgcgattgaaagtctctgtttctggcctccggacacattcgatccgccctgcgaaataggactttcatatttgttcggctttgcttcgataaactctgttgcctgcgctatctgcgcagcttctttcatctcctgcccgccgccttccggattcccgaacataatattcgatgcgatatcacctgagaacaacagtcctttctgaggaacatacccaagtttatctctcaaatcatgctgtgtcacttcacgaatatctgttccatccaaacggatacttccgtccgtcacatcataaaaacgggggatcagattgacaagcgttgattttccgcttccggtacttccgataatcgctgtcgtttctcccggttttgccgtaaatgtaatatcttcaagaacattttcatccgcacccggatatttgaaagaaacatggtcgaatgtgagcacacctttttgtttttcttcaaattttttcggtgttttcggatcatggatcaccgtcctgctggacagaacctcatccacacgatctgccgcaacagccgctcttggaagcataaccgacaacatgcatatcataaggaatcccataataatctgcatcgtatactggataaacgccatcatatctccgacctgcatctgtccgtcgttgattccttttgcaccggaccacatgatcaaaaccgagatcccgttcataataagcatcatgatcggcatcataaacgtcatcgcgcgatttacgaacagatttgttttcatcagatccatatttgctttgtcaaaccgcttttcctcatgcttctctgtactaaacgccctgatcacaggaagtccggtcaatatttctctcataacaaggttcactttatcaactaatttctgcaggctcttaaatttcggcattgcaaccgcaaacaaaaccaaaacgactaaagcgatcaaaacaactgccagaccgatgatccaggacattgaaacatttgtctgaaatacctgcacaatgcctccgatcgcaagaatcggcgcataaagtacaattctaagcagcatcacgataataaactgtacttgttggatatcgtttgtacttctcgtgatcaaagacgccgtggaaaaatgatcgaactcattgcttgaatatcctacgactttcttaaacactcttcctcttagatcgcgtcctgccgccgctccgacgcgggatgcaagaaatccgacaagaacgcttgccgccattccgagaaatgcaagaccgatcatttttgctcctgttgaaaacagatagcgaaactgcaattcatccatatcgataccgagatctgcataagcttcttttacataatttacggcagcctgctctgtgatcgtatcaggaagttcttccgtctttttttctatctccgatacaaatgcctgtttctgctcctgcggcatcattttcaaaatatccaaaaccgtcatatcttccgatatcatttccggaggaagctgtgctttcaactgttcttcgatatctgcggtcatatcgcttcctgattcaaatcctgccgccatcatcataggcgctgccagaataccgcttaatttttccgtcctatccgtatcttcttttacagtatcttttaagacataagcctgttcttcatatgttttgtcatccttttcatatgccgacaaaacagtttttccgtctttttcagaagtaaaaagcaaaagtgtctccatatcttccgcggaaatcgcatccggtatatgatcttcaactccgccttgttggattcccacattgacgatgtccgaagtatatgcaggcaaagacagatcacaatacgcctgcacgatcaaaatggccacgatcgcaagaagcgctttccagtgctcggacgcatacttaaataagtttttcatatcttttctttcctttcatattgatcaatattattgtttacatgaactaaaagcctgcgaaacaatattttttcttctacgctcattcctttaagcaggatctcctccattttatccgtcacgtcttttatagattgaatgcacgaacgtcctttctctgtaagcgccaaccgcataactctctgatccgcaggatctgtctgtcttgcaatatatccaaactgttccattttacggatcgatgatgtaatcgacggagcggtaatattcaactgctttgccagatccttctgcgacatagactcacagtgatgaagcgtaagtaaaatacttgcctgacttctgtttagatcaaatacactgtacatatcttttgccgcaactttcgcccggtgcgacacaattcccaatatcccgatcaccggagcatcgtttatatcacattgaaacatgttatgcctccctcttactttttatttattagttagataactaaataatatattagtaatataacacaaaaaagtcaacatatacatgttgacttcacatttttttcatactttttgactaattttatttagtaggttaattatatgtctcctgattttcttcccgttctttcattttgatcgtctgcacatcgattccgtttacttctatatgatcgtccaccggtatcacaagacagcggcgtccgtcaatgatcctcgtctcaacgagatccgctctttccggatttaccttaataacgatgtccggagtttcaatctgaaactttctcgtctctgcaatattagatgctaaaagcgatgttttttctcctgcattttccgtgaaattgcggtcgaaactttccatcttttccgcctctacaccgctttgctcaaacactttcttcatatctgtcagatcaagcgccagcggttccggttcttccttatgttcttctatcaactgattcagcgtttcatgaatatttctgacggtctcataatctccgtcctcaccaagcgtgtcttcgatcaacattttaaacgtttctttctgcgtatcggcagacatcggcatcttcgttccgaaaagctgatcgatcattccgggctgtaaatcttctgatttcttcgtataatatagcatactatgtaaatccgtgcttcggtcattaaaggcagggaacaaaaatcctttatcgggcatatctacgatccagtctcttatccgatcctgaatgcagttgctttccgcattataactcaatcctgctttcgacaaagacaccgggcagagactcataagcaaatattcatacacttcgtcagacgcgtcgaacatttcgatcccgtcggaagattttcccggaacatcatacatcgcatggatcaaaataatgtaataattctcggcacagtcgtatgcctcgatgactttatcataaaactcttccaaaagcatatcatcctgaagcttgctgctgcgaagcttcaaaagaaactcctgcgttcccccgggcatctccgcatcgatcggaaattccatattcaatatatttttcccgaccgtaccggaaagcgtctttttaaaaatgtcaaaatatttaaacgcctcttcttccggcaatgacaaaaaagcttcttttgattccatcttcttttctttctcatgatctacataacacccgcatatacgtgtaatcgcacaatttgccggagtaaactgctttcttatctctaatatttccttcttattcatattataaacccctttccgtcattcttctgtctgtttctttcgcgcctgctttcatcgcatctgtttctttcgcatctgcttccgttttgctcattttccggcgctatttccgtttgcgccgatctattatatcatacacctgatcggggaattaaaaaagatttgattttccctttgttctatggtacgatagcgtcgcaaacaataagaccatacaaaatagacttttgatagaaagcttacatttcaacgcatttggcttcgcactctttcttgaaatattttcagagaaaatgcatcgtcagatgccttttttacggaaggaacttttatgaacgctgcaagacaaaacgaacaatcgatcttccatactttttttaaatatgtatcatcaaacgtcctcggcatgatcggattttcctgctatattctggccgacgtttttttcattgcaaggggaatcggcgcagacgccctcgcggcgctcaatctgacgctccctgcatacaaccttatgaacgggatcggtctgatgatcggtatgggcggagccgcccgctactcgctttcatcgacacgcccggacagcgatacacaccgcactgcttttacacatgctctgcttttggccgctctctgcgcacttttcttctcctttgcgggagcattttgttcagaagagatttccgccatactcggcgccgatcacgacacgatcggttacgcctccgactacatccgcatactgcttctcttctccccgctctttctcggaaacaatcttcttctttgttttgtgagaaacgacggagctcccagactttctatggcgggaatgcttatcggaagtcttgccaacattgtactggactatatttttatctatccgcttggcatggaaatggcaggagccgccactgcgactgcaactgctcctgtgatcagtatgctcatcatgtctgtccattttataaagaaaaacaaccggtttcatattacaaaaatacggctgtcattaaaacgcgccgctgatatttgtttcctgggagtttcctctcttgtactggagctttcctctggaatcgttattatcgtattcaatttcctgatccttaagttgaacggaaatacaggtgttgccgcctacggaatccttgcaaatatcgcccttgtcctcacttctgtttttacagggatcgcgcagggcatacagcctatcgtcagcagacatgccgatgcaaaaggaaagcatgtacaaaacagtatacgaaaatatgcgctgatcacaagccttctcctttcgcttgtttcctacataacgatcagtcttttttctgttcctatcgccgaagcattcaacaaggcggatgatcctctgttgacaactatcgcttccggaggcatgagaatttattttatcaacttattttttgccggagtgaacattatagcatctgcatttttatgttcatgcgacaaaccaaaacttgcatttgtcatctctgttttaagaggctttatactgatcattcctgccgcatggattttgtcgtcattatttggattgacagggatctggcttaccgttcctgtcaccgaagcgattgtatgcctgttttcattcctgtttctttttcgcggcacacacactcaaatagtacagtcaacataaaacgcccactctttcaggcgtatcaaaaagtatcgggatacaaaattcatcttctgtatcccgatactttcgtttttacttacattccgctgtacgcagtattttatttgcattttcaatccgctcttttgtcggaggatcaatcccctccaacggatactcatatccgagttctttccatttatatgctccgagcgtatgatacggaaggacttcgactttttccacattacttagtccgtcaatgaattcacggagttttccaagcgctccgtcatcgtcgctcctctgcggaacaaggacatgacgaatccagacaggttttttaatctcatccaaatatttagcgaaatcaagaatattttcattcgtacatcctgttaatatcttatgctgctcatcatcgatatgttttatatcgagcatcacaagatctgtatatttcatcagttcctgtactttcccgaaaaacggttcttctctcgtaaacggatttccacttgtatcaagcgttgtatggactccggcttccttcgctttgcggaacaattcaatcaagaagtcaatctgaagaagaggctctcctccgcttaccgtgatcccgcctttatctccccagtaagtgcgatagcgcagagctgttttcagaagctcatctgccgtatacagcgttcctttcttaagattccatgtatccgggttatgacagaactgacagcgcatagcgcatcctgtcaaaaagatcacgtatcgtactcccggtccgtctactgatccaaaactttcaagtgaatgaacgtatccttttatttcgtttgcctgttccattccggcgtctccttttcattttataaagatttataaagaaaccggttcttctgccaaagatcatatctcaagcaaaagaaccggactttcttcatcttatagtcacatttttctttctaaagaaatctgcagacctttatttattgtaacagttcagccatacagtgcagttttacgaatggcgcggactgaactgttactatttattacatagactcgtggcaagttcttgcgattacgtctaactgctgctctcttgtcaggtcgataaacttaacggcatatcctgatacacggattgtaaagtttgcatattccggtttttccgggtgctccatagcgtcgatcagtttatctgtaccgaatacgtttacgttcaggtggtgtgctccctgatggaagtatccgtccattacgcgggcaagatttactttacgctcgtcatcatcatgtccgagtgcattcgggctgatcgtctgtgtattagagattccgtcaagagccagctcgtacggaagttttgctacagagttcagggaagcaagaagaccgttcttctctgcgccgtaagacgggtttgctcccggtgacagcggctcgcctgcttttcttccatccggaagagttcctgttgcttttccgtaaactacgtttgatgtaattgtcaggatcgatgttgtaggctcagaatctctgtatgtgtggcatttgctcaatttgtgcataaatgtcttgagcagccagatcgcaatatcgtctgcacggtcgtcatcgttaccgtatctcgggaagtctccctcgatctcaaagtctgttgcaagaccgtcttcgtcacgaattacttttactttcgcatatttgattgcgcttaaggagtctactacatgtgagaatcctgcgatacctgttgcaaatgtacgtcttacatctgtatcgataagagccatctctgctgcttcatagtagtatttgtcatgcatgtagtggatcatgttcaatgtatcaacatacagtttggacagccactccatcatctcgtcatatttctccattacttcatcgtaatcaagatactctgatgtgattggtctgtaagccggagctacttgtacttttgttttctcgtcaacaccgccgttgatcgcgtaaagcaggcattttgcaaggtttgctcttgctccgaagaactggatctctttacctgtctgagttgcggatacacagcagcagatgctgtagtcatcgccccaaaccggacgcataacatcatcgttttcgtactgtacggaacttgtctttacagaaatcaaagatgtatatttcttgaagttttccggaagtctttctgagtaaagaactgtcaggttcggctccggagacggtcccatgttctcaagtgtgtgaaggaaacggaagtcgttctttgttaccatagaacgtccgtcctgtccgagaccacccatttcaagtgttgcccataccgggtctcctgagaacagctcgttgtatgacgggattcttgcgaatttaaccatacggaacttcataaccatgtggtcgatcaattcctgagcttcgctctctgtcagaacaccgttcttcatatctctttcaatataaatatcaaggaatgtagagatacgtccgacactcattgcagctccgttctgtgtcttgatcgccgcaaggtatccgaaatacagccactgtactgcttcttttgcatcttttgccggctgtgaaatatcatatccgtagattgctgccatctctttcatctgctgaagtgcgcgaatctgatctgcgatctcttcacgaagacggaagtctgttcctttcatgccgtgtcttgcataacgctcgaagtcgtactgttttttctcgatcaggaaatcaataccgtacagagcaacacgacggtagtcgcctacgatacgtccgcgtccgtatgtatccggaagtcctgtgatgatcttgttgtgacgggctttcttcatctccggtgtgtagatgtcgaatactccctggttatgtgttttatgatattttgtaaagatctctttcaatctttcattcggctcataaccgtaagttgtacaagcctttactgccatgttaataccaccgtaaggcataaacgctctcttaagcggtttgtctgtctgaagtccgacaactttctccaggtctttcatgctctcgtcgatatatcccgggccgtatgctgtaagaccggatacaacttctgtctccatgtcaagaacgccgccttttgcacgttcctctttctgcagctcctgaagtcttccccacagtttatctgttgcctctgtagatccttccaggaatgattcgtctccgtcatacggtgtgtagttctcctgaatgaaatcgcgtacatctacagaatttttccagttctttccggaaaatcctgcccactgatcaaattgtgccataatttgaaagcctcctctgaaatcttaataaatttattcgtttcataccgaagcacatcatctgcgctttcggttcatgcaatgagcggttaaacagtccaaatgatatcgtaatttgtatctcattgccacatgcgctagtataacatcacccgaaggaaaaaacaaccattataacgagaatccttctcaaaaacgcctttgttcttgatttagtacaattttgcctgtatacgctcttatatttactatatattgtgtttgttaaatcattatcatactttcagtagcggtactttttcttctcctttattaaaaatataattgtcaccgccaaagccatcgtttctgcagccaaaacggacgtccacactccgtcgataccgataatcagaggaaggaaacatactgccgccacctgaaacaaaaacgttctcaaaaacgaaatagccgccgacacaaatccgttattcaatgccgtaaagaaagaagacgcccatatgttgattcccataatcaagaacgaaaaagaaaacaggcggaatccgcgaacggtcatcaaaagaagctctttatcataatttacaaaaatcctgacaagaggcattgaaagtatctccgccgctatcgtcagtacaattcccgctacaatcaaaatatttttacttttcctgtataaattatgaagctctgcgtcattccccgctccgtaatgataacttacaatcggagcgcttccgaccgaatatcccataaagaccgcaacgaagataaaattcacatacataatgactccaaacgcagccacaccgtctgcacctgcaagtttcatcaactgaaagttataaagaatattcacaagagacgtcgacaaattcgtcaccatttccgacgaaccgttcatgcatgttttcagaagaatatctttatacagtttcgttctccaagtgatccgcagcccattgcggcttcctttcgcaaaaaagaaaaacggcgcgatccctcctacgatctgtcccattcctgtagcgatcgcagctcctgccactccccactcaaatactgcgataaacaagtaatcaaacacaacgttcgtcagtccggccgcaatattgatcttcaggctcaaaaccggctcttccgcggcaacgagaaagctttgaaacatattctgcaaaataaacgccgtctgcgtcgcaaaaagaattcttccgtatacgatgcaatgttccaaaagttcgccatccgctttgagcatccgggcaatttgcggcgtaaagataaaacagataaccgaaaaaataacgctgacgataataccgaaataaagaatcatcgaaaaatattgattcgctttttccttcttaccttccccaagcgtttttgctacgatggcgcttccgcctgttccgagcataaatccgattgctgcgattcccatagataccggccagatcagatttgtcgccgcaaatggcattttcccgacatagtttgacacaaaaagtccgtctacaatactgtacatcgacgtacagataagcataagaactgttgatattgtaaagcgaatcagtctgcggtatgtaaagtgatccgaaagctgtatgttcataatcttaattctcctaccttttgtctgaaaatttccatatattttgcattcaaacgtaaaagtttctttctctcctcttctgtcatatgcataaaaacgcctgcctctgcctccatcacgggaatgatcttttgttttgccatcgcttttcctttttcggtcaaaacaatctgcttgtcatgccctttgccgctttccaatacaacgcagccgttttgcactaattttttcaccgaagaattcactgtctgccgactgatagaatactgttttgcgattttcctctggcagcaaccgtcttcaaactctacgatactatacagcacaataaagtcagtgtccgatattcccgcttttacacatatttcatggtagatactctccatctcccgatagatcctgttgttctcttttaattctctcgactgcgtataattcatgccaaaccccactttctgtttttctttatacattcttataccttccatacttttatccttccctcctttcaaaaatccgaaatcggatttttctcgtttaattataatccgatttcagattaaattcaaccattcatctatgatgtctttaccatgaggtccactaaaaataactgtttttctgttgagaaagaggaaacattatgacataatattattataagtctgccagaacacaaaacatcttgaacaagaagcgccaaaaacatgagaatatttgaataataaaatacaaagcaggcgtcagcgctttttataagaaagaaaggacttttattatgcgtatccgaaaagcaacacaacaagatttacattctattatgcagttatatgaaaacgcccgcgcattcatgcgcgaacacggaaaccccggccaatgggggacgacgtatcctcctcaaaacatgattgaaacagatatccgcttcgggaatttatacgtctgcatcgaaaaagatactatcgaagccgttttcttctataaagacggcatagatccgacctatctgaaaatttatgacggacaatggaaaaacgatgctccctacggcgttgtccaccggatcacttcatccggcaaagtaaagggcgcagcctctttttgtcttgactgggcattttcacaatgtggaaatttaaagatcgatacgcacgaaaacaatatcgttatgcagaatatgctgaagaaaaacggatttacttactgcggacgcatctatatagacaatggcggcgaacggcttgcattccaaaaagactccccagtaccctgaggagtctcttgaagctattcttttaagttataaggtttcgccaaaccgtacttttatatacgctttgatctcttctacgcatttctcaaatccgagttttccactgttcagacacagatcgtaatttcttgcatcgacccattcatgacctgtatggtatctgtaaaaatcacctctgtactgatctgttttctcaatatatttctgcatctctttttccgtcatgctgtgacgttccattgaacgatccagacagaactttctgtctgcatgcacgaatacgctgactacattcggataatcttttaaaacataatctgcgcatcttccgacaataacgcacgactcttttgccgcaagctctttgatcacctttgcctgataattgaacaggttatcgtccgaagtaaactctctgtcttccggcgggatcaatccgccctcatacggacggctcaaaagcttaaaccatcctgccctgcgcaccttttcgtccgacataccaaacagtttttcattgattccgctgtcctcggaagccatacgaaggatctctctgctgtagcagttgatgccaagttcttttgcaagcatcgccccgatcgttttccctccgcttccgtactgtcttgaaattgtgatgacgatatttctcattaaaacacgcctcctttactctccgagataagcctttttaatcgaatcatcttccagaagttcttttgcatctcccgaaaggacgatctttcctgtctccaacacatatgctctgtcggcgatcgaaagagctttcttcgcattctgttctacaagaaggactgtcgttccgctttcgctcaccgcacggataatatcaaagatttcatttaccatgatcggagaaagtcccatcgacggttcatccattaaaataatcctcggtttggacataagcgcgcgccccatagcgagcatctgctgttcgccgccgcttaatgttcccgccatctggtttttacgttcctgcaaacgcggaaaacgcttatagacactttttaatgtttcttcaatctccgccttatcttttcgtgtataagcgcccattctcaaattctcataaacgcttaattctgcgaacactcttcttccttccggtacatgcgccatccccatagagacgatcttatgagccggagtttttgtaatatcttttccttcaaacagcacctgtccgctcttcggggagatcagacctgtaactgtatgcagcgtcgtcgtctttcccgcgccgtttgctccgatcaaagcgatgacctctccttgatttacttcaaaagaaatgcctttgatcgcctggatcataccataatatacttgtaaatcttttacttcgagcattgccataacgattccccctattctccaagatatgcggtaacaacctgcggatcgttcaaaacatccgacgttttaccttcacagagcacctctccgaagttgagcaccgtcaacttctcgcaaatgccgcttaccagtttcatatcatgttcgatcaaaaggatcgtcatatggaatttttctctcacaaaacggatcatgtccatcaattcccccgtctcgttcgggttcatgcccgcagcgggctcgtcgagcagcaaaagcttcggttctgtcgccatcgctctggcgatctcaagccttctttgctgtccgtacggaagattagaggcggcaacatgcgccacatcttccagattgaacactttcaaaagttccattgcctgctcatccatctctttttccacttttctgtaaccgggaagtcttaagactcccgaaagagtagaataatgatgtttattgtgaagtcctactttcacgttatcaagaacacttaactgcttaaacagccggatattctgaaatgtacgggcgattcccgccttattgatctcaatcgtgtttttccctgtaatatccgttccgtccagcagcacttttccgctgtccggcttatatactcctgtaagaaggttgaatacagtcgtctttcccgcgccgttcggaccgatcagtccgtacagagcttctttttcaatcgaaatgtcaaacccgtttaccgcacggagaccgccaaatgaaatcccgagatttttaacttccagtaacgccattattttacagcctcctttttcttctttccgaaagaaagatatttttctctccactcgatcgctttcggcgcccagttaaagagcatcatgacaatgagaacgatcgcatagatcagcatacggtaatctgacaatccacggagcatctccggaagaagtgtcaggatcactgccgctatgatcgaacctctgatatttccgataccgcccaaaacgacaaagacaaggatcatgatcgacatattataaccgaagttgtttgtattcgccgtcagcgtagacagattgtgagcgtaaagcacgcctgccgctcctgccatcgccgcagatatcgtaaacgccatcagtttatattttgtaatattaataccgactgattccgccgcgatacggttgtcacggatcgccatgatcgcgcgtccgtctcttgaatggatcagattaagcacgataaacaacgtaatcagaatcagtataaatccgataaaaaacgtcgcatctttcggcgttcccgtaatcccctgcggaccgttaatgataacctttccgtccggttccatattcagcgccatcacatcttttgtcgaaaaatgaaaaccgttggaatctttacctatatacaatacgtttacgaggtttttaatgatctctccgaatgccaatgtcacgatcgccagatagtcgcctttcagacgcagaaccggaattccgatcagaatgccgaagatcgcagcagccgcaattccgatcaaaagagccagaaagaagcgcagtgaagccgattcgatcgtatctctcatgcattttgaaaagaatgcacttgcaaacgcgccgacacacataaagcccgcatgtccgaggctcaattctccaagtacgccgactacgaggttcagcgacacagccataataatataaatacaaagcggaaccatcaatccttcaagaaggctggaaatacttccggcgttgatcagtgactgcatgatcacaaatgccgcgataacaagagcatatgtgatgatattattttttgtagtttttttcatattttttaatttatccatcgctctgatcacctacactttctcttgaattttcttacctaacaaacctgtaggtttcacaagaagcacaatgataagtaccgcgaatacgatcgcatccgccatctgtgacgaaatgtatgcttttccgaaaatctcgatcacaccgagcagaattcctccgataaacgctcccggtatcgaacctattcctccaaatacagccgctacgaacgccttaatacccggcatcgctcctgtatacggcgtcaggctcggatatgccgaacacaaaagcacacctgcaacagccgccagcgccgacccgattgcaaacgtaagagcgatcgttccgtttacattgattcccataagctgagccgcgcctttatcttccgatacagcgcgcattgcctgacccggctttgatttctgcacgaacagcatcagtacgatcatgatcactacacatgccgcgatcgtcacgatcgtctcccctgaaatgttcagcttgccgcctgccaaagacaaacctttccacttaataaccgacggaaacgtctgtgcgttcgccccgaatacgagaagcgccgtattctggagaaggtagcttacgccgatcgccgtgatcaatacggcaagtgaagacgatgcgttacgcagcggtttgtacgcgatacgttcgatcaagattccgagtaccgtacacacgattacagcggcaacgatcgcaaggatcggcgacatccccgccttcatcatcgtgatcagcgccatatacgcaccgatcataataacgtcgccatgggcgaagttcagcatcttcgcaatcccataaaccatcgtatacccaagcgctatgatcgcatagacacttccaagactgattccattaatcaaatacgatataaaactcatgtctcattccctttcatttctcttattgttccgataaacgatctcttctctgtttatcatgattaataaggattataccacaaaaaatataggattatcaataagaaaaaacgagtacgctcggtttttttcacgtacccgtttttaactgctttattttgtatctatccggctttttcttccgaaataaaaactcccctgcatgacgtgtcattcattttacatatatgccggcattttatgactcgacgtctctcccggcatcccatttgcggtaaatagcttcgagagcatccaccgctccgtcgatccctaaaagactcgtattaaacatcatgctgttcgactcgattccaccccattcgcggccggtccttgcctcataataaagcttcctttcgcggtctgtctttttgatcttatctgccgcctgcttttcgtttagttcataaagcttcatgattctgcggatacgatcgtccttatatgcataaataaacgtattgatgcagtttgaataatctccgaggatataatccgcacatcttccgacaaaaattcccggacctttctccgcaagtttccttatgatcgccgactgcctgttaaagacgagatcacttagaggttctcccgactcgtctccgctcataaatgcagtatagtttcctgtactgactatatatgccgtgagaaatcttccgagaatcgtctcgtctacctgcgtcgcatcttcactgctgatccgaagctcctgcgccgccatgcggatcagattatgatcgtaaagcggaatgtcaagccgttctgccaatcgatttcctacttcatgcccgccgcttccgaattgccttccgatcgtgataatcgtgtgtttcatcatatgtgccactcctctctgcggatcgctgtattgatatactcaagtataacattgtttcccgggtatgaatagaaatttattgattttttctatttttccttactgcttatgatcgtataatagctttttgacgttacgacataaacaagtacatagaagagtgcaaacacgagataacatccgatcgtcacgatcacaaatactttcgcttccacgcctgacataagcatcagtattttctgaatcatcggaaatgcaaacgcaagatgaattcccgccatgatcagaggcatgaaaaatacagtaagcacctgagagttgatcgtctgcttcacttctttctttgtcattcccactttcataagaatattaaagcgatcctgatcttcatatccttcggaaatctgcttgtagtacataatcagcacagtaccgaacaggaataccgctccgagaagcactccgaggaaaaacaatccgccgttgagcgcaatgaaatctcctttaccgtacgctttactgtccgcataataatttgccagcgaatctcccatccgattgccctgttcatctgccgcttcggatatatgctcaaaagattccaaaatatccttgtaaatctctatctgtttttcttcatcacatttcagatcaaagtcataacattctttcagggaaagcaggtacaatgttccgtcctgcaaaggttttgcattgatcgtttcgtacgcagtcgctattttttcgatcacagacaaatcttttacaacaacctgatatgacccctgcatattcgccatggcgttgcctacccctatcggaggttctttcattgtctctactttccatgttccgacgccgtcgatcgtaaaggaatcatactcataatctgttttatatgagtagagcatcatctcatcttcagccaaagtcttgtctgtgcctttcagtttgttgtaatcatccattgttgtaaaatacatcgtcttcacagatcctgacatccctgcattaatcgaggaaatctcccctttcatcttttcaaaatcaatacttaaaacatcgtctgactgtactccggaaagagagtaaagattataattttccaagttctcagcctttactttatgagattcaagcaccttttccacagcctctttatacgtcatggtcatctccggcgtcaaacgctgcactacgctgtcttttaattctgtatctgttccgtcctcattttgcggaagggatgttttcccgctccactcgatcgtgatgtcatgtggataacggtttctgatcgacgattccgtatctgcataaatacacatcgtagacgagatcgtcacaagcaccatcgtagataaaatacagatcgacgccagacccgctccgtttctcttcattcggtaaaccatctgtgacaaagatacaaagtgtctcgtcttataataatactttttgctcttttgcagcagcttgcaaagagcgaccgaacctgcaataaacagaaggtatgtggcaatgatcaccataacaaccgcgagaaagaatacaagcatcgcagttgtcggatcgatgatcttcacagccagataatatgctccggcaaggatcaccgctcccgcaaatgcaaagagccagtttgccttcggcggtttttcgccgacattctcacttctgagcatctcaatcggacgaagtttatataccgacacaagcatgcggatcataataagcagaaagatcgcaagaaacagaccgactgtcataaggatcggcttcatttctatatgaactccgaatccggtcgccccgtcaagaagcttaattgccagaagttccgcaagttttgagaacagaattccgaacacgattccgataaccagagaaatcacggcagtcagtatattttcccacaaaagaattcttaccagattacgtttgcccatcccgagaatattatataatccaagttctttcttccttttccttataagaaacgagttcgtataatacagaaagatcaatgcgaataccgcaactacaaacactcccatagagagcagtccctgaagcatttccccgccccggatagacgccagttctttacttatcgacagaaaagaaacgatatagtacatcatgatcatacagatacatgtcaaaatatacggaaaatacaattttctgttttttgaaatgccttcccctgccagcctgatataaaatccttttttcatcgtctgtcaccacctgtcgcaagcatcgtcagcgtatccgaaatcttctgataaagttgttcgtccgtcatctgacctctgtatacctgatggaacacttctccgtcacggataaacaaaacgcgtccggctttgctcgccgctttcactgaatgagttaccataaggatcgtctgacctcctgcgttgatccgcgcaaacaatccgagcagttcgtctgttgaacgagaatcaagcgctcctgtcggctcatctgccaggatcagccgcggttctgtgatcagcgcccttgcaacagcggctctttgtttctgacctccggaaatttcatacggatatttttcaagaagcgccgaaataccaagttcctttgcaatcggctgcagctttgaatccatatgcttataattttcacctttcaacacaagagggagcaagatattgtccttcacattaaacgtatccaacaagttaaattcctgaaaaacaaatccaagattgtcgcgccgaaactgtgcgatatctttgtcttttatagaagacaacggtttgccgtcaagaaggactgttccttccgtcggtttatccaaagccgccataatattaagaagcgtcgtcttacctgagccgctctctcccatgatcgccacatattctccttcttccacagaaaagtttacacaggataatgcctgcacctgattgccgccgaaacgcggtctgtatattttcttcaaatttttgacatctaaaactgccatttcatacatcctcctcttttttacttgatagtgaaagtataacaaaagagccggaatgccaacatcgaatttggtgacattccggcccgcctatgtgacaaatttgtaaggcatttccatgcagcctttattcaacttctaacggataggacgacagatcgatcgtaaagctgcttccctttcctacagttgactgcgccgtcagcttatgtcccagcttatccgccgccgtccggcaaaggtaaagtcctattcctgtagattttttatccagccttccgttatatccggtataacctttttcaaaaatacggggaagatcttcaggtgaaataccgattcccgtatcgctgatactaagctgctttttctctctgtctaccgtgatcgtcacatttccgcttaccgtatattttactgcgttcgacaaaagctgctcaataataaacacaagccatttttcatctgtgagaacgcagatatccgttccttcgtatatgaccctaagtttccttctgatcaactgtcccgcatactttcggatcgcttttcggatcatatcatccagaggatattctttgatcacaagatcggacgcaccttctcctaaacgcacgtaacaaagcgccatttccacatactgttctacccggaacaattctcctgtaagctctctgttgatcggagtatcttcctgttgaagcaaaacccgcatcactgcgatcggagctttgatctgatgtacccatgtcgcataataatcattcatatcttttctggctgcctgccattcttccctctgctttctgtactcttcttcggatctaagcaatatcttctgatattctctttccgtcatacagtccggttttggcagactttccgatacgataccgccggtctcactgatctgaaaaagacgtttgtactttttctcccgtctcagataccctaaaacgaaaaacagaatcccaaacaccgcgcttaaaagcacgggatataccgccgctttaagctccacttcgtacaacgcaaaacagagtacgaaagcgcccccgctcaaaataaaccaaatccacatataacggcagtcatacagatagcctaaaaatcgtttcattcgctcacctgccgttcctgtctgataatataaccttctccgacttttgtggaaataaaatccgtaagtcccgctttgtccagttttctgcgcagtctggcgatattgaccgtcaacgtattttcttcaatataattatccgtctcccacagccgggtcatcaaagtatctctgcttacgagacggcctttattttccatcagtgtctgaagaatacgaaattcatttttcgtaagatcgatcttctccccattataagtaagcgacgcgtcattcaagttcagtattgctccctgatgctcaagaaccggtacttttccggacaggtcgtatgttctgcgaagtaccgcctggaccttcgccgtcagcacactgagatcgaacggcttcggaacaaaatcatctcctcccatattcacagccatgataatgttcatattatcagccgccgaagaaataaaaattaccggtacgttcgatattttcctaatctcgctgcaccagtggtacccgttgtaaaatggcagagtaatgtccataagaacaagatgcgggtcaaattccgcaaaagtttcaagtacgtttttaaaatcctgaacgtactgcgcgtcgtttccccacatcttcatctctttttggattgcctgcgccattgtcaaatcgtcttcaataatcagtattttatacatgccgccgctccctttattcgtcttttttcagtcaaggatcttcatcatcagatctccgtctccgcttgtcgtaaatcctgttttctcataaaatcccgccatcagttccttgtactgcgccggacctgtataaccaagcggagcaagatcataacctgtcggagcatagattaaagtaatcccttttttgccaagctctgtcacgatctcattcatacatgccgttccatagcctttcccacgcagtccgaaatctgtcaggtaaaattcaatgactcttactttcgtcctgttttccatcacgtattccatatgaaatacggacaatcctttctcgtacacgtcgaccgttttcggcatatatttaaactccaatatatgtccgctcttatctgtaagatcgactgccctgaaatattcttttctcaaatacactactaattcttccatttactctctctttcttcgtgccacctgaagctgcacattcactccgagaggattcagcacaacgccttttacatcttccatcagcaattctgcgatcttttcccccggaacaactgccgatctgaccggtcttcctttcgtgaacttctgaaattccagcacatccgtaaaaacaggctgatacagcgaaccgtctttttgcttcagtatcggaatctgaccgttctcttcaacaggaatcaaaaacgttccctttccgtaatgagccaaaagttcttcctgaagttcttttaattcttccgtcatctgcggctgctcctgttttctaagttcctgcataaaataagccgccgtcagatggagcgccgggttttccacgatctgctttccttccggaagttccttcggtatatttctcgttaccagatctgaaagctgaactgtaatttccatatctgttccgctgttgaccgccagtgcgtttactcccattatataaagacttgtgaaaaaaggaagcagctgctctttcgcaagctttgccacagcgcttacatatttttcatcaagaagcttacgcgccttgtcttttgcatcttccatctgataataaaggaagatctcatcgtcaaatgtctcctcgtcacattttacaaacggcatctttgtcgctgccgacataataacatataattcacccggattgcgcagagccgccaatgtctcctgttttgtcacttttgtttctttctcgctcattttcagcttttcctttcctgtcttctctcacctttgtctgtcctgatgcattttgagtgtctgtcaataataatacactatctctttgattttatcaattctaacaaatatggaacaaaaataatgcatccgatgatcgctgcggcgatcgccgatacaagaaccgcccctgccgctgtatctttcgcgatcttcgccaatggttttttctccttagtcacaagatctaccaccgcttccaacgccgtattcacaagctccagcgacaggatcagaccaaacaacagcaaacagatgcaccactcgacaggtttaatatgaagaaaagttccggcaacggttaccgcaatcactgccagacagtggatcttcatatttctttctttacggattccggtccggattccttcaaaagcatacccaaaacttttattcagaggattttttctgttgttttcgtttctgtttttttccattactttgtacctgattttattttctcgaaaaaatatgtttgataaatacgtatagtacgatcaaaaacgcaagaatatatccgatcgccccaagcgccggaatgccgagtattttcggactcatatctgtcgtacagataatacttgaactgatcagaagcgccatgacccacaaacccataacaatgtttcttacaagtctgcgcagcagaaaggcaagatcatccgatgcccgcagatcaagattcacctttgcctgtccttttaaatatcccgccatcatatcagacaccatcgacgggatatccaacgcctttcgcatcgatttcactgcgctttttccgctgcttttcaattcttttttccagtcaaaattacggaaaaaatctcccgaaatacgggcggcggcaatttccgccatattaatatcaggcgcgatcgctgccagaactccttccatatgggtcaggcctctcgccaaaagcgtcagcccgtgaggcattctgatcttattgactttcatcacatccatcagatcaaccgtaacttccccgacattgatcttgcccatatcttcatgaccgtacttcaacatcagtccttcgataccttcgtataattttctctgatccggacgctctttaaattctcccagaccgagcactgcctgccggatcaaaccgatatcgtttaaagcgatcccttcgattgccttgccaagcatctctctgtcacgctccgtaagccgccccatcattcccatatcgatccatacgatcttgccgtctcgtatctttacatttcccgaatgaggatctgcatgaaaaaatccgtcgtccatcacctgtttaatgtagttatcgacaagtttgctgccgatctccttaaggtcatatccctcttccttcagccgctccttatcgtctaccgcacatccatcgatgtattccataacaagtacatggacagtcgtatactgctgatataatttcggtgttccgacaaaatgaacgtctttgtttctccttgcgaattcttccatattagatgcttctgtaagaaagttcatctcgtctcttgtcacagtccacaattcgtctaaaacgagatcaaaatcagccatatttttcaaactgacaggcggcattaatttgatcgctttgcgaagaagctcgatatcccttgccatcttttcataaattcccctgcgctggacttttacgacaacttcttctccgctttttaacgtggcgcgatgcacctgcgcgatcgacgccgccccctgacaagattcatctatatgggagaaaactcttctccacgaccgcccgtaagattcttctatgaccgataaaacttcctcaaacggcatcggttttacatctgaacaaagctgcatcagctcatcgcaataacgcttcggtaaaatatcagaatgcatcgccatgatctgaccgagtttaataaatgtcggtccgagatcttctatgatttcccgaagctttaaaggcgtcactccctttgtaatactatgtttgcggagcacagccacaatttccttcagccttgaattatattccatcggttctatactgctcataattatgcttcatccggcgcagtttcgctcgcttcttcttttttcaggatctgctctttcaaagcggcaatctgctccggcgtcatcttatcaagaagatccgaaagttcctctgccgatgccggtttcagcgcattcaccttctcttttactgtctttttcacattgtgctttaactcttcattcagcacttttccctgctctactgtcagttctcccttttctaccatttcatcaagaagatcttttgacttttcggcagtaacggcaactgctccgatccctgccagaaagatctttttcaaattatcactgagtttatccataatcgccttcagctcctttcagccggcctacatttcgtacgcctctgtgctttgatactacgtttattgttctgccttactctatctttttattcttcttattattcttattattctgttgttttatcagactcgcccgaaccgtatttctctttatagcggtcgatgcattcttcgatgatctttactgcgccaagcgcgccttcaaactcgtccaccgccgttctcttaccttccagatctttgtatacggtaaagaaatgtttgatctcttcaaaaatatgttttggaagctcggaaatatccgtatacgcctcatatgtaggatctgcccacggaatcgctatgatcttctcatctcccgctcctccgtctgtcatcttcataacgccgatcggataacatcttacaagagtcaagggctcaagcggctctgaacacatcacgagcacatcgagcggatcgccgtcgtctccgagggttctcgggataaatccgtaattcatcggataatgcgttgacgtatacaagattcggtcaaggatgatataccctgtttctttatctaattcgtattttttcttgcttccttttgaaatctcgatcaccgagataaaatctgtcggaaaaatcctttcctcactgatatcatgccatatacttcccatactaacctcctcactattcccgcatatcagacgcgccgtgttcttacagatcctgtccggctatttgctctgcggaaacgtcctgtttaaattcataatatgattttacctctttccgttgattccgtccagtattatatctccgtcttgatagcgaatctgaaacaattcttctttttcccctatctcttcccttcttaaataaacatgaaagcgaaccaaatcaatatcttctcctaaatctaccgaaaacttcgttgtgcgaaatgagttttcttcgtatttttgaacaactttttccgcaaatgcttctgtatctttgattgcatcacaattcgccgcaacggtcagatcatacacattattttcacatcggctcgccacaacatccggttcgttcccctcctgcatctgcgcgtgacgcatcacccatatcacaatacacaaaactgccgccgcgcaaaaaatcaacgccggaatttttcctgccgtacccctgcatcttctctgatctctttttcgcttcactttgcatcacctgtctttttcgtcaatatttgtatcacttttacaaccgattatataatctgtttttgccggaatcaagaaaatcggttgaaaatatgagacatttttataacagatgattttcacatataaaaaagacaccccacttcctgtgagatgtcttctcttctattctattccatttctctgtactgctgtgcgatattcaatgcgtgatcgcccattctttcaaaatctgtcagtatttcagaaaagacgataccgctttgcggcttacattttccttttttcagacgctgcatctgctttttaaaatacttatcccgcatatcgtccgttttctgctctatgataactgcctgacttagtatccgttctacattttcggaagttacttctttcagattatcaagcgccgcaatacactgcgctttcatctcattgagttcttctttaaccgtatccgaaaaatcaatctcccattttctcatatcgtcgccatattccgcaagattgacagcatgatctccgatccgttccagattgcttataatcgcataatatccgttgatctttctcgaatctgacatattcatctcgcttgccataagtgaaacgatatattcggatatgcctttattgaggaaatcaatatattcttctctctcagacacttttttgcgaagtttctcatcatattgaacaagcgagtcaaacgagtcgcttatatttttcgccaccatatctctcattctgttaacttcatcacgaacctgtgacactgccaccgcgctgtgtccgatcgcataggaagattcaaacggacggatatatttcaggcgaaggtcttcatcgtctgcctttttgctgtccggaagaatgcgaaccgctatattcgccatatgtgttccaaacggaagaagcagcagtgtcgtcacgatattaaagactgtatgggcatttgcgatctgcgccaccggatctccgggcgtcatcgcttcgatccatgtcacatacggcgtcacaagacagatcaccgtaaataataccgtgccgattatattaaataacagatggataaccgtcgtacgctttgcatttaccttcattccgatcgatgccaaaactgccgtgatacatgttccgatgttttgtccgaacaaaacgaacaccgcgcttgagagcgggatcataccggtagacgcaagcgcctgcaaaataccgaccgatgcagaagatgactggatcactgccgtaaaaagcgcgcctaccaaaataccgagaagcggattgtcgaacttcgtcatcagactgataaacgcttccgactctttcaaaggcgacattgccgcccccatcatatccattcccataaaaagaataccaagtccggcaaaaatactgctgatatgatgtaccttttcacttttgataaacatgatcgctcctacgcctgcgatcgcaaaaagcggagcgatcgctccgatatcaagagcaatgagctgacctgtaatcgtcgttccgatattggctcccatgatcacccataccgcctgttttaatgtcatcaatcctgaatttacaaaccctactaccatgaccgtcgttgcagaagacgactgaatgaccgctgtgatggctgctccgaaaagcacaccttttacacggttcgatgtcagtttttcaaggatcgacttcatccggttgccggctgctgcttccaatcccgtgctcatcatctgcattccgtataaaaacaatgcaagaccgccgagcaaagcaagtacgtctgttattcccattccatttttctccttttgtaaatcgtcttattttttctatattctgtttttctttatacacacgtctgcttcgacgcgcttttttaaattaacatccgccaaccggtatgtcaattccattttaccctttccctacattttcttaacactttcttaacgctgccttaacagaccgctcattgccgataatataaagctgcgcggtgaggacgatccggaatcgcttcaacgcacagccttgacaaaatgctttttaggtttttattccacacttttcagtgattcgaccatattgatctttttaagtttaaaatacatcgctccgtttacgatcatagagaacgcaaccgtcaaaagaaaactgtatacaaaactgctcatatcgatatttctgccaaacataaccgtatctatctcgacagtgacaatgataaagcgatgaagtatctttccgagagcgacgccgaaaagagcgcctaaaaccgtaagtacgatattttcccgatatacatacgccgaaacttcattcggataaaatcctaaaactttcagcgttgccagttctctctttcgctctgtaatattaatgttgttcagattatacaaaacgacaaatgccagcattcctgccgatattgtcagaacaacgatcacaatgtcaagcgctcccaacatatcgtctacctgttgtttcaaatcagtcgtatagctcacactcaacgctcccggaagctgaagaatatcttcgccgacactttgcgcttcttttgtcgttcctgaaaccgtcttatagaaaacggcattgtactccggtttttcgttataaacagcctcatacgcatctgccgtcatgtacaggtaatgtcccatataattttcgcagacagctttgatcttgaccttgagatctcctttctcttcatcacggatcgtaatcatgtctcctgcctgtacttccagttccttcgcgattttttctgtcaaaacaacttctttttcatccagagaatatcttctatccgtcgtcctttctttcaaagtcacaaactccgggaattgctttttatctttcggcacatccagatagacatcgtgccatttacttccgtttccgattgtaatctgagtcagtatgccttccatcgcatcgtctacttctgtttcttttccaagcatctgcgcgacttcacctttttctttttccgaagcgccttccgccataatgaccgttccgtcatatcgctgaatctcgccgtactgaatatcgacaaccgcaaagatcgaatctttcaaaccgaaccctacgatcatcagtcccatacatcctccgatgccgaaaatcgtcataaaaaaccgtttcttatatctgacaagattacgcacgcttgctttccaggaaaaattcagccgcttccacaaaaatgtaatcttctcaaaaacgactctctgaccctgcttcggcgtcggcggacgcatcagttgggccgcctgttcgcgcagttccttataacatgccagtatcgtcgccgccaatgtacaaaacagcgccgttcccgccgctcctatcccgtacatcacattatacggtatgagcagttcattcatgtgtttatacattatcccgtatgcattgatgataatatacggaaatatcttctccccggtaaaaataccggccgcgcttccaagaagggtcgccagaaacgcatatcccaaatatttccctgctatcgaatgtctcgcgtatccaagcgcttttaatgttccgatctgagtcctctgctcttctaccatacgggtcatcgtcgtaagactgatcagtgccgccactaggaaaaatatcaccgggaacacttcgccgatcgctttcattcggtccgcattatcaccgtatcccgaataatccggaaggtcatttcggtcataaatgtaccatttcggcttttccagttctgcaacttccgctttcgcatcagccagctctgcctgcgcttccgctatcttttgctcgccttcggcgatctcggcgtttgcctctgcttcacctgcataatactcttcccatccggaagcaatctcctgctcgccggatatgatcccggcttccgcgcctgcgatctgctgccttgccgcctcaagctgtgcatacccgttatcaatctgcccttgcgcatattgaagctgagctctcgtctgatcgatctgcgcctgtgcctcgaccacagctgcgtctccgatctggatctgcatgctcatctgctccaacgccgcaagcgtttcttcgtctgtcattccgctttctttcaaagcctcatactgcgctttcaccgcatttaattgttcaatctgctgattcaactgcacaattccctgatcaagcgccgctgttccgttctgaacttctgtctgcttctgtgccaaggtctgctctgttgcggcaacctccgctttggagttctccaactgcactttcccactatcgatctgtgcctgcgcgttttccagtttctgccttgcatccgccagctttgccgccgcttccgctttcccgttttccagcttcgtctgtgcatctgttacttcggcttccgcctccgcaattttcccgttcgcctcatcgacaatttccgtataccgggctttttgtctctgctccttgatcttctcaatattttcttttgctttcgcgaccgtatcttcatattccgaagtaaatgccgtcaattcttttgctcctgccgcctgaatacaaatctctgtatagacgtccattgcaaagctttcttcctgtacatatacaaacgcccgcacacttccgtttccgattgtcgtactgccccgctgaaaagcaatatactccggactgctcactgtacctgtgatccgaaacgtatccgttttcaaagaatctgtaacctcggcatccgtaccgcttgaaaacgtgatcgtatctccgatcttcagtttgcttttttccatgtaatccacatcaacgacacattcattttccttattcggaagcctgccgtcctcaagctgtatctcattcatcgtcggaagcatagacatgacatgaacaacgatttgattatcaccgtctgccaaaagagcgtccacagaataccggccttccacatgcccgatcccttctgcttttgaagccgcctttacgtcatcttccgtcaatcccatcgtactgatgatcctaagatccatcatattcttattatcaaaatacgcgtctcccgaataacgcatatccggctccgaggcacgtattcccgaaaagaaggcacatccgatcgcaacgatgaaaaagatggaaaggaaacgcccgaggctgcgtctgatctccatataaaaatcttttctcagcgcacgttttttcattcacaccgcctgccatttccatttcttatttttatccgaactaccactcgatctcatcgatcgacatcgggttttcatttgtttccatatgagacacctgcccgttcttaatatgaatcaatctgtctgccataggtgcaagagcctgattatgggtaatcacgatcactgtcatcccccgttcccggcacatgttttgtaaaagcttcaaaattgcctttcccgtattataatcaagcgctcctgtcggctcgtcgcaaaggagcaacttcgggttcttcgcaagagcgcgggcaatcgaaacacgctgctgctcgcctccggaaagctgcgccggaaaattatccaatctgtcgccaagccctacatcttccaataccttttttgcatcaagaggatctttacatatctgaagcgcaagctctacattttcaagcgcggtcagattcgggatcagattgtaaaactgaaatacgaatccgatatcatccctgcggtatccggtcaactgtcgggaatcatacgccgtaatatcttttccgtccactgtcagcgttccgcctgtcgcggtatccatgccgcctaaaatattaagcaccgtcgtttttcccgcgccgcttggtccgacaattacaacaaactctccttttttgatagagaaattaatattgtctgctgcccggatctccacttctcccatatgataaactttcgtgatatcctttaatttgacaaattcctccatcctgtcacctctttcatcccatatgttttcctcattcgattttcatcgcacgctatttaattttgccgaatatctaaataatacaagcccaactaaaaacatcacggaaagtgcgctgacagcaatattgatgctccccgtcatctgactgataaaagatacgagcgccgttccgataaccgatgcgcctttgccgcaaatgtcataaatgccgaaatattctcccgacttctccgccggtatgatcttcgcaaaatatgatcttgaaagcgcctgtatcgttccctggaacattcccacaagaactgcgagcatccagaaatcaaactgagtatccagccaatatgcatacactgcaattccaaaatatgccatgatacagacagtaatgatcttctccggagaaactttctttacgatccttccgaaaataagtacagacggaaacgcaacgatctgtgtcacaagaagggcgagcaaaagtcccgtgctgtccaatccaagagcctgtccgtacgctgtcgccatatcaataacggtatacacaccgtcaatataaaagaaaaacgcaagtaaaaatacaaaaatatgcttttccttaaccaactccgcaaaagttttcccaagccgcttaaaactgtcttttacaacatgtccgtttacttcggcaaaatatttctgtctgtaagagcgaagaagcggtacagacgataacagccaccaaagcgcagtaataataaacgcaatgatcatcgcagtctgcattccgatccccaacggttttgctccgagcacaacgccgagacatgccacaaacggaatacagcttccgatatatccccacgcatagccgtgagacgaaactgcgtccatccgttccgggtcggtcacatcagtaagcatcgcgtcataaaaaatcagacttgccgaatatccggtctttgccagtacaaaaatacctaaaaaccaaatccacgatgacagaaaccctaacaaaatacatccgaaaacacctactcccatcgcaacaaaaaacactgttttcttaaaatttttcgtatccgcaatcgctccgagcgtcggccctaaaaccgccacaagaagcgtgcacacagaagttgcatatccccagtacgccagataatctacgtccgatataccggcgtttcccgcaagataattaaaataaatcggaaatatggtcgataccatcattgtaaacgccgaatttcccacatcataaagaacccactttttttccaaagaagtcagtttaaatttcatcgccttgtctccctttccctcattctgccatcgccagccccgaaccgcatgacggctgtaccgcatcctttccacatctgcccggtcttcggctcatgttttgctttagcttatcgcctgtttataaaggcagatctttccatccctcacctgcgccgaacgttcttgtaaaacgttccggaatttcgtctccctcaaacaaaactttctggtaacggatgatcagtcccgccgccagcggaactgccccggcaaacagcctttttaaaagacggcagtactctttacacgccggattcggttcaagactcataaccatcccatgcagagaatcatactgccctgatagccgcattccgccgaaaaggatcttcctttttaccgcgccgggcgccagcaaaagcttatgatacataatcatccctttcaaagctttttgtaccgtctctgctgtcagatcttcaaaaaacggcgctatgaccgccccgttctccttcgtcggacggatatgctttgtggcaagataacgcacaggattaatataatcttcctttaagagaagccggtcaaactccatctcgatctccgaatggctgattccgctttcatggatcatcttctcaacatacggatggcactcactgtctaaagcaaaatgacagatgacaccgtaaatatatgctcttgccgctgccggatcttccgcttttttcacagtttccgcagcgtggcggaaaaacagatccgccggcttatcatgaaggtcatatccctgaccgttcactgtatttctcttcatcggatgataataaaaaagaatatcaggaccatgaagtccgatatcaaataattctctgtgattctcaactgtgctgcgaagcggcctcggaagcgcgctgatcacttcttttccaaatttgtaatgtgcatatgtcgtaggcataaatcttcctcttttcacgtactttttcttttaattttattatcacatattcaagacaaaaaatccagaattacactccgtttgatatgttaaatttttgcaaacttctcgttcgatatccgatattttgtatcacttttacaaccccgcgcagatcttttcccttgtaaaatcaataaaaagtgcagaaaatgagacattttcaagcgcaccgttctcagaaaggaatatacttatgccgaaaccaagaacatctaccggagaaaaaaatctgatcagtaaaagactcatcaaacttcgagagaagcataatatgtcgcagcggcttttagcttatcagcttcaattaaacggctatgatatggataaaaacgtcattacaagaatcgaaacaaataaacgctatgtcacagatgtggagctaaaagcactctctgagattttccacgtttcatacgattatctcatcgacggaaaagaagacgagatataatattcgatacttccgccttgcttcccgcggagaatcttataaatccattgccgaaatatgcggcattaccgctgaaaatgcaaaagagattctggagtaggcatccgcctgttccaactcattattgtgccgcgccgactcatcttttgcttgcccggcttcgtattttcatcaccgcttttactgcccatacggcacaccgtctcggaaacagcggactgcaccataactttacgtattgtttatattttttatttttttcacaatctatatactgattccctctgtaaaatccggtcagcgcagccagaatctgctccggctgcacgccatattctttccgatactgattatctccgcaaagaacgtaactattatgatccgaattttccatcactctgtgcaatacataagcgccgttctctcttcgatacaagattacttgatgacgacaaacctcttcttttacaggttctaagatcaatacgtcctttttcgggcggatacatggcagcatgctgtttccctcagccgtaagaaccagcttcccctgctctttcaggatttcttctaatccacggcttttcaaattcttatcttccctgccttcttcctttttaccctcttgtttactttcctgtttatcttcttttttactatcctcacatttttctgttttaaattcactcatttgtttcttccaatatttccgcatttcgcagttgttgtaaaaagcggtccaaatcatcggccgcaacgctttcatcaacttcgtatttttctgccattgcctgtaaaacctgttccttcgtcgtttcctttcggcactgttcccacaaaaatgcgcctgtatcatttaaccggatcatcccgtgaaatacttttcccgcttcaccgaccggaactacgacatgatctcctgccaccttgcgaagcaaaaaaccttcttttatttttatcttcatttttcttctcctttcatacaaaaatatgctaggtgtttgcgaaacgccacaagccgcataaatacggcattttaacttttataaaacaaaacatctcctcaacggattgtggtaaaatagagttgcctaga

SEQ ID NO: 7731 - DNA, 560 bp, Unknown
  gut microbiota DNA sequence
attatggaacaaaaaatgttttgctatcagtgtcaggaaaccgccgggtgcaagggctgcaccatgtccggcgtatgcggaaagaaacctgatgtagcggccatgcaggatctgttggtctatgtcacaaaaggaatttcggctattacgactgcattgcgtcaggaaggtaagcaggtatctgccaaaatcaatcacttgattactctgaatctgttcactaccattaccaacgcaaattttgataaagagagcattgaatcaagaatccgtgctacactgaccgaaaaggaagttctgctaaagcaagttaccaatctgactgttctgcctgaagccgcaaaatggaacggatctgaaaactgggaagaaaaagccagaactgtcggtgttctttctaccgaaaacgaggatattcgctctctgcgcgagttaatcacctacggtttgaagggactttccgcttactcgaagcacgcaaatgtgctgttgaaggacaacgatgaagttgacgcatttcttcagaaagcactggctgccacgctgaatgacaaccttag

SEQ ID NO: 7732 - DNA, 830 bp, Unknown
  gut microbiota DNA sequence
gaatgaaaggagaaggaaagatgaataacacaatcctgaaatccttatctgtagagaattttacttcgtttgcagataggattacatttacaacagagacagacattagtaaaaaagaatttcttaataacacatttgaaagtagagacatgatgtttaataaagtgtcttttctgtatggtgcaaatggttcgggaaagactttcttctgtaaaatcataagagagattcaaagattattagactggtcaccattgttggcaatgaacaattctcaattactctctttaccacaatttaaagaaattgatgctccggtaaagcaatttatgtttgatgtggcttatcaagagcgtccatcgaagtttgcaatagagattgttcttgatgaaactacatattattatgagttttcggtacgagaaaaaaagattgaatcagagttgctcacaaaaaaatatcgtagaacagaaaaattacttgaaagaacatcttccttgtataaagatattgttttacgctctgaattaaaagattttgaaaataagaagcaggcagttaaagaagaggctctatgtcttccagtagccgcattattgaacaacagtttggcgtctaaaattgttgacgctatacaaggaatacaagttgttagtatgactgcagcgagattaaagcctacgaaatcgaaagaatcattttcagaggagcgattaagaaaatatattaatattctccagaaagcagatcctacgttaagagatataaaggtttcttttgaagaagaagagattgaccgtcaaaaaattgagacggatgattttgaaaat

SEQ ID NO: 7733 - DNA, 678 bp, Unknown
  gut microbiota DNA sequence
aacgacggtaggggtagatacggcacatgctgtttatgagaatggaaaggagacaagtagtacacctatgactttctttgcagaagaatcattaggtactgtaaaacttttcacggcattaccatatctgtatgatattttggaatcaggaggggtgcttgttattgatgagattgaaaatggattgcatctttctctggctaaggagataattgggctttttactaatgaggagagtaatccaaatcatgcacaacttatatgtacatcgcatcagccacttctagtttccggtgaatatagacgagaccaggtttggattacgagtaaagatttatatggaaaaagttcattacatagaatgagtgatttgaagacatcacgtgcaaaagttaatttaactaatcgaattattgaaggggcatttggatgtaacccagaaatgttttttgaaaaataacacataaaatatgaaaaagaaaaacaccgagttgcagcccggtgttctgcaggacgacaaaagcagcagccgtcgctacaatattaataaccgtaaccattgtatcacgcttaattgctgtttgcaatatgaaatttgtgtccagaaaggcaaaaaaatgcagactttttctaaaaatgtgattgaatatagtaactgtaaattaaatttttagaaag

SEQ ID NO: 7734 - DNA, 7101 bp, Unknown
  gut microbiota DNA sequence
atcatatttacagacttttcttcatagtctcgaaattgcagatgatcttgaagatacggaggaaaatatctcccatctgattgaacagtttcatcttggaaggaaagaatcttaattaaatttggagcctaaaccttttaaattgcaaaagtttaggctcttgtttcatgacagtcctaattttccaaagagatcctgccgttttcttacttcgtttccctcgactttcataccggagagaacttctcctgctcttccttttctgcaaaagcaggtccgaaaaatacgctgaatccatgccgcaggaagaaaaaccgggtatttctccagatacggatactgcattttcatcgctttatacggcagaaatatcgcttccatccatactttgatctgacctttccaaacacgtttgtccacttctgccacatgctgtatattataatttgtaatcgttccgtatattccgctttgcatcagcaattccgtaagttgtgcataaaactctgtttctgccttctcctcaaaccaaacggaaacaagatcacacatacaccgttcaaactgagccagctttattttctccagttctttccgaacgtaatcccaatccagactttccttcatccgatccgaaaaaagccacatatctacgatagagcggattccgcatccgccgccctgaaaatgtttcgccatatgagcgatcataaagatataaaaatcttcccatgacagccgataaatatgagatttaccctcttcctgacgcgcccgtttccagatatcctcataatatgcatccaacagtgaatcttcaccgatcatgcaatgatgcatctcgatattcataaacggctttctaaaaaacacatcatgatgactatccctgtgatcgcaataatatccgagatccgtcagaaccgcttctacttcttttccttttcccgtctcatacaaaatatccagatccgccatcatccgcatacttgtaaccggataaaaccttttcatcaaaatgccttttaacggcaaaacagatatcccttccttttcaaaagcctccagcaattcttcctgtgaaaatgcctgcaccgcatctcttgcaatctccatggactctgcttcctgaaactttttcaatatttcttccggaggctgctgttcttttggaagcttctgtattccggggcataccatagactgaatcttatgaaatttgcatattctgtaaaatttcccccagtctgtctccactcttagttcaggcgctttcccctttcccaaactgaattttatcatttctaataactgacgccattccctcttaatcatcatttgatacctctttaaattttttgttttctatctccacaactctgtcacagcatgccactcccgccgctgtatgcgaaatacagataattgtctttgtattcattttctttagattctggagaactttccactccgtatccttatccagggatgacgtacactcgtctaacaacaaaatcggcgcatcgtttaatattgctcgggcaatcgcaatcctttgaacctgcccttccgataatccttctccccgctctgtcaaaaccgtctccaagccttgcggaagtgtctcaatataatcccatatacacgcaatttccgctgcttttcgtatctcttcttctccgatatcatgattacaaaaggtaatgttctcccgaattgttcccgacatgatcatattcccctgcggaacataagaaaaaacgtttctcgttcccgcatcaatctcaatctttccatttaccgtctcaaaataaagctttccactctcacacggcatcaaatgcagcattaacttcatcatcgtgctttttccgattcccgattcccctacaatggcaatcagatctcctttattaacacgcagagaaacatcgtctaatataatatctccgttttgatacgcaaacgtcacatgctccgccactatcgcgcgaaaatctttctgaaactccgacacatcttcaatccgaatcttctgactttcctcttccatatcctctatctccatcagccgctctgccgacgcctgcatgctgtaatactgtggaatcaaccccgacacattacgaaacggcgcccggatctgctgaataatctgcaaaaaagccgtcaatgttccgaatgtcatcacaccgaatgaaatctgaaacgctccccatacaagcgccgcataataccccgctgtaaacaaaacatatacaagtgtatttgccaaattgctgatcgcattacgtttaatccgaatacggtaattatctttttgaaattgattcagtttgccgcataccgcatgctcatttgcaaatgattttatgacgatcagattctcaatacattcctgcatataagaacgcactacgccattcgtcctctgcacttccttatgcagatatttaaaatgcctgctgtaaatacggctgaaaatgcaaacaagaagcccgatgcccagcaccgcagccgtaaaacgggcgtcgatagaaaacagtaccgcaagtcctgccacgatcttcgtgatcatggaaatcgcctgcgggatcagtccgacaaccgctcctaccacaatgtcaatatcacttgtcagcctgtttaatatctctcccgaatgaatctttgaaacatgctgatactgctttttaagtaccgccgcaaaaattccctggcgaatctgcatttcaatcttcgttgtcgcatgtatccggacgttactgctcaaaatattcaaaactgcctgcagcaagatcagacatacaatcaaaaaaatctgaactcctaaccttccctcttttacccctgtcgcaacatctaataaactgctggaaacaagagccagaagaataaaactccccgcaatcgctccgctgataagcgccaacagtattacaagccaaagcgactttttactatattgataaatccagcagaccgccgactttcctttcttactttccattttcactctcattcttatttttctcattgcacttttcttatcactttttgcctcttctacttcattctaccttttctattttaacatcatccggctgttttatcatcaataatatttttaaaaaagtttcattattaactctaaaaaagcagtgtcaaaataaagaaaaacttttttgacactgccttttttatcttttcataaaagaaccctttttattatcttatttgtttgtaaggcgtacttcctcagagtaaacccattttgtttgctgtgtttccttatcagttacttttgcataaatgactccgcgaattgtctttcctgccggaataccatttacgttcactgcaaactgatatgtagaactaattaccggagcaacgattttcttcgtacccggagtcgggccagtctctgtgcaaagattttctaaatcaggttttccataccataacaacccggtctcattcaaaatataattatccggaattgacagcttcgctatgtattttacatttgcctttccgtcagctcgttttataatcattgtatcagcaactgctgcgtataatggtttttcgattgtctgctcctgcggtgcgtatgtcgctgtaaatgccatattgccacttatcgcaaatgtatatacttcatcatatgaaacaatcttatcctttaactgccagcctgcaaacttctgtccaacctgtgacgcatctgctgtaatcgttacgatctgattataaacaccttctgcaacttttttcccatcaacagtaactgtgtacactttttctttttccagtgctatcattccgtcaatcaatgcaatgaccgcctcgcttacttcatgttccgtagccgtagcatcgtcttttactccagtagcttctgttactatttgccggaatatatcccatccatcttttgtataatcagacgaattcaacttgcctgcttcctcaagccaatatgtcagctctgttttatctatagcagacggtacatgttgctgtttttgttctgtcatctttacaagttgctgtaattaccgcctgtcccggagctactgctgttacgtttccgcttgcatcaacagttgctatattatcattattgctactccattcaacagctttgtacgttgcatcttcaggtgtaacggttgctgttaattgctgtgcttcgtctccggctttcaaatccaatgttgaagcgctcattgtaacatttgttattgctttatgccaaatttgaacttctcgaacagatactgaatttaaccccgctctgctattcatacttgtaaaaaagaacatcacataacgtcctacttctgttttaccttcaaaatgatctttaggatatgccgaatcagtttcctgatgtgttttctcatacaaaactttccatccctcaggcactctatctttggccaaaagactttctgtcgtaatcgtagaattatcggttgttaaaattttatagtttgtagcatatgccatattatgaaaacgaatatctataccgctaaaacttcttggcccattttctcctaaatcaaaaattaaatatgccgcatttcctctcgcacccgacccttttagcgcttcttttgaaaaccatctgtaattatcattctgggtatcatcaccacgaccatcgttaacagaactaacaggaaagtccccttctgttcctgaatacgctgaaatttgtaaatttcgagctatattcatttctcctgctgcctgtacaacagttccaccgccaaatgacacgcaggaaatcaacatcgctgccgataatgccgctgataaaaatttctttaatctcatcactttactccttttttcaattctttcggttattaaaatttttatactctttggtttacacaaaagtcttcttaaatccccttcctccttcctcattatttttacatttttatgcaaactctacagaacaatccatatttacgcttaaatgtagtgctattttacctgttttttcatttttcgccaacaagcagtcagataatatactttataacccataatttttcagttttttaagttatttttcacaattttaatctgtttcccccaaattttcatttactctattgtaaaaaagatacaaaaatgaagtttttaactcgtcatttgttcctctctaattctactgttaaatttttttaatatgttttcccaccgcttatatgctatacttacttaagcttttattaaaaaaccactactaaaacatttttaagaaaaggaacaaaaactatgaattattaccgcttttcagatcttactatctccatgacatgccgctatgacatcatgaaacgacgtgcagaaaagtatctgattcctaaagcaaaggaaaacgaactttccgaaactaccactcccgaaattcgattaaatcctaaaaacgaactgatacaaaaataccaagagaaatatccacatctaacccttgacgaagcagaactgatccttttatcatcccatttttcccttgaattaattaaacatcaagggtttgttctccacgcttccgcaatctcctacaacgataaagcagtccttttttccgcagattccggcgtcggcaagtcaacgcatacccgcctgtggcagaatcatttcgggaaaaataatgtacatattattaatgatgacaagcctgctcttcgcctctttggaaattcatttaccgtatacggaacgccatttagcggaaacagcgatgaaaatgaaaacataaaagcgcctcttcatgccgttgtatttcttgaacaatgtgagcacaatgccatgaaaaaactaacagccaaagaggcgcttccttattttctttataacctgccgcaatacagcaaacacgcagaacgcatgaacactctgctttctcttcttgatatacttttaaaaacaactcctgtttatcttttatcctgcactcccgataaaagcgcggcaattcttgccgaacagactttattcggctccactacatagtttcaactaaacccagaccaattttcggtattccaattagggaagttctcagattgcccccttctctgcgaatttaattaagattctttccttccaagatgaaactcttcaatcagatgagcaatgttttcttccgtatcttcaagatcatctgcaatttcggaaattgtttttcctttttcaagctttttctgaattaaggcacaagttttttgaagagtcccttgttttcttccctcttcttctccctgctttcttccttcttctcttgcctcttctctctgcacttcgatatctgtctcatagtcgtattcgtctaatagcatattgacaacctcgcttccttttcgcattaaataatcagcaagaatccctttttcaatgcactcttttatcgcttttttataaggctcttcctccccggagatctggcagttctgcacgatttccatgaactggctgtattctttcagtacctgacacttttctaagatttcatgatgctcttccggccggatattgatgacctttacttttaattccagactcggctcaccgtcttttacgatataggcatctgacaggcgcagttctttttccttttcccacttttcttttccgttatagaatgtgtaaaattccggtgtcggaaggaaaacgattttcttcttataacggcttctcggcggtacaagcctttcataagcgcgtccgatatacagcagactccgaaggggcatgttttcgttgaccgtaaactgatgctcgccgaatacgatcacttttcctcctgcgtcaaaagaaatatcattttgaaaattcatgtagatcgtattgtctacacggaatctccgaatcttcgttccttccggcagcggctcatcatggattgcattaaaaagtgcgatctcattcgcttctgctgattcgtcctcatagaacagatctacaaagacactgtttttaatttctctgttttcttttcctgccataagctctcctttcatgtgcatgaataagtcctgtagtacaggcgggaaaatacttttaagcttg

SEQ ID NO: 7735 - DNA, 224 bp, Unknown
  gut microbiota DNA sequence
tttttcttttttaagaccttctcttaaaaatcagtatacgaaaaaaagaactgttcttcaagactatccacgcaaaaactgttgttgtattgtatcgggtaattttgagggaattcctcagaccggcgaaactgccggtatctttcacagaaagaatttctgtaaatagatttatcacaacatcgtttacatttttaactaagttcagactaacttccggtatt

SEQ ID NO: 7736 - DNA, 532 bp, Unknown
  gut microbiota DNA sequence
gccggcgaaactgccggtatctttcacagaaagaatttctgtaaatagatttatcacaacatcgtttacatttttaactaagttcagactaacttccggtattccaattaggggagttctcagatcgcctccccttctctgctaatttaattaagattctttccttccaagatgaaactcttcaatcagatgaacaatgttttcttccgtatcttcaagatcatctgcaatttcggaaattgttttccctttttcaagctttttctgaattaaggcgcaagttttttgaagagtcccttgttttcttccttcttctcttgcctcttccctttgcacttcgatatctgtctcatagtcgtattcgtctaataacatattgacaacctcgcttccttttcgcattaaataatcagcaagaattcctttttcgatgcactcttttatcgcttttttataaggctcttcctccccggagatctggtagttctgcacgatttccatgaactggctgtattctttcagtacctgacac

SEQ ID NO: 7737 - DNA, 421 bp, Unknown
  gut microbiota DNA sequence
ccttccgtgttgattcccagaatcacgtaagcagcaagctttcggatcacgccattatcccttacagaataatggattgcatcaatgtagagaatgggatagacctcgtccagtggccggttctgccagtcttcgatctgtggcaggatcttatcagtcacatcagaaataaagctttcagaagtttcaaagccataaatatcttcgatggtttcggaaatctgccgggtagtcattcctttggcatacatggaaatgatcttctgatcaatatcggaaatatctttctgacgttttttcacaacctgtggttcaaacgttgatttgcgatcctgtggcacttcgatttccatcgagccataccggctgttgacctgtttccgcttataaccattgcgataatcatcattatctgagcgtt

SEQ ID NO: 7738 - DNA, 299 bp, Unknown
  gut microbiota DNA sequence
agtattttcccgcctgtactgcaggacttattcatgcacatgaaaggagagcctatggcaggaaaagaaaacagagaaattaaaaacagtgtctttgtagatttattctatgaggacgaatcagcagaagcgaacgagatcgcgctttttaatgcaatccatgatgagccgttgccggaaggaacgaagattcggaaattccgtgtagacaatacgatctatatgaattttcaaaacgatatttcttttgacgcaggaggaaaagtgatcgtattcggcgagcatcagtctacggtcaa

SEQ ID NO: 7739 - DNA, 345 bp, Unknown
  gut microbiota DNA sequence
gctgttactgtaaacttctcttctaccggagcttttgctttaaagttagctgtcagttctgtgttcttttctactgtaagttcatatgtagtttttgtagaaacttcttgaccggctactgtccagtttacaaactcatagccttcttttgctgtcgctatggcttttactttctctcccttaacatattctgctttgtcaggatcaattttcgcctctcccatcttagagtcgtttactctcgctgttactgtaaacttctcttctaccggagcttttgctttaaagttagctgtcagttctgtgttcttttctactgtaagttcatatgtagtttttgtagaa

SEQ ID NO: 7740 - DNA, 720 bp, Unknown
  gut microbiota DNA sequence
aaatccataccatgaccagaacttctggccgccttcgttccccaactagcttttcgcaatggtcacaagctgcccctttccaaaaagtccggcaaacaatcccccgccggaataatatcgaagcacatggggtacatactccggatcgccataccttggccatccatgggcggctgcctgttcctgggaaaactgcagtgcattggcttcactatagcccccatgttttcggattgcccatgtgatgtacccattcccgtaattatagccttgtaaactaagttttaacttgtccatatcctgtgggcttttacatccggcttcccggacacaatctgcataatactgtacgcctaccttgatggaatagtctgcatcctgaattgcaccaggcgtattaggatactgggtattatacggacactcgctggcctgcatgggatcggttcctctcccgccgctttcctgcatcatgattgcctggatgaccgatacatattccgggattccaaattcactggcataccgctggatcacttgggtatgggccaggacttccgcactcagcggctcgctgctctgggaactcccgataaacgaagcgccgccaatgattcctacaataaggatcaagatcacaaataccataccaccgcctgccatcaatgctgcaaaagctgcctttaccgcatgggcggcagcttccgccatagctttcag

SEQ ID NO: 7741 - DNA, 553 bp, Unknown
  gut microbiota DNA sequence
gttttctttttcagaggaaaaacttttggcgaaagtaaacctaaaagcagcaagcttaaaagtattttcccgcctgtactacaggacttattcatgcacatgaaaggagagcttatggcaggaaaagaaaacagagaaattaaaaacagtgtttttgtagatctgttctatgaggacgaatcagcagaagcgaatgagatcgcgctttttaatgcaatccatgatgagccgttgccggaaggaacgaagatccgcagattccgtgtagacaatacgatctacatgaattttcaaaatgatatttcttttgacgcaggaggaaaagtgatcgtattcggcgagcatcagtctacgatcaacgaaaacatgccccttcggagtctgctgtacatcggacgcgcttatgaaaggcttgtaccgccgagaagccgttataagaagaaaatcgtttcccttccgacaccggaattttacacattctataacggaaaagaaaagtgggaaaaggaaaaagaattgcgcctgtcagatgcctatatcgtaaaagatggtg

SEQ ID NO: 7742 - DNA, 632 bp, Unknown
  gut microbiota DNA sequence
accggacaatatagtgatggatggcttactatgacggtaggaggtatcccggtgcttgcagccggagatcccctgtcagtcatcaataacctgtccacctttatcttctccctgatccgggccatcggcttgatcttattgggatttggtgtggtgcaggtgggtttgagcttaaagagccatgatcccagccagagagccaacgggtttctgacgctggcaggcggtgtcatcatcacctttgcaaaagagatcctggacttgatcgttgggtagcaggaagagacagaagcgggcagggaggacatcttcctgcccccggtaaaggaggtgagactgtttgagtgataactggatcgtgcagaacctaaactccgcattatcaacatggaatgagaaactggcagaaatctggacgctccttacccaaagcccggaatcctttaagggcgggacgatctggagtgtcatcaccgggatcaacggggctctgactgccattgggtatggacttttggtactgtttttttcagccgggatcgtaaagacctgtggcagctttacagacatgaaaaagccggaacatgccctcaaagcctttatccggtttgcactggcacaaggcgccatca

SEQ ID NO: 7743 - DNA, 618 bp, Unknown
  gut microbiota DNA sequence
atgcggcttgtggcgtttcgcaaacacctatcaattttttattatgaaaggtgagctgatctccggttacatttccggcgcgaagggcatgcatatcatggtcatacccccagtaccgccagttattataagtatctacataatagttcccgttactttcatcgaagccgcaaaaaccgtacactgcctcctcggataaagcctgcgataaaagcgttccttccggcgataaaagatacagatcataatcgtcaccattgccattcgattcggcaagataaatccttccctttgaatctgcgccgatcgaacttgcgtgatctccatactgaagtttcttctcttcctgctgcgtaagcaaattatagatcgtaatattagaactgcggtccaatatatacagtctgtcatttgccacataaacatcttgcacattgtcaaactgatgtacttctgtcaactcattgctgtccggcttgtacaacgataatttgttccgattcagaaaataaattcctccctaataaatcaagtcttttttcctttaaaataaaggttttttaaagtttctatctcagatgaatgaacaagaatcatggatatttctctgtatctggt

SEQ ID NO: 7744 - DNA, 527 bp, Unknown
  gut microbiota DNA sequence
gaatgtcatggcaaaaacatgagccttatcatcacgcagttgcatttctgtccgtttccaactgccgacttcctcaagtgtcttattatgttttgaacagacttccttatccttatcataaaagcggtaggataatcccgatttaccagcaccgatataaacagtctttgcggtgtcgaaatcatcaaacttgctttcgtcaaagtggtagccctcactattagaaataaattcctctttttcgcatttcttctttatctgctctatggtaaagaatggcttttcgttcttatcatcaatggcaatatcaagtcttgtgaaatgaaagttatccagtccgtatcttcgctcacagcgtcgaaacatatccccaaaggtataattcctactgtcgagaatacggaaaatatcatcacaacctctgccagtcataacaagataacagcctagcccctgtgggttatcctctgtctttcttgcgtcccccgatacataaatatctccaatctgccagcgtgcttgataag

SEQ ID NO: 7745 - DNA, 48277 bp, Unknown
  gut microbiota DNA sequence
aaacgatatttcttttgacgcaggaggaaaagtgatcgtattcggcgagcatcagtctacggtcaacgaaaacatgccccttcggagtctgctgtacatcgggcgtgcatatgaaagacttgtgccgccgagaagccggtataaaaagaaaatcgttccccttccgacaccggaattttacacattctataacggaaaagaaaagtgggaaaaggaaaaagaactgcgcctgtcagatgcctatatcgtaaaagacggtgagccgagtctggaattaaaagtaaaggtcatcaatatccggccggaagaacatcatgaaatcttagaaaagtgtcaggtactgaaagaatacagccagtttatggaaatcgtgcagaactatcagatctccggggaggaagagccttataaaaaagcgataaaagagtgcattgaaaaaggcattcttgctgattatttaatgcgaaaaggaggcgaggttgtcaatatgttattagacgaatacgactatgagacagatatcgaagtgcaaagagaagaggcaagagaagaaggacgaaagctgggacgagaagaggaacgaaaagaatttctccaaaaaatctgctctctcattcagaaaaaacttgaaaaaggaaaaacagtttccgaaattgcaaatgatcttgaagatacggaagaaaatatttctcgtttgatcaagcaatttcatctaaattaatcttatatgcttttgtatgattaaaaaggaaaaagtccaaagttgcccaaaccccatctactgcttacaatctcatgatgtgccttttggcacttccgacgatttatactgtaagcagctctttgaggctaaatttataatgacagccttccctttactatgctaaaatgtaaaagattatgagaaaaacatatgagaaatatgaaaatgaggaggatttaaactttggaaaacaaaaaaattatccaagtagaagaaaaagtacctttcaagctgctcgtaccgctaagcatacaacatatgtttgcaatgttcggtgcgtccgtacttgttccgttcgtattcggactgaatccggccgttgttttatttatgaacggaatcggaacattattgttcatcctgattacaaaaggaaaagcgcctgcatacctcggctccagttttgcatttcttgcaccggcgggaatcgtaattgaaaaatggggttatagctatgcactcggcggatttgtggcagtcggattcttaggatgtgtccttgctttgatcatccgcaaattcggttccaaatggatcgacgttgtacttccccctgccgctatgggaccggttgtcgcactgatcggacttgaacttgccggaacagccgcttccaatgcaggtcttacggcatcttccatcgatccgaaaaatgtgatcgtatttcttgtcacacttttaaccgctgtccttggatctgtattgttccgcaaattttttgccgtgattccgatcctgatcgctatcattgccggatatatcgcggctcttttatgtggaatcgttgatttcagtaaagttgcttcagcatcattttttgcgcttccgaacttctccacgccaaaattcaaatgggaagcaatcgtgatcattctgcctgttatccttgttatcgcctctgaacatatcggacatcagatcgtaacaagcaaaatcgtcggacgcgaccttctgaaagatccgggtctgcaccgttccctctttgcagataatttttccacgatgatctcaggatttatcggctccgtaccgacaacaacatacggcgaaaacatcggagttatggctatgacaaaagtttacagcgtatacgttatcgcaggcgccgcggtactgtcgatcatctgttctttcattgggaaaatgacaactttgatcagcactatccccggccctgttatcggcggaatttcattccttctgtacggaatgatcggcacgtcaggtatccgcatccttgtcgattctcaagttgactacgcaagatcaagaaatatggcaatgacctctattattttcgtaaccggactatccggtatcaaagtacagtttggaagtattcagcttacaggtatggtactggcatgtgttgtcggaatgatcatgggattgatgttcttcctcttcgataagctaaaacttacgaatgacagagaaaactgctaaaacacactgaaaaaacaaaaaaaaagaacagaggaataattaccatgctgaaaattgtcatttcaccggcaaaaaagatgaatatcacagatgaattcccctgtaacgccactgtcccggtcttttctgaccgggcagatgtgcttcacgggattttaaaaaataaaaatatacaggaactgaaaacactttggaaatgcagtgataaacttgccgaacagaattatcaaagacttcatgccttttctcccgatcaggcggtaacaccggcgcttcttgcctatgaaggaattcaatatcaacacattgctccttccgtttttacagatgcccagtggcattatgtaaatgttcaccttcgcattttatccggattttacggaatcttaaaaccgacagacaaagttattccctatcgtttggaaatgcaggcaaagttagaagctgctaaaaagaacgacctttatgaatactggagcgatacgctgtaccaaagtctcctcgcagaagggatgaccgaacttgtcaatctcgcttccgcagaatacagtaaagcaatccttccctacaaaaatatccgctgcattacatgtattttcggcgaagaggtaaacggaaaaataaaagtcaagggcactcaggctaagatcgcccgcggcgaaatggtacgctggatggcagatcagaaaatcgaaagcgtttcggacatccgtgaattcaaagaactgggatatcgtttttctccctctcattccacggaggacacttacactttttctctttgatctaactgcagctttgttttgtatatgcggacatatcactcccatttgggccgcaaacgataacttgggctgctgactataactttgactacagactacagtttttccgcagactatgactttagttgccgactataactttgctccaggactctttcatattacttttatctgtgtctccggtgagatcgtacgaaaaagctcgctcatattgatcttcgcagcactgtccgaaaaacttgcgtcacaaaatactgcccggcgcggatgctgtccggcaatctttctgatcacagcctcggatatattttcattaaagcaggcggctaactcttttccgtcataataatgcactgtataaccaccgattttctccgaagagtacggctttgacaataaaagtccccattccgtcagacaggcgaacaaaagatctaagtctgtacgatcaggcttaatatttgtctcaagtccgtaaagcatttcctgcgtatactcttcaggcatgtaataaacatcctccatattactttcatcaagccgcagcacacgaaatccaaaatctctgttttcgcatccgttttcccgttttattttttctgctgcccggcggatccgttcttttccgatctcacagattgtcttatatcctgccttatacgcttcactttttttatcacattcctgcggtatctgaactaaaatatagtgcagatctatgtttttatccgcctcagtctgcatcaccgcatgagccgttgtcgccgatcctgaaaagaaatccattacgatatcgccgtcttttgccgccatattgataaaatattgtatgacgttgaccggctttacattctcaaacactcttttcccgtcaaacagttcctgtacgcactgcgtacctgcattgtatatgctgactgcctctttcggaatcagagtggacggagcgcccatcgcgtctcccaaatattttttaatatagatgttccaatgtgcctgatctccgttttgatcgacaagcggacctgtcttcgttcttttaaatgtcacaagaccttcttcctttgcctgttcaaacctttcccgcacgaaccggtaaatatatccgtctttcggacgcactctctccccgtccggacagatgatctcgtatttttggtttgcatttgtcgatttatttttaaacacaaaatctttatctctgtataatccccgctcgtctttttcccgatacatcttgatcgcttcccctgacaacggcgcaaaaaacatatccagacaagttttattttttgcataacacaatatatattcatgtgtcttactcgcaaatttcggccggataccgcctgccgtagagcaattccatataaagcagttgacaaaatttcgttcgccgaaaacctcgtcacatattttttttaaatttgcctgctcgttatcgtctatactgataaaaattactccgtcatcacagagaaggtttctggcggcaagaagccgtgcataaatcatgctgcaccaatccgaatgataccttccgctgtaatccaaattctgatacatccggtttttatcatcttgagaagctccgcctgcattcacatattctctcgctctgatccgaaaatcatccgcataaataaaatcatttcccgtattataaggcggatcgatatagattacttttaccgaatccaaataactttcctgaagaagtttcagcacatccagattatcgccttctatatagagattgcctgtcgaatcccactcaacagagtcttgcactacgggacgcagcgtttttctgatcggtttataaacttcttttacggcttcccgctttccgacccatgaaaattcgcatgtttcgctttccttttgattgattcccaaaagaagctgcaacgtattgatatcgacttttcggattgtcttcccatcgttatctttttgttcttttacgcatgacgggaaaatatccgcaagcctgcggatattttcctgaaaaccgtcaacagattcaaatctcatcttttccatctatgtctttcctcaactatttcctgctctgccatacttcatccgtcttttgaaaaacattctctgcatcggtttataaatcttccgttttgaatcgccgcttcttcactgtcaaaaatgagcagctcctctttcggcactcttcttataaacttgcagtcatctgttttatgataaaaatttgtcggcgtatatgggtttgcatacactctttgcttcggctttccaaacgcctgcgccaaacagtcaataccttttgtctctcctaagttctttgcaaaatacaaggcaagttctgatttatttttctgtctcatacgcttaaattgaaccgtatcatcgagcaattcctctttctgcatccatccgatcacaaatcctttttttgccggacgatccaggtaaactctcacaaagatatcacagcactgattttcgcactcccatacgatcactctgcgccgcaggttttcgcccttacatccgtcaaattccgaaaacctttcctgaacttccctgcagtaatcatccagacaatatccaggatcactttcccgccgtttcaacttcggataacagaatacatcatctttacgccggatcgtctccaacagtttttgcactgacttcacattatcataatcccctgtgaaatcactttctactttcaaatcgtttcttatattcgtagattttacttctacgatcttcacgcctaatgtcctgcataaccgccttgtaacattgctcagtttcacaaatttattaggtgttcttgcaatatcctgcctgattgcttcttctataaaagcaatgttgaccgttccggttttccagagcagaaaatcaaacggggcatgttttttaaaatcatcgtttctgatctcatcgtaagttttcaaagacaactcctgagaataatactgacgaataaatcgttcggtgatctcctccgcgatcttcccctgttctatattacattcccgctctttcttcggtctgtccggctgccaagtttccgccgtatagtctatgatctgtcctaccacccgggcatctaaatgcacctgtccataatccgcacatacaatatgattttgtaaagtcaatctcatcttctgctttgcacctccatgtgcacgacttcaacttttgtatcgagatttctttcccttaaatacacaaatcgcttccgtacaagatctttctatatagtgtacctcattatatcacaaacggcaatgtgcatttcaaccgaactgttacttataagaaaagacttccgaaaaagtcaccgatgccgtctacaatacctgacacaatatcgctgactccgtcgcacacatcgctgataacatccgatgccacacttcccgcaaacattcccgcgccgatcccgataacaacttttgcggctaacggaatcggtgcggccgcaagagccgccatcgttgcctctgatgcggctgttcccgccgccccggaaacagatcctttcaaagcgccggacgcaacatttcctgtcgtcgttgacagatcgtctccgttcacgattgattccaccgcagccattcctcctccgaaagctcctccgagttttgccgatgattttgccgcattggcaatcccggttgatgactggactccgttaaacttattgcttacacgggttgtatctttcgttgagattccgctgtctttcattactttagtcacaccttgagaaggcgcctttgcattaaatgccgccgcactttcagacgttcctactaactgcgttgttcgatattgaccgttttgcacccgtttgatcgtatccatcattccttttgcactcggagtatccttgcactgaatcctctctataatgcgatttcccttcttcgtaaccaaatctacctgacgggcagttgacgaattcgtaagcgttgttgtcgtgtccggcttcagcagattagagagattcttcttatcagaatacatcacctcaaaagcatttccttttccgccggtcggcgaatatgcccctgcccttcctgacattctcactgctacagaatagtcatacccttctaccacactgtttgctaaatttcctgctgttttttctttgttttcattcatttttcttcctcctctgttgtttctttccacatgcttcatctgattcttgtttcattttgtccctttaccaaagccgcctcctgccttgacatactccttttcactgatccaaacgtcattctaaaattcatacactttcggcatccctccttttcaccagagtttgctgtataaagataaagcagtaatgcggtctttcaattcatcgtcataagacaaaattgtttttatctcatagaagtctcccgatcttcttactaccatgacaagttccggatcttcacttaacggagcatctatatgcagaggcatgaaccatgaaatagttccgcttttccctgaataagaagcttttgcaaacgatctgtcgcggcgctgcattttaatcccccgctcaagagcattcatgatctgacctgcgatcttgctgtcgctctgactgcgtatgctttccggaaaacgttcccgcctttcctgtatgatgtggatcagacagttttgattaatgtcgaaatcttccttcttcggattaaacacttcttctttttcatcgaaaaaactgattggctcaatctgcatcattgactgttcttttgtaaatccataattcaaataatcctgtttactctcgattacacgctccgcgatatacgtcttgtacttttcataatatcgatatagaactaaaaaatcatttccgaataaatccatcattccggtatttacgattgccgatttcgttttattcgcgacaaaatattctgtccttccggcatcgacaagctgcgttatccttgctcctatgattttgatatatctgtcaagccctttcattgacttccagttcggaaacaataatctgccatagatcgcttctgtaacattagaaagtacttcttcattttttataaaaatcgttttttcgcaatatccctcacttctgtcttttacttccgtctcaaccttacaaatacgctccgcatgttcttccctgtatcgatgacaaaatttcaataaatttgatcgaagttttttttcagaatacagagttttcctgcacatcccatttactaaataagacggcgttccgacataatatcctgagaaataatcagatcgttttaagagcgagatcatcagcggctcatttccgttcaccttgattcctgtatcaatccatgccagaataacgtctttttcattttccggtttttccgataaatctttatcaaaaaaatatatatttgactcttctgacgaaatattctctataatctgatctatttcaatatccagtcccgtcactctgtatatttcgtccgtcactttttctccgtctgttacaataaacttttccttaatcatgtgatccataagttatcctcctcattttatgatataatgtaactattcagccataagaagcacgagtgcggttttacggatggttcaagctgaactgttacacctctcttgtttgtaagcttatcgtatcaccctttcccgttatcatgaataactgcaagttgacatctttttgacaagattattctttgtcaaatgacaaaaaattgacaacacaatgacaattatcattattgatcggaggtaaatatgttaaattacgctgtcatcattcaatatttaactcaacaactgaatattcccaacgtaaggatcgcagaatggcttaaccttgatccttctattatcagcaatatcaaaaacaataaacgaaaaatgcaaaaagacatttcctatgatgttttttacagagacgtcttttgccaagccgaaatcggaactgattttcaaagtgttcacagcctttacacataccttcaggacaaggactgctcgaatgaagtaatagacatggcatactcacactataaagaacacagatcagttgaaaacgctgaaacttttctgctcactttactaaaagaagtcaaatatgaaaaagatgctgtgtcatcgaaatctgcgtcaaaatccactcaccgttccccttccgatgccattgcttttgagccgtttcataacccgatacaaaacaatactttcttcggacgacaggatatgtttgagaaaatacgctctgttttatgcagtttgggaacttgtatcatctacggtatcggcggtttagggaagtcctactgttcgcttaaatatgccgctgaatatgaagattcctatacacaaatccagcagatcatttttacaggcgatataaaaaacacaattttaaaaataaaatttacaggattggatgaatctcacttttcagaagacgaaaaatttgagaaacgactttccattctcgcttcttacggtgaagatactctgcttatcatcgataatatggatactcacccggctgatcgggaaaattatgtgcggttaaaagaattaccgatacatattctcttcacttcaagagagaccgatctcgattcagaaaagtttctcttgccgatccatccgctttccaagcaagaacagcttcaattatttatgcactacggacggtttacgatccccgaagatgaatacggcgactattttaaaatattcaatatggtagaaggtcatactcttcttttagaactgatcgcaaaaacaatgactgccgaaacattaacgcctgaagaaatgacagatattttgtacagtcctgaatatgacgatataagcaaagtggtcattgaaaaagacaatacttatcagcaggaaaaaatgaacaactttatatctaaactttttgacacaagcaatcttaccgatgtccaaaaagaaatattgatgaacctctctcttacgtcgataagcggcataagacagcgcttattcaaacaatttttagattataataattcagatatcaacgctttgatccgtcaaagctggatcatacaaaacagacccaacggtccggcctcatcacagattcatctgcatccggtcattaaagctgctgtaataaataatacggaaccttccttagaaaaatgttcagtttttatcaacaaaataattgaatttctgaaagcggcttccgcagatgtgatcgaagacagtatgtcgaatgatttatgcgacgttcttgcaaacgcaggtctcatgttcaaatatacttccgaacatctcggcttaatgtacgacatcgccttaatcttatggcgcagccttatgtatcatgaatcttattcatacttaacaaaagggttggaactattaaacaaagaatcatctgacgatatcgaattacaactgtcttactacgaaaccgcaggaaaagttgccgtcagacttgccgattacgaaaaagcaattactcactatcagtcggcaatcacgacaatcgaaaattcaggacaagatttttccgaaaggcttgccacgatatatgacaaactaggggtagttatgcgaaaagcgtcaaaatatgaacaggctttggattattttacgaaagctcaaaatattattgatatcaaccatataaaaaatccggaattaacatccgacatttataatgatatgggcgtgatctatattaaccttgatatcttcgataaagctttggcgaattatcaaaaagcccgcgagatccgggagtcggttgaaaatcccgatctcgaacagatcgcctattcttatcacaatatcggaacagtatatcagcggcagaaaaagtacgcagatgcaatcacatggcataaaaaagcgttagagatccgtcaggaaatataccctgataacgaaccgatcattgccgcgtcattaacgatgatcggcaatgactatacacaggcggcaaaaaacgattcttcttatcactttaacgatgcctttgaatatttcgcaaaaggcttggaaatccgaaagctcacgttgggagaaacacatcctgacacggcatggtcttaccaaagcatcggattatggcatttttatcaaggagaatacgaagaagcgattgaaaactatttgaaatgtctcagcattcggaaaacgatccttcagccttcgcacgcctacactgccgaaatctcatacttgttaggagaagcatatttaaagatcaaccaaatccactctgcaaaagaacaccttctgctcgcagaaaaaattcaggcaagccttcataaagtaaaggctcttgaaaaaacacaacatctcctgaaagaatgcagtctttcataaacgataagagacgccgcaagctgcggtgtctcttatctgctcttcttatatgtaattgtcaacgttttatacgtcctttacttcgattttaaaataccgtcaaatccacttccagtcacttttacctctccgttttcaaaagtagcaattccgtatatttctttggaaacgctgtctataatcgaaagcccgccgtctccctgcgtatataatcttccgtctataaccagcccgttattatactctacccggactgccgcgatatcagatcctgtcggaacatactttgtacttgcctctgccatttgatcgtacacgatcatcgtagtagtatcattttcataagtaccttcaatctccagatccggcgtatatgtaccgctgatcctgcgatagtttccccagcctttgcctgcacctgaagttacgcttaacaatccgttctcatttttatagaacgtataatattgcccttctaaataatctccgaatgcaccacattctgattctttctcaaaaatctgcccgctcgacgtatagataacataagaccattcatatccgattgatgcaatcacaagcctgtctcccgaatcatcgtctttatatgtacctgcccatcccattgtgaccgggtctgtcaatacagcttcccttttactgttatctttttcttcctttttttcttcttgcccggaatcttttttcatttccccatcagtttcttttttaggttttacattttcctttttcgccggcttcgattctttttcagctgcattctctttaacctctttatatgtcgaatcttttgcagtttctttcgcatcggaacttccaaacattttcactgctgcaataattccgattattatgactgctgccatcgcgataattccaattactaccgctgtttttttctttttcggcgcaggatgagacacacccttgtttttaacatctgcacttgaattacctgttgtctctttttgtgtcaaccgctggtctgactgtgccgactgctttggttgttcactcttctgttccggctgtgccgactgctttggctgttcatttttctgttccggctgtgccgactgttctggctgttcgctcttctgttccggctgtgccgactgctctggctgttcgccattctgttcaggctgtacagacgctccgcaatacggacagaacttattctcatcttttatttcttttccacaattttcacaaaacatttttttacatcctttatcttattttacctttaatataacgatgcagttcccttataaccgtcatattccaaaatcaacgtcgctccttctacatcacactctgcaaaactcaaaccataaaattcaagaacatttccttcaaaatcttctatcgcaaaatcccagtcaagatcctcctctgtgatcacaaactctatatctaccctttcaccatcatacactataccatcctcaagcaaatcttcttcccagttatccacatcaggttctgaagcataaagagcataaatatcaaaaccggtattattaattacatgcacattatatcttaatatttcatcctttgaactgcatttaaaaataccgatcgccacaataataactaaaacagcgatcgcgataaccgctccttttttcttttttcctgcgcctttgacgctaaaatccggcggtatatcatgactcggttcttccttatttatttcattttccgctccgcaatacggacaaaacttatccccatcttttatttcttttccacacttttcgcaaaacatggcaaattcctcctacattctcttttaatgttttcaatcacataaaatatcttaaatatttcataatgatatttccgaacgcatatccgcacagaagaccggttattaatctccgtatattatttgattcgtaatgaaatttatattgtacgaaccaatctgcaaacatgatcagagaaaacacgaccgcaattatattggaaatctcgccgaccttgaataagaagattcccaaaacttctcctataaacacccccgtacatcttgcgcataccggaaattgttttccgcgaaaggaaaagcttcgttccggtaattgatgacatcccgtcgctcttcctatcaccataagtttcttatatatttttcttttatccatcatcatcttactctgcaaaatgtactaagatcggacagacaaaaatcagtgtaccggctaaagaaagcattgaaaattttatacaactccaaatttcctgtttcttttctacttctaaaatatcccaaatactataccctaactgtttgtctatatcctcgcataactgatagcaaaaatataacggcaaggaaactcccactatgacagcgatcaaaacaacgatgaccgttcttaaaaatccatgcactaattcatccagtatcgggtaaagcaaaagagaacctagcgcgccatagcaaagacaatttactgtcattttatccatcaacgaacttaacgtttcaacagcgtcatgctgcgctaaatgttgtcttccgcaatttttacatccccaccaggtgatagatctgctctttactttagagcccgtgaaaagcgctccgcacaataatccaaacggaccgagcaaacacattccacagcacccgcgccccatactgtatccttttgttttaatctctgtctcgttcttaacaatcggaaacgtatcctcgctgttacaatacgggcatatagaatctttcggtatattcggcggcatctgaatgattttgtcaatcgcatcgataatatgaagccccgcttctttcatatattcaatcagcgctttaaaaaattcgacaagagattcccaaagcgatccatccgcgttactttcctgatatgaattctcatttttccctgattgttcctcacttacagaagcgccgcaattcggacaatattgaatatctgaatttaattcttttccacaatttctgcaatatttcatctcgcacgctccttattcttttccgatcaataaccgaaactgttccacatcttcagtcattccatttacaggaatttcaaaattcagtccatttttcatttttaaatttaaaacctttccataacctgtataaagaaagactgctatcaataaaagccatgctacatctgttatattcatcagaaacattaccccaaatagcgctgcatacaatgtatcccaaaaatccatttttgtttttaattccattgaaccgatttctgataattttatctccaaatggttttctttttctttccttaaaaatctatgtatcttttgacttatctccaaacgctcttcattattacttacttctgttcggataattttgtatcgtaatcttccgatcatttttactttttcaaaataaaatgttcctttactttgttccgctttatccttttcttcatcttttaatgtacttacatcctctttttgttccaatgtactgctcccacatttagggcaaaattttgactcttctctaagtacattcccacaattcacacaccttttctccgttttcgtctcatgaacattatgtttaccgctgtgatcttcctgctgctccaatatattgcttccacattttgagcaaaatttcgccccctccctaacttcatttccacaattttcgcacttcattcctttttgcacttcctttataactaatatttttatagctgtagataattatactataactaagtaaatattacaattaaatcaatatttttttggaggttactgcatggacactttaaactttgaacaaataggcgaaaaattaaagaaaatccgcctttccaaaaacttaacacaagaatatatcgctaatgctgctgatgtgaatacaagtcatatcagtaatatcgaaaataaccgtgtcaaagtttctctttctgttttagtgcagatatgtaatgcgttagatactactgttgactatattctttccgatgaatataacgactcatcctctgccatcgaacaggaaattctccatgagttacactcctgcaataatgaaacaaaagagcagattttgaaaattgtcaaagctttacagtaatttctctcattaacattacggcatatcgaaaaccttgtatgaatcctttttcttttgcagcctccgttaatgcaaataactcatcgcgaacctcttcatacgtctttttctccaaattcactctattttctttcaacagcctctccgtctcttcgtcaatctctttcccaatttccttcaaataatcggtttcagacagtaagaagcgataaatctctcttatcttttcagtcttatctgccgagctgttcttttttgattcttccggcttttgaaacatactcattctcctatttctatttctttcactttgcattacaatataaacagattattttattgcctgacactataattaaaccatctttatcaaacagcatgaagccgcaaaaaatttccgattttttttgcagccttttataccgaaggaggattcaaaaatgaaagcagcaaacaaaaacacaattcccatcacttcagaatccgatattttatgcgctttcagaaatctgacttcttcttatgacgaacgcactttacacaaatggattaattttttcaaaaaatgtatgtattacgcctcttccgattattctaatcctatgtttctttctttaacttacaatgcagttaaaaagagcgagcaatatccttatgaatttttatatattcataagttgatgtatcagtttctctgcctgagaaccccctgctttttgcagtttcctccatataccgatcttgcatccgaatacgatcgcacagcgatcaaatggaatgttcccgctcccattacgccttttttaatctgctatatcaaagctgccagtaaattcaaaaaaaatgcccctgtcacttcgtttttccatgaacttgacgagacatttacagagacagaaaaatttcaaaacgatcttacccaaacagaatatcggattttaactgatgaaattctttgccgtaaatatttttgtactacggaagaaatttataatactttctcaaaaaacgatttccaaaaagaggcgctccggcattgtatttttcatttaaccgaaacattaaccgcaattttgcaaaacagccgcctcaaaaattattccgctgctccggttgtttcaaacgcatatattctgttaaatactttcagggaaaaattatatgaacagacctgttcagaaaataaaaaactagatttaacgaccttatatccacacaaaaagccgtggactattataggtgaaaacgaactgatgcagagcataaaacattctctgtcttccttttctgcaaaaatattttctcttgcagaagaaactttagatgaccattccattcaccatatctcggcgaaagactacgaaaccttttccaacggatgcactaagatcataaacgacatagaacagcagattgagaaagaaaaagaaaaaatcacaacattctatctcaatataacaaacgcccccgctgtcagtcacgctctctctaacggacaattagaacttgatcaagaaaacttgaattacagatgttgtctgcttacagatgcccttacaacatttgccaattctttttcacaaacgatcctgactttcaaaaacaacgtcaggaaggcttctcacgccttccctgagcaatatacatctttaaaaaccgacagagactacttttcggaattcaagcactctgtcaaaacaatcgaaaagaggctctacggggaaatctttatgacagcttttgaacattccaagccgtttctgttttataacgacagaggattcataaatactctcacatatcccgctgtcctctttccggcagaatgtttaagaataactcatgaattgataggaaaatattttttatctgaagattatatccttcagtattttcatgataaagggattcgttttccgatatcacttgctgaatttttatcgagagttgatattaagtaacacacaaaaacctttgcactccttcataagtttctttgaaattgatgtaaatttagtgtagtgctaatgtaggaatctctattccattttcaagaactcttcaatcacttttacaaattcttcagctctatcatactgttcctttgcatcttgcagagacacaagaaaaaaatccgcataatcggtattgtttcgaatttgaaatgcctgactgatatattttgaatatttcttgtcaaactttcctgtcttcacatattctttctgaaaatatgcaataactccggcatgctttgaaaagtcttgtccttctaccgccagcaatgcacgcaccgctgtaaacattgcataataggaacgacctatagaatctttataacttccagcctctaatagtattttcgaggaatgcagtcgctcttttgccatttccaagcgatatacttttaattcttctctattatcaggcaacgatttctaccccctcactttcgatatttctataataaggtaaatcatttttatacttctcatattcagcaaaaggaataaccgttggagacactatcgtaccatactctaattccaagtctgaagaaatatcccacacacttttcaagccttgttgaagtttttctctatctccctgtacaatagcgactatatctatatctgaatccttttgataatcgcctctagcataagaaccatacaaaataattttcacaacatttgctccatataccgcttgatacgcctgagtcatcgcctgcaatattaagttcaattcatttcgtgtacacatttctttcatactcctctgattataacatataacagattgtttcgattttattataacgtaattcctctaaaaacaaaaggtactctctatacatcttttataacccatcttttataactgtatgtaatcaaattttatcttattgacaaaaattgaggtatcgcaatttgctaacacctcgcagtctatttatcaaaacaaatttccatccttaatgttaaattttgttctaaagaacgttctgttttgacaatatcttagaattatttccctaacataacttctcgtacaatagctatcttcgattaatgtagtgccatcatcaccctttatctgttttttgaatattttcttctgttcccactcgctcttgattccctcaactaaatcttcactcatttcaagatgcgagagaattactgaatttagttctttgtctctaatttctttaatttgagagaatgtgcttaactgttgcaattctttttttactgcacttgtgtaattgtctgaactgatacatttgctatttgagccagcccttcttatgtataacctcagcaagttcctcaagaatacctccaaatactcggttgtttcgtggatacccttttgcaggttcgtataatttgccgggacaagtgcatttctaaaataccaagcatttttcgcaaaaatatcatttgtggcagaaaatccgagcgttctcaaatacttgattaaaaatactgccgtcgctcttgtattttcctcaccaaagatatggatttgccataatcttgaaacaaagactgcaagatgatgaatgatttcctccatcgaaaaccctttgtaaataaagttttttcctgcaaaaaatcatattcaagagttgctcttagttccgggcgcttccgtagagaacagttgctccgtcaagtacccactctttttcgtaattttcaaaatataatcctgtttttcttccactcataataataatcatggttcgataatctttcatctactgtcatctgcctttacataacacaaacaggctcatagaaaatacattccatgagcctatctctttatatctctttatatctctttatatctctttatatctctttataacgttttaaatctgttttcattatggtacaaaattgatataaaaatcattttttattttatttcacattaattagtacaattttgcgcctgccggaatatgctcatcaaccatcagaagatgaagtttttctttcccttcttcattatgaaccgctgaaatcaacataccacaggagtcaattcccatcatctttctcggcggcagatttgtaatagcgatacatgtcttgccaaccaattcttccggctcataatattcatggattccgctcaggatcgtacgatcctctcctgttccgtcatccaatgtgaactgcagaagtttcttagatttcggcactgccgtacactcttttacttttaccgctctgaaatctgatttagaaaatgtctcaaaatctacatcgtctttaaataacggctcgatctcaactttggaaaaatcaattttttctgccggtttttcctctgtttttgcctgtactgaattgtttgcttcattcttagctccgccctgtgttttcattgttgggaaaagcagtacgtctctgatcgcggcgctgtttgttaaaagcatacacattctgtcgataccgaatccgatacctcctgtcggcggcataccgatctcaagtgcattcaggaaatcttcatctgttgtatttgcctcttcgtcaccttgtgccaaaagttcttcctgagctttgaaacgttctctctgatcgatcgggtcattcagctctgaatatgcattcgccatttcccagccgttcataaagaactcgaaacgctctgtatattccggattctccggtttctttttcgtaagcggtgaaatctcgatcggatgatccattacgaacgtcggctgaatcaaatgttcttctgcaaactcttcaaagaacaatgacaagatatcacctttcttatgatgctcttcatattctacatgatgctcgtctgcaagcttgcgagcctcttccaaagtcttaacttcattccagtcaacgcctgcatattttttcacggcatctaccattgtaatacgttcaaacggttttccgagatccatctcaacgccattgtaaacgatcttcgttgtgccgagaacttcctgtgccacatggcggtaaagattttctgtaagatccatcattccgttataatctgtatatgcctgataaagctccatcaatgtaaattccggattatgtctcgtatcaagtccttcgtttctgaatacacgaccgatctcgtacactctttcaagacctccgacgatcagacgtttcagataaagttcaagagaaattctcagtttcaagtcttcatttaaagcattgaaatgtgtctcaaacggtcttgccgcagctcccccggcatttgcaacaagcatcggagtctccacttccataaatccttcgccgtccaaatatctgcggatcgcgctgatgatcttagaacgtttgataaatgtatctttcgcttccggattcatgataagatccacatatctttgacgataacgcatatctgtattcgtcagtccatggaacttctccggaagaatctgaagactcttggaaagaagtgttacatgagatgcatgaatggaaatctctcctgtttttgtcttgaatacctctccttcgattccgatcacatcaccgacatcaagtttcttaaattctttataattttcctcaccgatgctgtctcttgctacataagactgaatatttccttttaaatcctgaacattacaaaaagatgcttttcccattactcgctttgacatcatacgtcctgcgatggaaacctgctttccttcaagctcctcgtaattttcttttacttctacactgtgatgtgtctgatcatattttgtaatcacgaacggatcttttccgcttccctgcagctctgcaagtttctcacggcgtacctttctcaactgattcagatcctgttcctgtacattcttctgctcctgtgccactttcttatctcctttcccggataacttttctctgttttgctttatctcttattattccgttacgctttttttctctttatctgcctttttcgcctctttaaaacattcccatacatgcgaattcagacctcttaaaaagaggtctgtttataatcatctgtttacattgaacggctgatctcaagcactttgtacttgatttctcccgcctgtgtttctacgcttaccgtatctcccactttttttccgatcaatgcctgaccaaccggagactcgtttgaaatctttcctaccaagctgtttgcctctgttgatcccacaattttaaattccatctcttcatcgaatgttatgtcaaatacctttaccgtacatccgacattgatcttatcaaagtcaacttcatcttcaacaaccacttctgcgtttttcagaatgccttcaagttcttcgatacgcgcttcgatatctctttgttcatcttttgccgcatcatactctgcattctcggaaagatctccctgctctcttgcctctttgatcttagctgcaacttctttccgtttgacaactttaagagtttcaagttcatcttcaagtgcctttaatccggcataagtaagtaatcttttctttgcctccgccattgataacgctccttttctgtcattctttttcactgttttttgtctattcccgacaggaaaacttgtccctgcacgctgtctcttttagtttatttcacaatttcaatattataaccatcaaccccattaatgtcaaggtttttggcgtaaacaagacagcttttacatgatattgcgcagaaaatatagcgcttattaacaatacagcgttatgccggaattaccgtaagttcccaaagacacattccgggattacaggcggctttccaaggtcttgatccttctgtctttcgttcattgccgctccaatacaaacagggccgccactaagtggcagccctgcatttttccgtactatttacggataaggcttattttcttttgtttcttttgaagattgtcagagccgctccgcctgcaaccgcacctgcaagaactacaagtccgatcagcagcgttacgttaaagttatctcctgtctgaaccgctccgcctttgtccggtttctctgtattcggtttcttatcctctgacggatctgctttcaccgatacagctacgtctgccgactgtccgccgtatgttactgttactttcttcgtatccgctgtcagttttgtattaagactcggattaaaggagaaatcttttgccgtctccggtccgtatgcaacaacttttgttgttccgtctgacatcgttactgtaagactcattcccgtcggatcgaatttatcgccttctttgtattctgtcttagccggatttgctttaatttcaactttttctaccgttggtttttccggctctaccggtgtgtcagctttcacttcaataccgatgtctaccgtcttgccggcatatgttacatcaactttgttcataccttctgtaagtgctgtatcaagtgtcgggttaaatacaaaatcttttgctgtttcgtttccgtatgcaacttcttttgttgtcttgtctgacatcgttactgtaagaacaagtccgctcggatcgaatgtctctcctgctttgtaagttgtcttagctggcactttcttaacggcaattttgtctaccgtcggtttttccggctctaccggtgtgtcagctttcacttcaataccgatttctgccgtcttgcctgcatatgttactgttactttctcatcacttgttttcagtgctgtgtcaaggcttgggctgaatgtgaagtctgcttttgttgcatcgccgtaagctacttctttatcttcgcctttgtcatatttcactgtaagcacaagtcctgtcggatcgaatttatcgccttctgtatattttgtcttcggtaatgtcttaacttcaattcctgttactttcggctcttcctcttttggattaacctgaatgataatgtctgctgttttacctttatatgtaacagttaccttcgtattatttgtagtaagcgctgtattcaatgccggatcaaatgtgaactgtcctgctgtttcagcgttatattctgctacatctttcacttcaccattatcatatttaactccgactttaagtcctgtcggatcgaatttttcaccttctgtataagttgtcttcgtcggctgattctggattacaagttctgtcggctttggctccggtactaccggttcgtcctctgctaatttcacacgaatctcagccgcgctcataaacttgttctcctgacctccgtcaccataagtttcaacacctgtaaagcggataaacttcgcctcaaccggctgtacaaactgagcgattttccaatctgttccgtttgcccactcttgtgttgaaggagtaatctctacctttgtccatgaatcatcagcacctgtcatgcttacttctacagtatatgtcttcacacgaccgttctgatctcctcctgtaagattaccacccttcggcaaataacggattgcatcaatcttctgtgcctctgcaagttccatagttacataaaggttttcgtttgttgttgacggattccaacttgaatgccagaacgtatcattctttttatcaaatgctttgtcaatatcagttccgttattaggctgagtgcttcccgccgacggagtgataactcctgtgtaatccttgctgtcatctgccggatctgccacgccgaggttcatcacaaatgtattctgtgttttatgatcttctgattcgatcaatatttttacagcattattctttgccggaagtattgttacagccgcattgtcttttcctactgctgcgatttctttcacttcttttgccgaaacattccatgatcctgctgtaagcgcttctgccggagccgctttaccatctacagtcaggctctgcagttccgctgtagtgtttgttgtaaagtcagcctgatttgcacgatacagttctgcttctacaattcccgtacatgtaaatccgccgccttttccgcttgcatccggattatttacaacatggatttttacaaatacagcctttgtcggaacaaaatcatatgtatattccacgacgccaatcgcagggagttcctctggatgtgactctgttgctgttacttctgtccaagttccctcttctcctgtttcggaaacatatatttttgtcgtattatctgctggataagatgctgcatggctgtcagatctgaagaaaatcttgatctgattaaatatctgctgtgtcgcatactggaatataatatcagcatcattgtctttggcatctttgctgtttttatagttactccacattgtagagtttgtattaccgccctgatttccgtctactgttctgtttccatcacggattgcttccagatcatcagactgcatctcctgtgggatatcctgcttcaatgtcattgcctctttagcgatattatcccctaccgaatactctgcttcctgaactcgaacagatgcagaaaccggcattttttcaccaaatacatctgccgttccctttactgatacaattccttctgcattgtatccaccttccggtgtttcccatgctaccgggaaggatgccgtaagtactgttccatcttccataaccgcaggtcttgctattggaagtttcgggtctactccgattgatgtcgtcgttgaataattcaaaattgccgctactgtatcaatcatatttacattaacagaaactgtttctgctttatcgacacctgcaactgtaactgttcccgtcacactgaatgtacctgactgattgatctgatcttctgcaacatcctcccatgttacctttccttttgcttctgacttatcattaagaacagcatccagttctgccggaagctgtgggcggtttcctacttttacatagtagtttttggacatcttaacgctgctgattgccttcgcttccgttgttccatccgatgatgcctctgttgtaatctgtactgtctgctcttccaaaccatctgctttcactttcacagtgattgttccggcagattttgtagactgaacgattcctacaagctgaccgctgaatgcttttctgttatcgtctctgtaagactgatgatctacaggtcttccgttatccacgcctgcaagcacaccatcaccgctgacttcaaacgtcaccttattatccgcattcggtacaagatttcctttatcatcagtaacacttactgtcaaataagaaagatcttctccatttgctgtaatttttgttcgatcaacatcaacttttaattttttagcttcacctgctgtagttactgatgttcgtccctgaagattctctgtaatttctttaccgtctttatcccacgcttttgcggtaattgttccggcttcatatggaaccatccatgtcatgtacagattctcatgttctgtattgctctttccagttccttcatacatctgatatgtgtatcctgccgtcgtcttcttttctgtaaattcttttgcaccgagcgatctctgttcaccgccgcttgccggagtaaagaacagttctactttttttgcatcgctgtatacaactaccggaacattatttccactcttcttatatacaacttcttcattccaagccggaagaatatgaagtgtattcacgctgtcattccactgactctgatagaagtaatagctgtctttcggaagtccggcagtatcaacgattccaaaataggagctcttcggtgcaggccatctcgacgcattacccggtttgccttgtcctgttccattccacggcgtcggttctccgatatagtcaaatcctgtccatacatattctcccgcaataaaatcacgcttgattacttcataccatgcgctgcttgccgtagcgccccaaccaactgccgatgtatcataggatgtcagatcataatcgccataatctgtttgactacccattcctttataaatgcctcggctattaactgccgatgcagtctcagagccatacatacaccattcaggataagcttcatgaatcatatcgtaatgagtctttcctgcatgatttttccactcctgagagtagttcataccatgtattccaccggctttctgtaattcctgaccaagggtaatagcacctgactcattacttttcagcttattatctccggttgtaacagggcgtgtagtgtctgccgcctttgcccatttcacaaggttgtcctgagcagtcttataatcatcactgtatccgcctgttccttcccacatctcgttgccaagcgaccacataataatcgccggatcgttctgaccacgctcgatcattgctgtaagatcaaactgcgcccatgtcatgttctctgcagcgcccatgatctcgttgccgtcttcaatctttttattaaaccacttagaataatcgttcgagttactgtttttcggagctacccatccgtcaaacgcctcgtcgatcactaagattccgtgtttattacatgcatcgatcaattcgtctgacgccggattatgtgtcacacggatagagttacatcccatcattttcaatatctctacctgacgctctgtagagcggtcatttgcaaccgaaccaagcgcgccctgatcatgatgcatacatactccctgaagtttcatcttctgaccattcaaagagaatcctgtattattattgaaatcaaaataacggaatccataatctgtctcgtatgtatcaactgtagtaccgtccataaggacttctgttttcacagtatagagatttggagttgtcgtactccaaagctttacgcctgatacagtaaaatctgcctgtacatcttttgatttacctttgtccacagtcgcaacttccgtctcaaatgtcccaaccgcctgctctgccgttccgtttttcggatagatcgtatgttttacttttacagatgcattgttctcggattcatttacaacagttgtttttacttttaccgcaacattgtttccatctgcatgatctttcagatccggtgtctcaatctttgttccgttcttatctacatgaactgtatcggttacaacaaagtctacgtctctgtaaataccgcttcctgagtaaaaacggcttgacggtgtctggtgatctactttaacggcaatcacgttttcttttccgaacttcacattatctgtaatatcgaaagagaatggtgtgtatccgttcggatgtgtaccaagctttttaccgtttacataaatagttgcattcatgtaaacgccgccgaagtcgatactgattctcttacctttcaggctctcgtctacagtaaagttttttctgtaccatcctgtaccgcccggaagatatccgctttccgcctccatcttctgtgaatatttctggtcgatactgtaatcatgcggcaggttcacctgatcccatgaggagtcgtcaaatgccggagtctgcgctccgcttgcgtctcctaagtagaacttccagttatcgttgaagttctgcgttctgaccgttccgctgtatttgttaaggaacacctgctccggcgctgtgtttgtctgcgtcgaagttcccccttccagttgaacgatctcaccctgtgcgtaggctgttgccggcaacaccatgcttcctgccaaagctgtagcaagaactgccgaacctactttcttccacttgagatttttcataaactttttcgcccctatagttccggagcactccttcgttctgaattttcacgcatattccatgaaacgaaataaagaaaaacgacctttttctccatgttactatgcgtaatatataaattatacaaaactttgtttattttgtatagattaccgtaacatttttgtaaggtcgtttttgctttttggcatttttactatttttatcttgctgcttcacatattaaaggatattttttgtgcagattttcatagttcttccaataacatcatcagttcatctaatgtctctgtctcatttactctgcgccggagatctgccgctcctgtcagtcctttcgtgtaccaggctacatgtttgcgcatctcccgcattcccgcaaattctccgcgatactgaatctgaagctttgaatgcctgaggatcatattccgtattgcctctttatcaggtctgggcggagttactccgtttttttccttgccgatcatttccgaaaagatccacgggtttccctgtgcgcctcttgcgatcataattccgtcgcatcctgtcgtttgaacaagttcttctgctttttccggtgtagtgacatcgccgtttccgattacaggaatggaaaccgcctctttcacctgcctgataatgtcccagtccgcctctccgctataatactgctctctcgtccttccgtgaaccgcaaccgccgacgctcccgcttcttccgccgctcttgcgacttcgactgcatttacatgcgcatcgtcgaacccttttcggatttttaccgtaacgggcttctctattgctttaacgatcgcgtttacaatctcataaacaagagaggggtttttcatcaaagcagacccctccccgttttttacaactttcggtaccggacaccccatattgatatcgagaatcgcaaaaggacgttcttcaatccttttcgccatctcgctcataatcttcggatcagaaccaaacaactgcaaagataccggctgctcttctggatgtatttccatgagtttctctgtatttttattttgatacaaaattgcttttgcactaaccatttccatccctaaaagacccgctccctgctccttgcacagcaaacgaaaaggcaggtctgtcacccctgccataggtcctaataggtatcggttttccaattctacatttcctattttcagcttcttcatctttttttctgcactttctcatgaatcattcgcaagccgttcagtgtaagctgtggatcatacagatctatgcattctgtttcatcggcaataattttacccagcccgcctgtggcaatcacataggcatttttatatcccgactcttctttcattttttttactatatattccgtctgtccgatcgctccgtatacaagtcctgcctgcattccgctaatcgtctccgatgcaagcacggattccggtcttcggatctgaatcgccggaagcatcgccgctccgtcccacagagaacgtcctgccgtttcaatgcccggggcgatcacacatgcttcaagcgtacattcaggacctatcaaatcatacgtcgtagccgttccgaaatcaaccacgatcgcaggtcctcctgcaatagcataccccgctgccgcattgacgattctgtccggtcctgtccgcgtcggattttcagtcacaacacgaactcctgtatctgtctgagaagatacgatcatcggttccgttcctaaatatttgataataccgcttgtaaaagagtgcataatgtcggggacaaccgacgcaacgatcaccgaatcgatctgctttgagtcgattcctctgtgctccagtattccgcatatggtgaatccgtattcgtctgatgtcctcgcccgttttgtcgtcatacggaacataccgagcaggaactcttcctcgaacacacccattgtaatatttgtatttcctatatcaatcgtaagaagcattgtcttcttcctcccgctgtaccgaatcttttcatcggtattttccaaaaatatattcaatatatattttcgattttatctgatcggccgatcaacattctgccgtcaatatttcataactttgttcaaagctctctcccggcttcactttattgatatatggtttttccgaaagttctttgtcaaagccgacatcgtcgcaccgtcccatccacggttcaagacaaacgaaaggagcgtctttcacagaccaaatgccgaaattcggaaatcctttacatttcatgcctacatatggttctccacctttgtgacagagccatacttcgtcaaactgaccgccgtcaaaaatcagtgcgtcgtgttcaaacatttcctcattcaaagcgcagaatccatcttccagctccagcttgtacactgtgccgggatcggctacacattcggagagatctaccagaatatattcaagtgcctttttatccggaaatctcaacttataatccgtctttttctcatccgctttttgaaaacggaaagccggatgcccaccgatcgtaaaatacatatcgtcgtctccggtattgtgcacttcccatttcacgatcaggctgttttctttgagaatatatgtaacgatcagttcaaaatcaaagggatatacttcttttgtttcttcccctgatgagaacaaaaacgctgccttatcgggctttgtacagatgcatttaaaatcgttatcccttgcgaatccgtgtcctgacgtcggataagatattccgttaatctttactttatttttataggtttttcctacgttcgggaaaaggatcggggaatgtcttttccaatacgtgggatttccctcccacagaagttccgtctctttctttttatcatatatacgggtaacctcagccccatgctctgaaatctcaatacagagccgttcgttttccattttcattgcctctgtctccttttccctgaatactttcttttgcttttacactgcccgatccacatccggttcaggcagcgcatgtcctgccttcacatatctcatttaccggcatccggcacagatcttatttactgctgtcttccttgttatttgaattactgtcggcatcactgtctgaattttctacctgaacacaattatccacaaggtaatcaagcacagcgtctcttaaaatcgcagctttcagcacatcttctccaacctgttctacataagcatccacatcggctcccgcctgctctgcatattctttgaatttttctttgtattctttttctgacggctcaagtttctgcttttccgcgatcagtttaattgcctcgtcaaacgccgctgtctgctgtgcgctttcttttacttttgaattaaactcatcttctgtcatctgcagatatgtcgtgatgaactcagacaattcaattccgtataatcctgccatctgtgtatagtaatctgtcatctgctttttctgttcttccacagcgtctttcggatattttttcacatcgatctcttcgagaagcgcttcctggatctctgattttaatgttgtctcatttgctgtctccgcgctgctttcaatctgtttacggacttctttgcggtattcgtccgctgtttttgccgtcttgctgttgcttgccacccactcgtctgtcaattccggaatgttttgtttgtaaatttcattcaatacgatgtggaaacgtgcaacttttcctgccacatctgttcccggataagaatccgaaaacttcacttctatatcgaattcttctcctgtactgtgtccgatgatctgatcttcaaatccggcataaccgccctctgctccgataaagcttccgcttccgagctccagatcggatcccgtcgctgttcccccttcaaatgccacatcatcgatatatcctgtatagtcaatgtttacccaatcgcctttttccgccgcacgatctttgatcggctctttttctgccgccgcatttaagtttgcctgaacagactgctcaacctgctcatctgtcacttcaaccttttctacctgtgcaacttcaagacctttatactgctttaccgttacatagtcgtttgacaatgttttacttccgcatcctgcaacggaaagagccaccattgccgcaagcatcattgatacaattctttttttcataataatctccttttttgtccgcgttttatacgcgtcttttatttatatttatttttactgcatgcatatttgccgtacgtttttttgattttcacgtacgagttccatctatatacgcctgatctttcctttatcatccttttacaaaagcggggaaagcaagcgcgaaaactgttctttcgcttttatgacaagtcctctttcatcatatactttccttgtcacctgcgtacacagcgtcatatcgttttcaaacgcacgttccaatctttgtactgtacgctcgctgtaaatcactgcgttcacctcaaaattcaacccaaaactccgaaagtccatatttgccgttccgacacatgcgaccatgccgtcgatactcaatgtcttagcgtgaagaaatccgttgttgtacacatagcattttgctccggcggcaaccatctctccgatataagagtaagtcgcccagtaaacaaacggatgatccggcttgcacggtatcatgatccgcacatcaacgcctgattttgcggcgattttcaaagcgtccaagatcgaatcgtccggtataaagtacggcgtctggatatagacatgatcctgtgccctatgaataagtcgtaagtaattgtcgtggatcatcttcgttttcgagtccggtccgcttgatatgatctgcaccggatctcttccgtttctcgtatattgcggaatttcaaacaatgaatcttctaaaaacaagttttctttcgccgcataattccaatcgagaacaaaccggactgccagcgacgttaccgccgcgccttcgatacacagatgggtatcccgccaataaccgaatttcttatcccgtccgagatactctcttccgacgttaaatcctcctacaaaaccgactcttccgtcaataacaacgatttttctgtgattccggtaattcacacgaagctgcagctgcccaagcagcgccgggaagaattccgcaacttgaattccttctttttcgaggcgctcccagtcacggtttttcatcgttctgcatcccatactgtcaaaaaggacacgaacttccacgccttctctcgctttttgaataagtaccttctctacttcctgccacaattcatcgttgcggataatgtaatactgcatgtggatatatctcttcgcctgcttcatctcttctataagcgcacggaacttctcttttccgtccgtataaacgcgaatatcgttattatctgtcagaaccgcttccccggcttccagattataaagaatcagatctttaaaccttgacatctccggattcgccatgcgaagccgtttataataaatcgtctcctcctgccgccggactgcatattttagttcaccttcgatctcttttgctttaaacatcctgctcttgtggaaatcctgtccgatgatcaaatacataacaaatccgaggatcggtataaaataaagcaaaagcagccatgtccaaacagtctgcggggatctgcgctgaaaaaagacgatgaccagcgcaaggaaaatattgatcagaacaatattatccataataaaattatagacactcaccgctgcgttccaaatcatttctgccataaataatataactcctttttatgtactttcatgtactataacagtatactcgttcacctactcaaaagtaaacccctttttacttgcactacacaaaaaacaatgttacaatgatatttgcgtaaatgcggaaaataacattatacagtaggatttaggaggagttgtcatgagtacattcaccattgtgatgatcgtcattctcgtgatattgatcggggtgctcgtcggtctttacattttcggaaagaaggccgagaaaaaacaggcggaacagcaggagcagatggcagcggcggcacaagttgtcagcatgctcatcatcgataaaaagaaactaagattaaaagaagcgggacttccgcagatggtcgtagacaatacgccgaagtatcttcgccgtacaaaagttccggtcgtaaaagcaaagatcggcgcaaagatcatgactcttatgtgcgagaacaaagtgtttgaagttcttccggtgaaaaaagaagtcaaagcggttgtaagcggactctacataacagagatcaaaagcgtacgcggcggttctatcgaacagcctgaaaagaaaaaaggatttttcaaaaaataattaaaaagcaaaaaaacagacgtcacgaaggaatattccttttctgctgcgtctgttttttgttatttttctttcctaccggatatccagctgcatggagacccctttactgtttcgcggcacaatgctcatattaatgcgacagtctgccataggttcgtgatttacatctaattcataagcgactttaacgccgatctgatcttcgtctacgctgatctccatattttttgtatttacgcctaccagcatctgaccataaggcgtcttataatatgtcagattttttttatttttttcaaataccatatgagaggaagtaactccgcttttcataatttcaagacagtccgttcccgtgatcttgatcttatttttaatcgtgcctgccattccttcaagaacttcatcatagagaatataatgttttccattccggcagtaataatttgccggagtcacaacttcaatcccatcttctccgacttcatatccccttgcaggatcgtccataatatcgatatgtttccccgaaatgctgactaatacatcttttgtcatcaatctaatactcctcaatattcactacattcgttgtcggcacgtcaaacggcattactgtatttgcgaatctgcggaatttttccgccgcatcacttacataaaaggagtatacactgtgctgtgcatctgtcccgtcatttgccatttctttttcatacaaaagctttttcagatccatagccgtttcatatgccggattcacaatcttgatctcctctccgagataatcgcggatcttagatctaagaagagggtagtgggtgcaccccaaaatcatagcgtcaatctgtgtgtgccgcattgactccaaataatattcgatcacttcttctgtaacaacatgttccttaaacccttcttccaccagcggaacaaacagcggacatgccttttcgatcacttcaatatccggagccatgctttggatgactttcgtgtacattccgctctgtacagtcgcatccgttcctataactccgactttctgattccgggttgtctctacagccgctcttgcgcccgggatcacaacacccatgatagggatatcaaattcatctctcacggcatccagcgccaaagcgctcgccgtattacaggcaataacgatcgcttttacctgctttgttttcaaaaagcgtataatctgctctgaaaaacggatgattgtattctgcgacttacttccgtacggaactcttgccgtgtctccaaagtatacgatattttcattcggaagctgccgggaaatctccctcgcaaccgtaagtccgcccactccggaatcaaaaactccgacaggcgcggtctttttgcagtccatttgcatgattccctccatcgtgcaaacagccggtataaatttataccggcatgtttttagaaatatatgtctgttttttcttacagtgcaagtgtttttgccacttcgtactgatactcggatactgtttttttcatagccagagcttcttcgatatcatagtctacatactcgccgttcttatatcctactacacggtttgtttttccctgacaaagaagatcaactgccatagatcccatgatcgaagcatatactctgtctttacatgtcgggcttcctccacgctgcatatgtccgagaatagtcgctctcgtctcaatacccgtcgccgcctcgattctctttgccatgttgatcgaatcgccgataccttccgcattgatgataatgtaatttttcttaccgcgttttttatttttcaaaatatcatcaatgatctcctgctcgtcaaagtcatgctcttccggcataaggatacgttctgctccattggcaataccgcaccacaaagcaagatatcccgcgtcacgccccataacttcgatgatgctgcatctttcatgagacgtcgaagtatcacgtactttatcgatcgcttccatcgccgtatttacagcagtatcaaatccgatcgtgtaatctgtgcaggcaatatcaagatcgatcgttcccggaatgccgatcgtatttacgccgaggttcgcaagtttctgagctccggcaaaagaaccgtctcctccgataactacaagtccgtcgataccgtattttttacagattgcagccgctttctgctgtccttcttccgtacgcatagatttacaacgcgctgtctgaaggaacgtacctccgcgctggatcttctcagacacatcgcgcgctgaaagatcaatgatctcctccttcaaaagtccgtgaaatcctcttctgataccacgcactttcagtcctcttgaaagcgccgttcttacgactgcacgaatagccgcgttcatacccggcgcatcaccgccgcttgtaagaactccgattgtacggatctgatcttcaatctcctctaagtacttttctttttgattctctgccatgatttttccacctttctgcaaagtgtcgctattaataatatttattcattgtaatttttttaacaatagtcgaaaattattctacattatttagaagtggttttcaatagctttttcaaccacttttacccgactttcaccgaaatggttcattaacctgcttaaaacctgctcattgatctgaatattccggtttttcggcagtcgtttcactgcccgttcttttgcgcaatatataataacctcgtcttcgccttccgaatctgccaggtatccgtaaacgatctgttcttcatcaagaaacgtctctttatccggaaattgaatccacaattctcgttttgtcctctcaaaggggatcactttctcacagatcagcttacttgccttctcgtcttcttccgaaacccttccgctgataaacactttctcgtttatttcaagccattgacgatttttctcgtaatctctcggaaaaataacaacttccacagtgccgagcaaatcttccagcgtaaggaacgccatcacctgattcgtctttgtgtacttgaccgtcttgtcaacgatcatccctccgacaaccgacttttctccgtcatgcaccttcgttctattcagttcctcgtcaaactgaaaatctgccgttgtagccgaaatcatccgccgccatctctcctcgtgctcctcaagcggatgaccgcttatataaacgccgagcacctctttttcaaacgcaagcttattttcttttgaatactcgcctacatcaggcattctgatctgaaaatccgccttttcttcttctcccacaagatcaaacaaactcatttgaccggacatggaatattttttctcctgattcacatgatccatgatctgaatataaatactcatgaattgttttcgggttccgcctaaagtatccaacgcccctgctttgatcagattttcaatagttcgcttgttcagtccttctttcgatgaaacacgggtaataaaatcttcaagatttttatatggaccaaatgtcctgcgttcttcgagcatcgccctaacaaccggtctcccgacacttttgatcgcagacagcccgtatcttatattcccttcgtcaaccgaaaaatccgcttctccgttattaatgtcaggaggaaggatctgaatgcccatctgccggcttgcataaatatattcagctactttcgacggattgtctatcaccgatgtcataagagccgccatatattcaacaggataataatatttcagccacgcagtctgatatgccacaaccgcatatgcggccgcatgcgacttattaaacgcatagtttgcaaagtcaagcatctcatcataaatcttattcgcaacctgctcgtcaattccgttttttacacatcccggaataccggaagcctcgtcaccgtacaggaaaatctgccgttcccgtttcatctcttcgccttttttctttgacatggcgcgcctcaaaagatcgcttcttccgagggaatatcccgcaaggtcgcgaacgatctgcataacctgttcctgataaacgatacagccgtatgtcgaattcaggatcggctctaactgcgggcagtcatatgaaattgaagaggcgtcgtttttccctttgatgtactgcggaataaaatccatcggaccggggcgatataaagagattccggcgatcatatcttccagactgttcggtttcagctctttcataaagcttttcattcccgcgctttccaactggaagatgccgtctgtttttccggtcccgatatattcaagcacttttttatcatcataatccagcgtgtccatatttaccgaaggatctttttttctcgccataagaactgcattttgtataaccgtcaacgtacgaagtcccagaaaatccattttcaaaagtccgagctgttccagtgtcgtcatcgtaaactgggtcgtcaccgagccgtccgccgctctcgacaacggcacatattcgtcaacagacttctgactgatcacgactccggccgcatgcatagaactatgtctcggaagtccttccagtcttttcgccatctcgataagatattttacttcctcatcatcttcacacatcttgcgcagttcaggatttaccttcaacgctttttcaatcgtcatcttcggctcctgcggtatcatcttcgcaatcgaatcgacaaaagcatacggcatatccatcacacgccccacatctcgaatcacacctcttgccgccagcgttccgaatgtcacgatctgaacaactctgtcttttccgtattttctcacaacatagtcgatcacttcctgtctgcgttcataacaaaagtcaacgtcgatatcgggcatggaaacacgttcgggattcaaaaaacgctcgaacaaaagctgatatctgatcggatcgatcgtcgtaattcccaggcagtaggaaacaatacttcccgctgcagacccccggcccggtccgactgcgatcccatgatctttcgcatattttataaaatcccacacgatcaggaaatagtctacataccccatatttttgatcgtgcccaattcataatcaagccgttcccgaagttcatccgcccgttctgcatagcgtttctcaagtccttcgtaacacagtttccgtaagtattcccacgatgtatatccgtccgggacgtcatatttgggaagctttgttaccccgaactcaatctccactaaacagcggtccgcaatcttctgcgtattttcaagcgcctgaagcgcatacggaaaaagacttttcatctcttcttcagacttgatgtaatactgtccgccttcatatctcatcctgttctcatccgccagccttttccctgtctggatacacaaaaggatatcatgcgctttttcgtctttcgcataagtataatgcacatcattcgtcgccacaagttcgatccccgtttcccgggacattttcaaaagctgttgatttacaagaccctgatcaggcagaccgtgatcctgcagttctaaataaaaatgatcttttccaaagatatctctgtactccaacgcagctttcttcgcttcgtcatataagcctttcatcagatatctcgacacctcgcctgccaggcaggcgctcagcgcgataatgccgctgtgatattttctgagaagttctttatctacacggggtttgtaatagtatccctcgacaaagccttttgatacgattttcataagattggcataaccttcgttattttccgcaagaagtacaaggtgataatacctgtcttctcctccggtcacttctctgtcaaaacgggaattcggcgcgacataaacttcacaccccaagatcggattaattccctgacttttcgcctctctgtaaaaatcaatcactccgtacattactccgtgatcggtgatcgccgcactgttcatcccaagctctttcactcttgcaacatattcttttatcttgttagaaccatccagaagactgtattctgtatggacatgcaaatgtgcaaaactcatctttcacctcgtaagccgacccacaaaaggtctatctgttcttgtttaccgcaaaaatctttcccacctcgttgtcgatctgtatctttccttgtttcagaagtcttccgaccgcacgtttaaacgccgctttactcatccccatctccgacttaatcctctccggatccgccttatctgtaaacggaagcatgccgccattcttttcaatacgtccaaacaccttatccgcatccgcatccatctgttccggtatcttcccgcgtatgctcagatcaagctttccgtccggcttcacagccgtcaccctcgcttcaatgcgctgaccgatatacatcttctcgtaaacttcccgcttcgggatcatcgccgaatactgatcgtccacagcgacaaacacaccgaaatcccgacttaattcatacactgttccgctgaccatatcgtcttttttgtacggtgaatcagtacgaagaagctgatacactttcatcgtcgcacacagtctgccgctcttatctatataaagactaacgagacatcgatcgcctttttctactctttccgtctgttctttgaacggaagcagaagttctttttccaatccccaatccaaaaatgctccgatccttccaacatccgtcacttcaagcacagccgtctttccgatcgtaagcttcggttcattcgtagttgctatcatacgatctgatgaatctttatataaaaacacctctatcggatctccgacttctatcccttgcggcacctgctttttaggcagaagcaccctctcttcgtcgttgcccagatatacgccgaaatcaacgatcttcacaacagtcagaacttgtttttctcccagtttcatacattttctcctttattgttctgaaacaaaactttctatttattgtatcacacccggatcgattgttccatactctccgtcaaatccggagttccattttatcttccctttccgaagtttgtcaaccagacatcccgtctgttcccctgccgtccggctgatctgttctacaggtatctttcgcagcacttcaaattcagggccaagctgcacaagaagccgcatatactctcgttctgtacgtttccctttcacagcagatccatttgccatggcaatcacttccttaagcgggatcagactctcaaacggttctttccccgccgcagacttcgcctcctcttccgatctgtctgccatctcctcgattctgtgagccactcctaccgtcaccgcgcgcccgcatacaggacatactcctccatgtactttcgtctcctcaggagtaaaacaaactccgcattttcgatgtccatccaaatgatactttccttcctgagggaaaaattcaatcgttccgcacaaaccgtttcccgtccgaatcgcctctgcaatgcctctgtaagaaagttccacatcaaaaagagtcgcttcccgacctaaatttcccggagaatgagcgtccgaattagaaataagccgataatcatccaatacagatactcttcggttcatcaacggatctgacgaaagtcccgtctccatagcatatacataggaagtcatatcgccgaaacactcatcgggcgtttcaaatcccgaaaactctccgaataccgaaaaatgcggcgtccatatatgagccggaatataaatcgaattcccacactcgtcaagcgccagttcaagaaggtcccgacagtcaatccgaagtgtcggccgaccgtccgaacagatatttccaatctgtgaaagacgatccgcgatccgctctgccgcctcaaaatccggaaggagaagtagactgtgcaccttccgggaacgtccttcttttttatacaccgaactgatttccccacttataataaaacgcggaatcatctctttttgtccacgcccgtatgcgtcgatttttttcccgtccgcttcatcataaagtctgtattcttctttcaatatatataatccatcttccgcaggagccagcttttttttaactccgcccgccatgccggatgtgtaaaatcacctgtcccaacaatatgaattccttttctccttgcccataaatcaagatattccagcgtacatgtcttgctcgtcgcataagaatagcgggaatggatatgaaaatctgcaatatacattttatctccccgatctgattttgcggtattttccgcattttaggtaaatagttcagccatacagcgtccgtctatgagtaaaacagtggcatcagccacgataagcacgcagtgcggttttacgaatagagcgggctgaactgttaccattttaattcatttattttataatcccttccgcatttgatgccattgttctccgccccaagatgaatccgatatcccttcatcttcaaagcccatctttttgtacatctcgacttttgcgtcaagacatgtcaggatcaacgcacatctcccctgctgcctttgtatcccggaataccgccgcatcagttctgatgccactccgattccccggtacttcggcaaaactgcaagaccgagtatcatcacgttatcacctgtcggatcatgcaagtctgcattcctgaaaaattcatctttcaaacaatccccgtccgttgccagaccattcaaaaaacctgccacttcaccgctttttctgtcaaccgccacaaaaaacaattcccgaatcttaagagcccgccgcttcatcatctcttcggtacacgcctcgttaggagggaaacatactctttcgacagacgcagcctgcacagcttcctcagagaatatagttcggaactcgaatctttcttcaagctttattttttcatttattataatactttgctcaaaatctctcatgtcatacactcctgcactctctgccgtcatataacacagcagcagatcttctttttaaattgtagtatactgcctgaggaaattcaaggaaaagaactctcttcctccgttcctgtttgcttatttacaccaaacatattaaactatactcaaacctgccactacataattaccggaaacactaaacgacacatttcagtattgtgaaaagccaccgttccagcaaacagctcctaataccactgttccacctgacagtctgcccacaccttataatgatccgctccttataataatgagaaacaagaggaaacaatgatatacgaaataaaagacacaaacaaaatttcacctttatttggacactgggaagaaacccttatctggtcatgcctgcagggaatcatggggaaaatatatgcaaacgacctcaccgcccctactgcggctatggccgtgatcggggatttcacctttttcgcaggcgaaccatgcccggaactgatcgcttatagaccgccccactgtactcaaaactttatgatcgccgttcctcaaaataaactttgggaaaacatgctcactcaattttacggtaaaaaagcaaaaataatttctcgctacgcaacaaaaaaggaacctcctattttcaataaacatcatttagaaaaaatcgtcgcttccctgccaaaacaatatacactttccatgatcgactcgcacttttacaaattatgcaaatcagaagcatggagcaaagatctcgtatcacaattttcaacttacgaaaaataccgccgtctcggaataggcgttgtaatatccaaagacgggctgatcatatccggtgcttcatcctactccagatatcaaaacggcatcgaaatcgaaattgacacacgaaaagaataccggagaaacggctttgcctgcatatgcgccgcaaaactgatcttagaatgcttaaagcggaacttatatcccagttgggatgcacataacaaagcatccgccgcactggcagaaaaattagggtatcattacagtcacgcttatacggcgttggaaatatgggattattaagattattgtagattcggtttctaatcctgccggcgacgtggagaaaagagcaatggataatatctaaaattcctgtttgaacatcgttcaaatgaacgtatgtcggatgaagaatttcaaaattattgtcatttgattgtcactagacatagagagccaagaaagcccgcaaaataggcatttcttggctctaatatattattcgaattcaatcgtcgccgggggcttcgggctcatatcatagcacacgcggtttacgttctcgacctctgccaggattctgttagtgattctgtcgagaatctcccagtctacgtgctcgatgctggctgtcatcgcgtcgatggtattgattgcacggatgattaccatgtactcaaagcatcttgcatgattcttcattcccacagacttgaaatcgggtactaccgtaaaatactgccatactttcttgtccagtcctgcctttgcgaactcctcgcgcaggatagcatctgactcacggacagcttccaggcgatctcttgtgatagcgccgaggcagcgaacaccaagtcccggacccgggaacggctgacggtaaaccatttcagcaggcaggccaagctcaataccgcaggcacgaacttcgtccttgaagagctgctttaacggctctaccaattcaaactgcaaatcttccggaagtcctcccacattgtggtgagattttaccatctttgcagtcttggttccgctctcgataatgtccggataaatcgttccctgtccaaggaaatcgattccttccagttttctcgcttcttcctcgaaaacacggataaattctccgccgataatctttctcttctcttccggatcagatacattttccagctttccaaggaaacgctctgtagcgtctacataaatcagatttgcatgaagctggttgcggaatacctctacaacgctttcagattcatttttccgcatcagaccatgatttacatgtacgcagacgagctgctgtcctatcgccttaatcagcatcgctgcaactacggaagaatctacgccgcctgacagcgccaaaagaacctttctgtctcctacctgtctgcggatcagctctacctgatcttcaataaagttcttcatgttccagtttgcttctgccttacattcatcaaatacgaactttttcaacgtctcctgatccggcaggctgtcaaaacgaacgtcgcatctggatgcaggatagtctacggaaattaccggatagccccatgtataaagctctggtcttacttccacttcttttccatctaccacacggttttctccgccatttaaaataattccttttacattgtcaagagcctttatttcttcctctgtaatatcatgaggatgaatctcgctgtatacgccaagttcacgaatctcccgggcgagtaccgtattctctgtacttcccagatccaaaataacaatcatatcctgcttcatttgtctctccttttaactggtcagattatttccaacatttttattttactgattttcctttagtttcgcaagcaatatttcaaatattctctatcatccactgcggacgctgtcacagctctttttatcgcctgctgcatcgcccttgccgccagtgttccggctacatttacatcgctttctacctctcccacactgcaggcatagatgctgtctccgtcagccatagttccaaccggattgatgcatctcgcatacgcatttcttgccatagaagcaattttattcagctttgccttatcaaaacgtgcattgcacacgatgcagccgatcgtcgtatttgtatgaaataaatcctgaggcgtcgtcatcatttctacaaacgcctcttccaaatccacaaatttcgttctttccgcatccataaggcctgctatcttttgtccgttctccggatcaaaaacatctccgaatgcattaacgactacgacagccgctattttcagctcccctgcctgaagcgcatagatacccagaccggactttgtcgcccgttccattccaaacagctttcctacgctggctcccgttcctgctccgacatttcccatcgatacatcgcagccttccatcgcctttctacaggcctcatatcccatatccgcatccggacggatatcgcttcttccgtatcccaagtcaaaaatgcaggactgacatacaagaggtattttggaaaatcccgtgtcgtatccaatcccctgctcctccagacagcgcatcacaccgtccgaagccgccagaccatatgcgcttcctcctgacaacacgacagcgttcagcggattatctgccgtcatgctgtctgtaagcggcgtttctctcgacgccggacctcccccgctgatgtcgcagcctgcctgtgcgccccgtttaaagtacaatacgcttgcgcctgtctttgcttcattatcctgcgcatgtcctatggatacgccatctatctctgtaattgcgatttcccttataaatctgtccatcaaatttccctctcaccctttctgttcacacccgaagctattcggcaaccactgccgttccgcttgccgttaccataagcattccgttacctgcaccgagcacctcataatcgatatcaacgcctacaaccgcattggcccccaaatctgccgcacgctgttccatctccttcagggcgttctgtctcgcctaaacaagctcttcctcatagcttcctgatcttccgccgaaaaagttgctgaaagaagccgcaacatcgcgcacgaaatttacgccagatatgacttctccaaatacaattcccttatattccgtaattcttcttccttctacagacactgtcgttgtcactatcattcccattcctccgtttcttccttttatagggtactgtgaaagtagaagctttctgttgattgttgcaaaatgcgttacaaatttattatttatatcatagcaaaaatcattttaagatacaatcgtttcctggcaggaaatcctgcctggttactaaaattaaattcccccaaatttttacgaaatagaggggtgtctatctttcaatttcttgtgtgatactttaccgcacatgaacattggcagagggaatgaaacaaaaagacattgcatttcagttaggtatctctgaagcctatgttactcaactcaaaaaagttatagcattttttcttactagaattagagccattttagggccaaaaaccataaaacaaccccggaaatgcccattttatcagcatttccggggttctgtccgttattcaaactcgacaattactaatcaattttgtttagagattattctctgtcgtgtttacagttcttttgattatttgatttatccatattatcctgcctatacaggctaatgttatcattttgttatcggtgttgataacacttgctctgtaactgtggataatagcactatattctatttcagatcataagcgattttgcttaaaaaatcaatccctattcaaattcataccattccttaaatctcagtctttgagcaaaatacgattttttttatattcaatcatgccatctttctgcattttagaaagctcgttgcacatagtactgcggtcaacatt

SEQ ID NO: 7746 - DNA, 367 bp, Unknown
  gut microbiota DNA sequence
agaagtatgtccggatcatattcatttacttctgagtatcccgcccaaaatgagcgtttcgggattcatgggatacttaaaaggaaagagtagcctaatgatatttcagagattcggaaatatgaaatttgcataccgaaaccgcgagttttggtgtaagggatactatgttgatacagtagggaagaacacggcagcaataaaaagttacatagccaaccagctaaaacaagataaggaaatggatcagattagtctattcgatccgcgagacccgtttacgggtagcaagtaatcctgcgcgtggctggcaggccaataaaagacgcacttgtgcgtggctagtaatattagggctatgcccgaa

SEQ ID NO: 7747 - DNA, 247 bp, Unknown
  gut microbiota DNA sequence
ggctcttcctccccggagatctggtagttctgcacgatttccatgaactggctgtattctttcagtacctgacacttttctaagatttcatgatgctcttcctgccggatattgatgacctttacttttaattccagactcggctcaccatcttttacgatataggcatctgacaggcgcaattctttttccttttcccacttttcttttccgttatagaatgtgtaaaattccggtgtcggaaggg

SEQ ID NO: 7748 - DNA, 334 bp, Unknown
  gut microbiota DNA sequence
agaggagaaatcaactctctcctctgttctatgaagttatctttgattaatttatatggagatgaaactgttcaatcagatgagcaatattttcttctgtatcttcaagatcatctgcaatttcggaaattgtttttcctttttcaagttttttccggatgagagcacttttttcttctattcgtccttcttctcttcccttcttctgcccttcttctcttccctgctttcttccttcttctcttgcctcttctctctgtacttcgatatctgtctcatagtcgtattcgtctaataacatattgacaacctcgcttccttttcgcattaaata

SEQ ID NO: 7749 - DNA, 254 bp, Unknown
  gut microbiota DNA sequence
gggagaaagtcctgcataggcaagtatcttgtcaggggaactaaaacggttgaagtcgccaatctcagcaatgatcatcgcacccattcggtaattgataccggggatggaaagaattggagagcggatttcgtccataatggatttaatggagcattctatttcatcaatctcagaagttaattcctgaataagccgaattgtgtgctttagttcaagagattttgcaggcatatttgaaccgatggaatgtt

SEQ ID NO: 7750 - DNA, 205 bp, Unknown
  gut microbiota DNA sequence
agccgagtttccttcttctgctcagattgcttcatgccatctgactcgcctcacaaatctgctggcgaatgcttctaagggacactacaataaggaaaaagccatagaaatccgaaatgccgccaaacattccatcggttcaaatatgcctgcaaaatctcttgaactaaagcacacaattcggcttattcaggaattaacttct

SEQ ID NO: 7751 - DNA, 627 bp, Unknown
  gut microbiota DNA sequence
tttagttgcacctgggcattctctatgaacacgttccatatatcctggtaatgattttttattaatttctcttccttgtacctttactcgaagctgttcattaaaaaaagacataagaaaactttccaataatgctaccgtaatttctgtttcccaatcacttgcagacttaaatccataaataaatacatctgtccctatttcagatcttctatttatactatcaagtttcggtattacctctaccggattattgccttttgtttctccataataaccaatcccactagtcatcaacgctccatcttgatatgacattaatcttgaaatgccttgcgcggcacgctcatatttctgattgtatgttctgtaaaacaccaatctataatgtgaattactaaatggtgcactttttccgataccaaatgctccagccttatcatcacctttattcgcaccaccatcaatttttatcaatgcattccatccatcgaaactaaaatcaaatggatcatcggattgtgtatatggatctgaaagtcccgttgtattgtaatcactaatcctgagtaaaaaagtattctccttttctgcctcttttatggcatctttcaaaaaaagtttagc

SEQ ID NO: 7752 - DNA, 205 bp, Unknown
  gut microbiota DNA sequence
agccgagtttccttcttctgctcagattgcttcatgccatctgactcgcctcacaaatctgctggcgaatgcttctaagggacactacaataaggaaaaagcgatagaaatccgaaatgccgccaaacattccatcggttcaaatatgcctgcaaaatctcttgaactaaagcacacaattcggcttattcaggaattaacttct

SEQ ID NO: 7753 - DNA, 225 bp, Unknown
  gut microbiota DNA sequence
gtgtttgtcttggtcaagaatcactactagcaattctttccctctttactgttttggcattgaacacttaatgagtctctcacgaatttagtgtgaaagccgaacctcatcttgtatcaatgtagttcttaaaaatttttctctttaaagaaattttcaagggttgttgtctattgttcagttatcaaggttctttctctgttctgtctcaagcgacagctttta

SEQ ID NO: 7754 - DNA, 205 bp, Unknown
  gut microbiota DNA sequence
gaacaatttcatcaagattaatggtttggtcaagtagagaaagaaactgatatttgtcattatcgaatttattttggcaatcttcaaaaacttctgccaaagtgagctgcttatatggtatcatataggtacatctcctttcgggtggttggtttatagtttctaggcaactctattttaccacaatccgttgaggagatgtttt

SEQ ID NO: 7755 - DNA, 235 bp, Unknown
  gut microbiota DNA sequence
catcgctgtgatattgtcaacaacttttttcactttctgatcttccgcctccgcgtcttcagataagtttttctgttgtctcccgctatccgatcgtttacagttcccattctttggctgttccgcctccgcgtctccaaaagtctgttcctgtatttcgtatagccgtcatcagcgacaagtgatatcctatcatgtatggaagtaattgtcaatgtttttcttgttttttatt

SEQ ID NO: 7756 - DNA, 205 bp, Unknown
  gut microbiota DNA sequence
taacaaggcgtgagatagaagttttcagttttgctcgttcttgtactttatcaaacctgtatctggttaatgacttaagctcttcgttgtgataagatgtgtttgagtaggactgtaagtttactccagacatcatcataagagcaatcgtatgggcatccactttatcggtttttgtctgtctaaggctaagacttttacgaaa

SEQ ID NO: 7757 - DNA, 373 bp, Unknown
  gut microbiota DNA sequence
caggcgcagttctttttccttttcccacttttcttttccgttatagaatgtgtaaaattccggtgtcggaaggaaaacgattttcttcttataacggcttctcggcggtacaagcctttcataagcacgtccgatatacagcagactccgaaggggcatgttttcgttgaccgtagactgatgctcgccgaatacgatcacttttcctcctgcgtcaaaagaaatatcgttttgaaaattcatgtagatcgtattgtctacacggaatcttcgaatcttcgttccttccggcagcggctcatcatggattgcattaaaaagtgcgatctcattcgcttctgctgattcgtcctcatagaacagatctacaaag

SEQ ID NO: 7758 - DNA, 11778 bp, Unknown
  gut microbiota DNA sequence
tagtacaggcgggaaaatacttttaagcttgctgcttttaggtttactttcgccaaaagtttttcctctgaaaaagaaaacgttttctcttttttaagaccttctcttaaaaatcagtatacgaaaaaaagaactgttctacaagactatccacgcaaaaactgttgttgtattgtatcgggtaattttgagggaattcctcagaccggcgaaactgccggtatctttcacagatagaagttctgtgagtgaatttatcatagcatatctatccttcaaaaacaataatatttttcactttactattaaaaaacacctacatgaggtgaagagtttatttccactttgaacaaagtagattgtagtgtttcacttataaagaaacacagaaccacagggaatgtcagaaggcgcatttcaggattgtacatagccgccaaaatctccggcgttcccgcactctgacctatcacctatatgaaaactgccgacaggattacctgtcggcagaaaaactgtatgatactattttatttgttatgctttcaagatcaattatttatcacattctgaaaacagtttttaaattaagaacgttttttgcgtgatttcaacaccacaacaccagctcctgcggctgcgccgaggcatacgatccacggtactgcatttgctgtatcgcccgtctgaactgcgccttcaactttatcgtttttgtcgttcttatcattcttatcagtagtcggaagcttctcaaaacgagcctcgatcttcagatctcccgtaatcggagtattgaaatcaaattcttttccatccacgaaccaaccgatgaacttatatccttcttttacaggatcagcaggacgatcaagcgtcttgccatcttctaccgtaactgtttgtccgttaatgattactgtatgataaacttttgtatcatctttcttctcatatacagcttcaactgttgtatctttcaccggcacaaatgtataaggtgttccaagagcctctgtctcttttccatctactttccaacctttaaagatatatccgtcatttgcttttgctgtaacagttacttcacctttgtcattcatctcgctgactgtgattgttccgttctcactctctactgctgtaactttatactgtgtaaagcgtgattcaacattcatatcagatgtgatcggttttgtgaaatctacagccgtatctgttccaacaaggtagaaccctgcaaacgcatgacccggtttagacggctcttctactgtcagtgtttcgccgtcttttactttatgtcctgtcccgtcgatcgttaccgtccactctttcggctgcggatccggcgtttcaccgtttttcgtgaaatgagcgatcaaagatgtattcatttctacagcaaatgtatattccgcatcatcagataccttttctcctgtaagaatatcataccatcctgcaaacttatactctttattcggagtcgccgttacagtaacgttctcgtgctgcattacttttccgtcttttgcgctgcttgtaacttttccgcccttctgagccgcagcataaactgtcatttcttttaccttttcattgtcaacatcaaattcagatacagctacccaaccgtcattagatgtttttgcaacgaattttacaaactgaacttcctgctcgtcaaagtagaatgtcttcttagatgcatcagcggcaaattctgtattttcggcaacttttacccattcgtcaccttcatttgccttcacatataaatcagcttttgtcacctgaccacttgcatttccctgtcttggagtgaaggagaactgattgatcgtatatttctgaccgagattgatcactccgccgatctcatcaaaacttccctgcggtttcagcttatcgctttttccatctttccaatttgaatgccagattgtatttgattttccgtcaaatgcatatgtgaaaagaccttctgttttactatcagcaatattggtttctgtatcaacagatacttttgtccatgccgctttattatactcatcttttgacgagatcggatctgctgtctttacttctacattatcgatcgtgccgacgattgaattcgtctttgatccgatacgctgaacaggcagaagcagtgttgcatttttaatcccctgttttctgagcgtattatcagtctgtctgttgatgtaaattcctgttgcctgatattcttttccgtctacgatcaacacagttttcaacgtatctgtcacgatttccatatgaactttctcgccaaccggaagtttataatcgaagtagtaatcataaagctctcttctgaatccaactcttccgtcatccatgatgcggatatcatgtacataatcttctccgcccggtgtatctgcttcaaacaggatctgtcctgctcttgcttcttcagttaatgtaacgtcaaatgacagggcgtttccgactgcaagtttttcaatcggtgtcgacgcataactttcgccgcctttcagtttcagcgcgccgtcaatatctgcattctttgtctctttgatatctctgttgttttcagacgaatcttctttattgtcaaaaccgtaagacatatacttgccgtctttatctgccgtttcttcatagtacggattgcttcccggagcatctcccagtttctccgctttttcttttactgcggcaaactcaagatcttcaccttcgccccagcctttgcttgcaagaatcggaagcgcatcttcaaaacgctcaaagttatcaacttctgagattccctgtgcagcagtgtcaatattatcgttccaaatcgcaaacgtacttccgagcatctgatcagatcctgccggaattactgttccgcccatattattcggaatccaatttttgtaaaggtcttctgttctcagataatcgccatatcctcctctgcttccgcttccattcggaaccatatagagagaaccgtccagtgtattgataagatcaaatccatcgttgtacatctgtttcggattggagtatcctgtattccatacgttcaactgtacattttcgctttttaccggaactgttccgtctccgtcaatctgcgtcaaacttccccacatacggactgtacggtctttaccttgaatatatttgatcatatcatcggagaaatgacggaaagcattctcttcaccataatattcatctgttccgatatgtactgtcatactgtcgtcgaacatattgtctgtcagatattcatcccacacaccctgaacaaatgaaaggctcttaccatactgactgtctttggaattcacatcaccgcttaagtcaaactgctcgcctgcacgttttgcatttccgttgacagcttgattctgcggaagcatcagatcaggacgaacttttgtaaatgcacccgaatgtcccggagcatcaatttccggcacaatacttactccctgcgcttcagactcttcgataaagtttctaaagtcttcctttgtatagaaaaggtcttcgttagtcagatcttttttattttctccgcctgccttaatatcggactcaagacggaatcctgtatacgccctttctcgagcgacttctgcgctttcaaaattctcatagaagatcaagttatcattcaaatgaacctgaaaatcattcatcttgtagtatgccatagcgtctacaaaatcttccaatgactcaagagatgccggtttacgggcaacatccaagctaaagcttcttactttgaacttcggatagtcttttgtaatacctttcggaatctcaccgttattcagtttcacgatctgaagaatggaacgtgtcgaccagtaagctccctgcgcctgctcagcctttacatttactttatcgtccatctccatgatatagccttcttcaccgagtccgtttttatcatcttttgtaaagacgatatcgcctgcatcttctccgctgtctgcaacctgaagatcaacgccgtactctgctttataatctgctgcaagagcttctgccgctgccttaaacgcggcgtctttataaacgatctttgtgccttcaccgatcttaacagatccggcctctgttccgccataccactctgccagttccggaattacaaccggtttcgcatttgttccagcgttatcatatttacccggaatcgtaactgtatgttctcttgcgccttctgctgtctcttcaccttttgttactttgtaaattccctttacagttgtctctctaagcggctgatagatcttgccgtctcttccgacaacctgttcgtaatctgcgaggaactctacagtaactccttccggcacatcctgccactctaatccggttttgtccgcctttacagtcggagctgccagcttgtccgcaatctgttttgctgttgcattctcatcgatgacgcctgactccggcttcatcgcatatgcgccgaattctgccacagaaacattataccaagttcctgtcgcagcgccgtactccgttacgtttaatttcagttcttttgcccatacaggtttgtctaacttgataatctgctcggcttttgtaacctgctcgctgtttgtatgaactacagtaaattcgccgccttctttttctgccgcttcaatcgtatatttcttcggagtaggaactccgcttgccggcatttcccagtcgatcttcacatattctacccactgcgctgccggaagcttcacagtcagcgtacgggctgtcgttccttttccatcgctttctgttgcccagcgtgttgttaaatctccgtcaatcgcttttgccggaccttgttttcccggctcgctttgaacctcttcaaaattgcttgcttctgctgttccttccagacagtagttttcatccgggagaaccgtatcaggaatctcatttgcatagatctggaagtcataaagagaaactgatcgccaatttgtctgatcatctgccgcattcgccgtatatccgtcaatatataaacgtacataacgtgctgtttttgcctctggcaaatgaatattttcatttatatgagaaatatgacttgctcctgtttttgtatagacgtcttcccatgaattatcttcgcctgtctgtgaaatctggattttataaccggtaatatttcttctttcccatgcaagaacaaacgactggaatgtttttgcttctttcaaatcaatcttcagccactttgcatctgcatctccgcctacgttcgttgcccaacgggactgatctctttttgctgcagttctgttaacaataccgtcaacagctttatccgcgccccaatagtctgtttctttatcgttgactgttgctgttgaaccaatcgccagatttttcacttcatctgccgcctcaacacttagaggtgcaagcggagctgccaatccgaagaccattactccggcaagcgctcccgcgccggcgcgcgttaactttttcattttccttcccattttttacctctctgctttcttaaaatttttaacgagagaaaacacgttttcgtacttctctcgttacttctgctaataaacttccagtaaaaagtttatatcctgatttagtcagagtcgatataaaaaaccaactcgcctctagcgactctctcattattatagtttttttcatcataaaactcaatattttttatcactacataatttttttgtgatttttaacaatatttcctttttcatcctatgaaaacagcctttccgggcgcatcttctcttcaaaaatttgtcaattttactatttttacttttttacacatgtgtttcatattcacatactttaaaacaaataagcgatcgccaagtttctgggcatatccggactttcatccggtttctataagcttcctataaaacaaacgagacagcacatactatgatatgctgtctcgctgtatattactttaattatgcaagtttcatcggattaaccttcacgccaggtcccattgtagatgtaagagtaatgctcttcaaatactgtcctttaaccgctgacggtcttgccttattgattgcatcgataagcgtctggaagttgtccgctaactgttcctctgtaaaggatgctttaccgatcggaacatggataatgtttgttttgtcaagtctgtactcgatcttaccggctttgatgtcgttgatcgcttttgtcacgtccatcgtaactgttccggctttcgggttcggcataagacctttcggtccaagtacacgtccgagacgtcctacaacacccatcatatccggtgtagctacaactacgtcaaagtcaagccatccttcgttctggatcttcggaataagctcgtctcctcctacaaaatcagctcctgctgcttttgcttcttctgcctttgcgtcttttgcaaatacaagaatgcgaacttttttacctgttccgtgcggaagaacaaccgcgccgcggatctgctgatctgcatgacgtccgtcacaacctgttctgatgtgagcctcgattgtctcgtcaaactttgctgttgctgcttttttcactaatgctaccgcttcttctttttcgtagaggtttcctctctcgatcagttttgcagcttcgatatatttctttcctcgtttcattttacaataacctccttgtggtatttgcgggaacgtgcccctcccacttctttcaaatcacttgatgtttgtttcaatgcatcacggatgtttacattctgcccttcaaaaccgattcatcctcaccgcgctttgaatatgcagacgaaactctgtgcctactcttctactactacacccatagaacggcatgttcctgctaccatactcatagcagactcaactgttgccgcattaagatccggcattttcagttccgcgatctcctgaagctgagcttttgtgatcgtcgcaactttatttttgttcggtacgcctgatccggactggatcttgcaagcttttttaatcaaaactgctgccggcggtgtctttgtaacgaagctgaaacttctgtcattgtatactgtgatgacaaccggaatgatcagatcgccctgatctgctgttcttgcgttgaactgttttgtaaattcaacgatattaacgccgtgctgtccaagagccggaccaaccggcggtgccggagttgccttgccggcaggaatctgcaatttgatataaccttctactttttttgccatttcaattacctccttgtggtattgtcggggacaagcccctcccacttacttttaatccatttttttcacttctgaaaaactaagttcaaccggtgtgtcacggccgaacagctcaacattgatcgacagactcttcttctgttcgttcatgctctgcacagttcccactgtgccttcccatgctccgctaagtacgacaaccatgtcgccgactccgaaattcacgataacattatctctctggatgccgagattttccatctcatgctcctcgagcggaaccggttttgatcccggtccgacaaagcctgtcactccgcgagtatttctgactacataccatgtatcgtcattcatgaccatatggatcatcacataccccggaaacatcttgcgctgaaccgctttttgaacaccgtttctcaactctgtcgcttcttccataggaacgcgtacttcaagaatctgatcttcaagatgacggttctcgatcgccttatcaatattcgctttcactttgttttcataccctgaataagtatgaactacataccattttgcttctgacataaaatcacctttccgctgcggtcaactattttatcaataagtcaataccgtatcttaggattacgtcgatcaccgcgatcaacgctccgaggattacggaaacagcaacaactgccgtggtctgtcttgcaagtgttttcttatccggccaaataacctttttgaattccgcttgaagtcctttgaaccagctctttttctgagtcttttctgtttcactcataattccacttccccctgacgactacttcgtttctttgtgcagtgtgtgtgatttgcagaatctgcagtattttttagtttccatgcgatccggatgagctttcttatccttcgtcatgttgtagttacggtttttacattccgtacactccaatgtaattcttgtgcgcacaacttccacctccgctttaattattcactacttgttgctgacggctgcgaccccgtcaaaatttaggcataaaaaaaagacctacttccattcgccgtagtattgtaccacgaaaaacggaagtaagtcaagatgtttattaaattccattcatttctacatgaaatatatgaattatctctgtttttgttccagtcttttatatacactctctctaaacagcgtatatacaaccgacactaacggaataaagatcagcatccccacaacgcccatcaaactgccgccgatcgttactgccgcaagcacccatatggaaggcagaccgaccgaatttcccacaactttcggataaatgagatttccctcaatctgttgaagcacgagaaacataatgacaaaaaacaatgcctgcagcggatcgaccatcaaaatgaggaacgctcctacaacacagccgataaaagccccaaatatcggaataagcgctgtaaatgccacgagcacaccgaccagaagcgcatacggcatcttgaaaaggctcatcgccacaaaaaacatcgacccgagaataagcgcctcaagacattgtcccgtcaaaaaattagaaaatgttttggaagtcagtgtacacactttcagacatcttttttcccatttttctttcaaaaacgcatgcatcactttttttacctgcacgccgagtttctctttttgaagcaaaatataacatgcaaatacaaacgcgattacaaatgttgtcacaccgtttacgatagaaccgatcgcatataccgtagaattcagcacgtttccggcgccgtttctaaagaaagcgatcacgctgtccaaaagcttatccaaatctacgtccagattattcagccacgcgcgtatttcactgttgtctgtaaataactcttccagaaaatgctgtgcctccggtacaaatgcctgtattgtctttccaagcgaaagcactgtctgcgccagctccggaataacgacgaacatcaccagaacgacaactccgatcactgccacgatcgtaagcacaagactcaacggccgagccagccttttcgccagtttcttttcttttacccgcttatttccaaacaaagtttcttcaaaaaaactcattggcacgttcagcacaaaagcgattcctccgcctataagaaatggagtaacaatgccgaacgcaaagccgatccactcaaacagcagtttatagttccaaagtgcaatgagaagaatgatcgtaaaaacgatcaattctctcatctttttcatattttctttattcaaatccatatatttttaattcccgatctctatttttacccgcgaaatcgtaatgcttattctgtcagcccctgatcttcgatcaccttcacaacgctgtttacatacttttcgcatatttcatcagttgccgcttcgaccattacacggatcacaggctctgtaccgctttcgcgaacaaggatacgtccgtcgcttccaagctcgtcagccgctttttgaactgcttcctgaactgccggattttctctcgccgtctttttatctgtgacacggacatttttcaaaagctgaggatagatcttcacctctcccgcaagtgtgccgagagactgttttttctcaaggattacttccataatcaaaagtgaggtaaggatgccgtcgcctgttcttgcatgtttactgaaaatgatatggcctgactgctcaccgccgagaatataaccgtttttcagcatattctcatagacgtacttatcgccgaccgccgtctgctcatatttcataccgatcttatcacacgctttgtacagtcccaagttagacattaccgttgttacgatcgtgttcccctcaagacggccctgttccataagatattttccgcatatatagagaatcaagtctccgtctatcacttttccgttttcatctacagcaatacatctgtctgcatctccgtcataagcgaatccgacgtcaagctttttctctttcacaaattcctgaagaacgtgaatatgtgtagatccgcagtctgtattgatgttcgtaccatccggttcattattgataacatatgttttagctccgagcgcgtcaaatacgcttttcgcgattgcagatgaacttccgttagaacaatccaatccgactctcatatctttgaaagaacgtgttgctactgagataagatggccgatataacggtttcttcccgctgcataatcgacagtacgtccgatcttttcttttgtcgccagcggaagctctccgatctcaccgtctatatacgcctcaatcttttcttctacttctgcctctaatttatgtcctgcgctgttgatcactttgatcccgttatcataaaacggattatgacttgcagaaatcataataccgcagtcgaaatcttccgttctcaccacatatgaaacactgggggttgtcgtaacatgaagaaggtacgcatccgcgcctgacgctgtcaatcccgccgcaagagcatactcaaacatatagctgcttcttctcgtatcttttccgatcacgatccttgccttatgatcctgtccgaaataccagccgagataacgtcctaccttaaatgcatgctctactgtcagcacaacattcgcctcaccacgaaagccgtccgttccaaaatattttcccataatgattatcctctttgttcttttataatatttatgctgcaaaagaatcttctactctcttttgtgacataaacacattatattaccattacgaaaaagttacaagtatttcttatatgttacatttttctttttccgcacaagcgcttagttcgattccgcttcgctacatctcactaccgtgcgtctcgcttcgtccgcacaagcgcttagttcgattctgcttcgctacatctcactaccgtgcatctcgcttcgtccgcacaagcgcttagttcgattctgcttcgctacatctcactaccgtgcgtctcgattcgtccgcacaagcgcttagttcgattccgcttcgctacatctcactaccgtgcgtcgcacggtatatacaaaaaaagaattcgatatgagtaaactcatatcgaatcctctttttgtatatgtcgcgcttgtgctaaacgcttacattccagcctgtgctgctacttctgctgcgaaatcgtcaacttttttctcaagtccttcgcctgtctcgaaacgaacgaacttcttaactgttacgttagcattgttttcttttgctactttgtcaacgtattttgcaactgtaaggtcgctgtcctgaacgtatacctgatcaagaaggcagatttctttcatctctttgttgagacgtccgatgatcatcttctcaatgatattttccggtttctccgggttctctttcttagcctgagcaagaaggatctctttttcatgctccatgtattcctgagaaacttcatcacgggatacatatttcggagacatagcagcaacctgcatagctacat

SEQ ID NO: 7759 - DNA, 4071 bp, Unknown
  gut microbiota DNA sequence
ctcgtggcggcctacgcgctggtcaaagacaaaaaggccaccatgggctttgagcgcacaatgaacgacggcgagatcatgcgccgcctgatggcttacgccaagccttaccggaagcagttcgttgtggtgttgtttctgatgctgttctccatcgcctacgacatcatctcgccgctgatcgtcggcaatatcgaggagcttgtcgccaccgattttgccctgcccgcgctgtacggccgggtggcggtctacgccggggtactgcttttctcgatggccagcacctacctgcaagccgtgattctgcagcgcgtcggtcagcgcatcgtgtctgacctgcgcgaggacctgtttacccacattgagtccctctcccacgagcagctgaatgaaattcccgtgggcaagctggtaacccgcattaccaacgacaccaacgccatctcgatgatgttcaccaaccttttggtcagcctgaccaaaaatgcgttcgttattttgggcatcctggtggccatgattttgctgaactacgagctgaccctgatggtgctctgcttcgttccgttcatcgtcatttttacggtcatcttccgcaaattctcccgccgggcctaccgcaaggtcaaggatgccaccaccgacatcaacacctatctgtcggagaatctttccggcatcaaggtcacccagatcttcggccgtgaggacgaaaaaatggcggaattccgccagaaaagccagactcttgccaaggcgaacatcgagcagatttttgttttcggcatcttccggccgctggtgtacatgctgtacatttcttccatcctgtgcctgttttacctgggcggcatgggttacctgaccggcgtgtcattcttggggcagaccatcacaggcggcaccatcgtcacgttctacatgtacatttccaagtttttcacccccatccaaaatctggccgagcagttcaactggctgcaatcggcactggcctcctcggaaaaggtgttctccatcatggacattgagccgaaactggtggacgctcccgacgccatcgagctgaacgaggtgaagggcgagatcgagttccgcgacgtctggttcagttacatccccggcgagtgggtgctgcagggtgtgtccttccacatcaacccgcgggagaccgtggcctttgtcggctccaccggcagcggcaaaagcacaattttgtcgctcatctgccgcaattatgagttccagaagggtgagattctgattgacggcatcgacatccgcaagatcaagatttcctcgctgcgccgccattttggccagatgctgcaggacgtgttcctcttctccggcaccatccgcagcaacatcgtcctgcgggaggagggcatccctgacgaggagatccgccgcgtctgtcactacgtcaacgccgatcacttcatcgacaagctggaccatggcctggacgaggaagtgcgggagcgcggcaacaacttctcggcaggtcagcggcagctgctcagctttgcccgcaccatcatccacaagcccagcgtgatgattttggacgaggccacggcaaatatcgacacggagaccgagttgctgatccaggactcgctggaaaaaatgcgcagcgtcggcaccatgctcatggtcgcccaccgcttatccacgatccagcacgccgataacatcatcgtgctatctcacggcaaaattttggagcagggtacccaccaggaattgctggctaagcatggccggtattaccagctgtacaccctgcagtatcataaggagcagatgggggagtaagcccgttttgccccggtttccaggagatttctatgacctaccaccaaatcatccaactgaaaaacggcgcgtcctgctgtctgcgcagtggcaccgcggccgacggccaggccgcactggacaatttcatcctgacccatgcggaaacggataacctgctgacttacccggaggagaacaccctcaccgccacgcaggagggcgaataccttcaggccaaaaccgaaagcccgaatgaggtggaaattctcgccatcgtggacgggaaggtggccggcaccgccgggatcaacgctgtcggcggctgctataagctgcagcaccgcgccgagttcggcatcagcatcactaaggaattctggggccttggcattggccaggcactcaccgccgcctgcatcgactgcgcccgcaaggctggctacgcccagctggagctggatgtggtagccgataacgccagcgcccttgccctgtacaaaaagttcggctttgtggaatacggccgcaaccccaagggcttccgctcccgcaacaccggctaccaagagctggtcttaatgcggctggtcctgtaaccctacaacaaaacgcccccgccttggcgcaaaccgcgcagggcaggggcgttttattgtttttatggattatgcttctggcttatcaaattctttggctacctcctccagcagcttgcggatgggcagatgctgcgggcagatcttctcgcacttgccgcatttcaggcagtccgaggcgcggcggccgggggcggtgtggacttcctcgtagtagtagtccgcgttccaatcgtggtgcagctgcttgatgttcatgatagcaaacaggtctgggatggagatctgcttggggcagccctcaacacagtagcggcaggccgtgcaggggatcatgttcatcttgtggaagatctcctgcaccttgtttacggcggccagctcggtctcgttcagcggcttaaagtcgcgcatatagctcaggttgtccttcatctgctccatgttactcatgccggacagcaccatcatcatgccggggaatcccgcagcaaagcggatggcatagctggcggggctgccgccgtgcaggtcgtccagcacctttttggcttcctcgggcaggttgaccaggctgccgcccttgaccggctccatcaccagcaccggcttgccgtgcttgcggcaaacctcgtagcacttgcggctctgcacagcaatatcatcgtaatccaggtagttgaactgaatctgtaccacctcgatctgcgggtactcggtcaagatctggtccagcacctcggcgcggtcgtggaaagagaggcccacatggcggatcctaccctcggctttcagcgcaaaggcggtctcgtaggcgcggcaggccttgaactttttaaagttgtcggcgttctgggcgtgcatcaggtaaaaatcaaagtagtccacgccgcaggcttccagctggctttcaaaaaacgggcggatgtcagtctcggtcttgaaatagctgtcggtcagcttgtcggtcagactgtaggcctcgcgggggtagcggctggtcaggcactctttcagggccagctcactcttgccgccaatgtaaccgtgggcggtgtcaaaatagttgaatccctgcgccagaaactcgtccaccatgcgggtggtctcggcaatgtccacctggtcgccgttcatcggcaggcgcatacagccaaagccgaaattctttttcactttatccatctgctccattacattttgctcctttgctccgttttgtaagcgccgcgcttggcccgggtggtgctcataccgtccggcagaaattctgcagcgccgttttgctcctgcctttattataatagggcaggttcccgcatgcaagagcacccttgcaatttgtgtggcaaaacggtataataggcatgttgcctgtctcagtagctcagttggatagagcacacgcctcctaagcggcagatggttcgattccttcgagcaatgaaaattgcataaatcttaaaaatgtctcagtagctcagctggatagagcacacgcctcctaaggttgcgttacaacggccacctcaaaaaaaactaaataagggattgcagttcgactttgatcgggctataatcatatatcagacacgtccatatagctcagctggatagagcacacgcctcctaagcgtggggtcggaggttcaaatcctcttatggacgc

SEQ ID NO: 7760 - DNA, 8998 bp, Unknown
  gut microbiota DNA sequence
ctacacccagcaatacaaaaaacgccgggagtcgatacgcaatcagttgagccgtgaattgtacgaaaaataaagaatcgcagccgtgttatcttaaaaaataacacagttgcgttctttttatgggccgtgagggattcgaacccccactgaaccggttatgagccggtggctttaaccgttaagctaacggcccttattatgatgaagaagtgctgttgatggctaaatcgccaacttatcgccaaagcagaaatcttggcgatgaagttcagtaaaaactgcggcacttcatcatatttgaaagtggatgcggttgggtcagccggttatgagccgagagttctaaccgctgaactaatggcccgcacagttgtattttatattatagcagaattttctccccttgccaagaggtatgtccccttttctttgcatacaatggcggtaaaagggggcgttgattcatgcggcgcagggggttcttttgggcggttttcctgcttatcatttactttacagcaccgttctgggggtggcgatataacggtttcgcccccatcactgtccccgataccacgcctgcgccctcgcccaccgcagagcctgcagccagccagccctaccatgccgtatgggtcagctatctggagtggcagcaggtagacttttcctccgcgcaggccttttcagcagatattgccgccatgttcgacaatatcgctgatctgggggccaccgtggtgctggtccaggtgcgcccctttggcgatgccctctatcccagcgactactaccctttcagccatctttgcaccggcacccaggggcaaggccccggctttgaccccctggccctgctggtgcaggcggcccacgcccgcggcctgcagctggaagcctggatcaacccctaccggctgcaaagcggcagcatgcctctactgtgtgcccaaagtcccgccctgctccacccggagtggaccaaaaccacctccaccggcttatacctaaaccccgccagtgccgaggtccgcgctttcatctccgatgccgtcgccgagctgtgccataactatgacttagacggcatccactttgacgactacttttaccccaccaccgaccctgcctttgacgctgacgactacgctgccgcaggcacagctctttcgctggacgattggcggcggcaaaacgtcaacgccctgatggcactgtgctaccgaaccgcccaccagtacggtgtacggttcggcgtcgcacccattggtgacccggaccgcagctacgccgaccaatacagtgatgccgccctatggctggcacagggcggctatgtggactatctgatgccccagctgtattgggggcaaaactacaccaaaaacggcagcacagcccaaagcctgtgccagctggccgcgcggtgggcagccctgccccgggccgaggacgttaccctggccgtcgggctgggggcctaccgcatcggcgatggcgacggcagtgacacccccggtgaatggtcgaccggccacagcctggccgaccaactggccgcactgaacacacttggcatcgattacattgggctgtaccgttacgattctctatttaacaacaccgcctatcccaccctggccgcggccgagcaggacagcgtggcgcaaatctggcgcggcggctaaactcagcagcccgggtgggtgttcagccggtagccgaccttaaacacggtctgtatctccttatccaggcccagcttggtgcgcagacggttgatatgtacatccaccgtgcggctggcgcccacatactcgtagccccaggccgtggtcaacagttcgccgcgggtcagcgccaggtcgcgcttgcggatcagcatctccagcagggcatattcccgcggggtcagccgcacagacttgccgtttttccacacgcggcgggcggtcaaatctacccgcaggtcattgagggcaaacacctcattgcgccgggccgctgcctcctgagccgcttttacgatcatatctttcgtcatggctgtttcctttcgttgttatttactatatataataacgacagatgtttcggatttgttacaattccggccatttttttattttccccagccatttgttgattatttgggccttttcccccgggtttcctacacttttcaacatagttttccccaaccgtgttgaaaacttgtattttacgttatatcgtacaatatccaaaattacacctttttcctgtagaaatcactaccaggttttccacaagggggatggacttttcccctgctgattccgagcgttgcggcaagttttgcaaagttttccacggaataaaaggttcgttgtaccagcagttttttgttgtttccacaggattcaaccgtgttttcaacattttcaacatagttttccacatttccaatgtgtaaaagaatggattcttgttgaaaacccggtcgaaactgtttaaaactcatagttgtaaataaattgtaacagattttcaccatctgtctaatggctcgttttccgcaaaacaaagggatttttgcactttttgctaatatttcaaagtccattcatatgccgttcaaaattttagtccatgctatagaatgtacaagaaaaggaggaccccctatgaaagagaccacaccgccaaaggaccctaaaaagaaactttggattggttatgccgttattatcgcgattttgtttgcctgcaacctgttcctgttcccagccatgatgcaggccaaagtcaaaagcgtgaactacagcaccttcctgcagatgctggagaacaagcagctttccaccgtccagatcgaagatcagcagatctactttgtggataacgagaataactcctacaagaccaacgccatcgcccaggataacaacctggtcacccggctggaggatgcaggggtcgagtttggcactgtctaccaaagtcctaccatctgggacagcctgctgaacctggccatctcgctgcttccgatgatcctgctgttctggtggctgaaccgctacatcggcaaaaaaatgcagagcatgggcggcgctaactcgatgctgttcggcggtggcaagtccggcgccaaacaatacgtggtggacgacaagaccggcatcaagttcaacgacgtggccggtgaggacgaagccaaggagagcctgcaggaaatcgtcgactttttaaacaacccccaaaagtacgaggacatcggcgccaaaatgcccaaaggcgtgctgctggtaggccctccgggtaccggcaaaacgctgctggcccgcgctgtggctggcgaggccggcgtgcccttcttctccatcgccggcagtgagtttgtggagatgttcgtgggcatgggtgcctccaaggtgcgtgacctgttcaaacaggcgggcgaaaaagcgccctgcatcgtgtttatcgatgagatcgataccatcggcaaaaagcgtgatggtgccagcggcctgggcggcaacgatgagcgtgagcagaccctgaaccagctgctgaccgagatggacggcttcgacgccaccaagggcgttgtgattctggccgccaccaaccggccggaatccctggacccggccctgacccgccccggccgttttgaccgccgcgtacccgtggagctgcctgacctgaaaggccgcgagagcatcctgcgcctgcacgccaaaaaggtcaagattggtcccgactgcgactttcccgttgtggcccgcatgacccccggtgcttccggcgctgagctggccaacattatcaacgaagccgcgctgtgcgccgtacgccaccaccgcaaggctgtgacccagtacgacctgcaggaggccgtggacaccatcctggccggtgcgcagaagaagaacaagatcctgaacgacaaggaaaagtgcatcgtggcgtaccacgaggtcggccacgcgctggtggcggcgctgcaatcccacagtgcgccggtacagaagatcaccatcgtgccccgtacgtcgggtgcgctgggcttcactatgcaggtggaggacggcgaccacaccctgatgaccaaggaagagatattgaataagattgccaccttcaccggcggccgcgcggccgaggagctgatcttccactccatcaccaccggtgcctccaacgatattgagcaggccaccaagatggcccgtgccctgatcacccgctatggcatgaccgaggactttgacatggtggccctggagaccgtgaacaactcctatctgggcggcgacgccagcctggcctgcagcgagcagaccgccagccgcgtggacgccaaggtggtggagatcgtgcaggagcagcacaagaaggcctacaagctgctggccgacaaccgccgcaagctggacgagattgcccagtatctgtacgaaaaagagaccatctccggcgaggagtttatgcggattttgaacgcacagccgcaattgcccgccgccacaccggcagattctacaaacaacagcctataaatttggatggtttttgttcaatttttgcttgacgaacgccgtcctgccctgtatcattaaagaaaacctgccagtgagagggggcaatacaagagtgacttttgaagacttgcaggaactgctggcagagcagttcagctgcgacacatccgagctggaacgcggtgtaacgctggccgatttgggcgccgaccatgaggatatggtcgagttggcctgggggctgggcgaagccgtgggcaccgaaatcgatgaaagtgatttgagcgttgatttcacgatcggcgagctttggcgctttgttcatgacgcagaagaaaatgctgacctgtgacctttacatttcccgcagcaaatgataagagcctgtccttattgaaaaggacaggctcttttgttcatgtttgcgtaagggtttagccgcgggtgcccacaacgctggaatcagtgctccagccctgcaggtcggtgggggtcaggctggattgccagctttcgtgctgctcctcccattggtcccaggctgcctggctgcggatggtggtgccggtctcaaaggcatcatcccaggggttggccgggtcagggtcggtggggtcccagccacgcttctcggtatcggcggggtcggtgtagatggtgccgggcttgcccatggggccggggttctcggcgtcggcgtagatcagcaccggcgtgcccagtgggcaattatcgtagatccacttgacatccaccacttccagccggatgcagcccaggctggccgaggtacccagcaggttgtactcatcgtactcgatgtcgtccttgtgctggctatagtagggcacgctgtggaacaggtaggagtcaaaaatacgtgtggcgtactgcccatagctggggcccatcagcagccgccaatcgtaatccaccggcgtggcatagtagcccagcggggtgtccacgccgccgctgcacaccatggccataaatggcaccgtgtagcggccgtcctcgtcggcggtgtagaccgtcaccacgttggcatcgcggttcacggccaggaagtacggtgtgccctcttttgcctgcagggtcatgccgtagggggcatactgcttttccagcgcctccatgatggttttgccggcgtcgttccaggtggaagggtcggtgacctgcggagcatccttggtggcgttgctggccgtcgatgccatggtcttggcctcctcgggcgtctgggtgggttccggcgtgggttctacttcctccagcacggtctccacttcctgcttaacatcctgctcgatttccgggagcacatccttagtttctccgcaggcagaaagcagcacagccgccagcagtaccggcaaaatacggcgcacaatcgtcatagtttctccttaatgttgctttgttacaccgtactcggtgcttacgaatttttcaaaggccacaaagctgcggcggaccttttcggtctcaatgcagtaggccatgcggaagtagcccgggcagccgaagctgtcgcccggtaccagcgccaggtcatatttcatggctttctggcagaagactttggcgtccttctccagcgctttcgggaagatgtaaaaggtgccgtccggcttgcagaccgtaaatcccagggctttcaactcatcgtagatcagctccatgttcgtctcgtagacagacaggtcgctggtctcctccagacattcggccacggcgcgctggaacaggcccgacgggcagttatggccggtgccgcgggagatctggccgcacatcggcacgatgtaggcggcatcctcgcagcgggggttggccgccacatagccgatacgctcgcccggcacactcagactcttggagaaggagtagcaggtcagcgtatcatcgtagaatttagcgggatacgggatggtcttgccgccaaaggcgatttcgcggtagggctcatccgagatcaggaagatatggtgcccatactcggcgctctttttcttcaggtaagcggccagcttagtcagcgtctcggcgctgtaggccgtgccgctggggttattgggcgagttgatgagtatggcggcggtgttctcgtccaccaggctgtccagcacgtcaaagttgacctggaaattctcgcagcggggcggggccacgcgcagggtcaggcctgcaccctccacatagggcttatactccgggaagaacggcgcaaaagtgacgatgttctgccccagcacagcaatgcagcgcaccgcatgggccagcgcgccggctgcgccggtggtcataaagatatggtcgccggtgtagtccatgccaaagcggcggttcaggctttcggccaccttggagcgcacgtcgggcagggtcagcgtgggcgtgtagccgtgcagcgtaaccgggtccacatgctccagcagatccaggcagacatcggtaaatttttgcggtgcgggcaccgaggggttaccgagcgaataatcgaacacattctcgtatccgatctcggcaccacgggcggtgctccactccgagatctggcggatgaccgattttgcccccagcatgtctttataatgctgtgcgatcataataccaacactcctttgcgaaaatccgttcttcctgcgaatcccgttttttttgatttttactgcaaaatcaccttttccaagtcttgcatggtcgcggccaggtactcggccccggcctgctgcaattcctcttgagtgcggaagccccatagcacgccgcagcagggcagcccggcgttatgggccgttgccacatccacgttgctgtcgccgacgtagagcacttccccgctctcggccgtcacgcccagtttttgcatcagggcgcaggtgccctggggtgcgggtttggtgggcacatcgggcagtgcgccgcgcacgatctcaaacaggctgctgtcgaagtaccgtgccaccacggcgcgggcgaattcatcggctttatttgagaaaactgccatctttacgccgtttttttgcaattttgccaacaattccggcataccggggtacggggcggttttgtcgtgcatgtgggcgccatatactgtatcaaattcggccagcgttttttgcagcgtttctgggtcgcgctgatcctcggggctgaaccgctccaccagtttggggatgccgttaccgacgaagtatttatattgtgcggtgtcatgttccggccagccgtgggctttgcacacgcggttggcggaatcagccaggtcgtcgatggtattcagcaaggtgccgtccaggtcaaacagtacggttttaaacattccattcacctcaaaattctcatgttctttcttattatagttgcatttgccaaaaacagcaaggcgaatttgtccaaattaccctcaagcccggaaattccttgtaaaattctcgaaaacctgtgtcacttccgacattttatggtatgatatacttattataaaggaggctttaccccaatggaatttttcctaaatcttctgcgctcggtggcgtatggcatcatcgagggcgttaccgaatggctgccgatttccagtaccggccacatgatcctagcggagcaggttcttaaattcagtttcagcgccgagtttatggagatgttccgcgtggtcatccaactgggcgcgattctggcggtcgtcgttctctatttcaaaaagctgtggccgttctgcgccgacaatggccgggattccggtttttcccggcatttccgctggccagtggtgcgtctgtggtgcaagatcattgtagcctgcgtcccggctgcagttctgggcctgctgctggatgattggctggatgctcatctgtacaacagcattaccgtggccctgatgctcatcatctacggtatcgcgtttatcctcattgagcgccgcccccgcgtgcccaccactaccaagctgagccgcatcacctacaagcaggccctcatcgtgggtgcctggcaggttctggctctgattccaggcacttcccgcagcggttccaccatcattggcggtctgctttgcggtatgagccgcccggctgcttcccagttcaccttcttcctggccattcccgttatggcaggtgcttcgggcctcaagcttgtcaagttcctggccaagggcggcgtgttcaccctggccgagatttcggccctgctggtaggctgcattgtggctttcgtggtctccatgctggccatccgcttcctgatgaactacgtcaagaagcacaccttcaccgccttcggctggtaccgcatcgccctgggcatcgttgtcctgggaatttgggtactgcagacttttgtgctggcgtaatgggatgaggttctctgtccttttcttataagaaaaggaccaaaagaatttttaattaaaaacgggaggcatggcctgcggccatacc

SEQ ID NO: 7761 - DNA, 9903 bp, Unknown
  gut microbiota DNA sequence
tgggcagcgatacccacatcctgggcctgatcggcgacaccaagtccctggccgaaagctgggtgctggccaacccagtggtggagacctgccgccgtgtgaccgagccgtacaagaaagccaaccgcaagttccacccggacgacaccatcgtggacgtgggcgggcacaagatcggcggcgggtactttgccgtgatgtccggtccctgcagcgtggaaagcaaggagcagatcacctatgtggcccagcgcgtacaggccgcgggtgccagcatcctgcgcggcggcgcgttcaagccccgcaccagcccgtacagctttcagggtttgcgtgccgagggcctggagcttttgcaggaggcccgcgctgtgaccggccagcccatcgtgaccgagctgatgaacaacgaacacatccacctgtttgaggatgcccacgtggacatgatccagatcggcgcacgcaatatgcagaactttgagctgctgaaagccgtgggccgcctgaagacccctgtgctgctgaagcgcggcctgtcctccaccctggaggagctggtgatgagcgccgagtacatcatggccgagggcaaccctaacgtggtgctgtgcgagcgcggcatccgcacctttgagaccagcatgcgcaacacgctggatatttccgccgtgccgatgctgaaaaagatgacccatctgcctgtggtcatcgaccccagccacgctgccggcatcgcctttatggtgcccgcgctggcccaggctgccgtggccgtgggcgcggacggcctgatgatcgagacgcacaacaacccggccaaggccaagagcgacggcgcccagagcctgacgcccgaccagttcgacgccctgatgaaggtcatcaagccggagctggaattctttggaaagaagttaaactgattataggtaaaaaggctccctctgcgagggagctggctgcgcgaagcgcagactgagggagagacaagcaaattaactgctaccaaatctcaggctctctcccccacccgcttcgcgggagccccctcccagagggggccatccaggaggtgtcccagcgagtgggatgccagcttatttataaagtatataaggtcagcagcagggtcgggaaagccctgctgcttttttgctgccgataggggtgccgcagcgcatggattttgcggcagtcaaagaactacttccgggtatttccgcccggtatatatactgcggaactccggaagtaccctggtgtttccaactacttccggagttatggaagtacttataattaacatatctatgtaatttatataagtacttccgtagttccgcagttttgataaaggggtggctgtttttgccagaaaccaccgtcgcaaaaaagatgcgccccgccgggcgtggcgaagcgcatgcttattggctttattggcccggttcgtctttggcgggcttggtgctttggggcgtgctgatgccggtctcccgggccgtttggatcgccgaggcggcagcctctttggcggtctgggccgcagactgcgcggcattggcagccgtttcttttgccgtctgggcggcggcggcagctgtacccacggcggtctgcgcggtctccttagcggtctgggccatctctttggcagcggtcctggcggcagcggccagctcgttcaggcggcggacgccggcgcgggtggaggccagcgtctcggcgtaggtaaggctcttcatatccgggaaggcccgcagcaagcggcgggtgcctatcttatccacgctgatgtcacgcagcttggcgcgcatttcgttggcgcgcagcagcatttccagcttcaactcggcggcgttctcgcggccctccagcttggccagggccagctgcagcttttgctcgtctaaaatggtatcggcggtcatggcgctgacgcccagcacggtggtcagcttgtcgctggtcacacgcaggcgggcgcgcacctcgtcgatttccttcagcttcttattcaggccggtggcggcggctgcggagacgatgaggtcgaccacaaacagcgccagcacggcggcttcggcaggcaccagcaccttcatgggcagcgggctgctggccttggccagcgccgggtgcaccaccttgaccatgatgacactgcccaggccccacagcagcgagaactgcgggcagatgtagccgccgatgttgaacttcatgttggagtagtcccaccaacggatgtggtaaattttgaacagcgtccagccgcccaccagctcgatggcggtggtgagcaccatgcccacaaagaacaccgccacggtgctgacgcttttcccctcgccggagggggccagcgcggccactgtccagttcagcaccaccatgccgcagccgtaaatggggcagatggggccgcagaggaacccgcggttgacgagccgccgctccttgatggcggcgtagacgacctcgacgccccagccgatacagccgtagaggaagaaccaatacagcgtttgtacgacaaatgaaaagatttttgtctgggtcattcggcgtcctcctgcggggcgggtgcttcggcggcttcctcctcttcctcggcttccagctctttggccagggtcttgggctccacccaggtcacggtgctgtcgggacctttgcgggcgatcagcgccttgatggggatgcccatctcagtaaacataccctcgtgttcggtgcgcaggttccaatccggctcgttggcgtgcaggtcaaaggtctgccaggtgatctcaaagcctgccgccgggaagtaatgcaaactgtcccggaacaggtcatcgtcgtcggtcttgaaccagatctccgcgccctcatccatcagctggcggtattgcagcaattggcggggatgggtcaggcggtgcttgttgctgcccgcgtttttgctccacggattgcagaagttgatgtagatgcggtccacccggtcggcaggggtgaaggcattgcccaggcgctcgatgtcgatgctggcgatcttgacgttatcaggggtcatgccgcgctcggcataggcggcctcgaccttgcgcttggccaggatcagcaccttgtcggtgatgtcgatgcccaggtagttgatgtccgggtgccggggggccagctgcgccaggaaaccgcccttgccacagcccagctccaggtgccagggctggtcggggcgggcgtaggtctcgtgccagtggccgccgtgggtcagcggctcgtgcacatggaagtcgcaggccagcagttcggggcgggcgtagggtttaaaacgcattctcatgggagtgtctcctgttataataatgtagaaagtttctcgcggacgacatcgggcgtaaggccgggctgagccaggctgccctggcagaaggcaggcttgccgccgccccggcctgcaaaggcttcgttcagtgccctgcccagggcgcgggcgtcggtgccatcgggggcggccagcgcgtaggataggccctgcccgccgggggcgagggcgcaggcgacctgatttgtgcccgcgcagaccgccatggcaatgcggcgcaggccgtcgccgtcggctccctcggcccacagcacggcgggccggtcgggcgctgcagcctgcacgtaggcatccgccagggcgttttgcagcgcggcaatacgctgctttaggacagcttcgccgttctggcggttctccaccgacggggtcaggctgcccgcgggggcagagagcacgcgccccgcggcttcggcgtcggcacagatggcggccacagcgtcataggcgcgctgcccgcaggccacagccagccgcatgccggtcttgtagtgctgggcagagataattttgatcagccccacctcgccggtgcgggccagatgggtgccgcagcaggcgcagcagtcgccgccggcttccaccagccgcacggggccgtccagctcctttttgctgcggtactcggtggcggccagggtggcggcgtcggggatgtagcagttcacgggggtgtcggcccgcacggcggcgttggcttcggcttcggcccgggccagctgggcggcggaaagcgggatgctggtgtccatccgcacgtagggggtgccgatgtggaagcccacattctcggccccgaacaggcggtggagggtgccgctgaggatatgctcgccggtgtgctgctgcatggcatccaggcggcggggccaatcgatgcggccggtcacagcggtgcccggctccagcggagcgtccgtggtatgggtgatggtggcgccgtcggtatgcacatcggtcaccttcgcggtgcccagcgtgcccaggtcacagggctggccgccgccctcagggaagaaggcagtcctgtccagcacgaccgcatagccgcccttggccggggtgcaggagagcacggctgcagcaaattcctgcacataagcgtctgtttcgtataacttttgcgtcacagaaaggagacccctttcaaaaaaatcagatttttcttattataacacaaaacaggtgtggaaaaaacctttcatttcctatataataagaaatatatgggctgaaatttaggagggctcgccctctacaagtaggtcacttccctgttgtgcccatcatttcctaccaggagaacttcaaacctatgcaaaaacaaatcaccccggcggcgctggcgttatcggcgctgctgcttaccgcctgcgcggcggccccagtggaaagcgttgccacggtggagacggcccccgagcctgctcctcaggtgcttaccgcctatgccgctgacgggctggcccccgccctgcaggcttatgccgatgcccagggcgtggccctgaactggacggacgatgccagcaccgccagcctgctggcgctggaccaccagccggacggcgccaccctggatgtgaccagcgatcccctgctggccgcagccgccgcccgcgccaatattaccgggagtgccgcctccctgcccgcaggccgcagcctgtacggttactgggtcagcggcagtctgctgaacagcctgctgggtgatggcgctgccgaagccctgcagaatgccagctgggacgagtggagcgactttgtggagaccctgcaggactggctggccgagccgaaagccgccaccgtcaccttaaacggcgccgaccgcaccctgccggaggcccggcccgaagtcctgaccgccaccggcgtatttgccccgccgctggaccgcaccagcggctacactgtggccgtgctggcggcggacggccagtatacggccaacgccctgaccggcccgctgaacggcatctacagcgccgtctcgctggaatgggacgccatggccgacagtgccgagggcgggttgttccgccgggccaagctgaccgacctgctggccgcctacggggccgacgcttgccaggatttggttttgatccccttcaaaaccaacctggaggacagcgatctgaccaccgaggagtacaacctcaccggcctgctggactaccccatcctggccaatgcgggctgcttcgcccttcaggacaccggcgatgccgccgcactgaaatctgccgagagcgccgtgctctggctgtactccagcggcgatggcgaaaaagccctgaccaacacgctgggcgtcatcaccccgtggaacaccgcgtccgacaccaccacgctgggcgcgatgcaggtggagcaggtcaacaccgccatcctgccgggcatcgacctgcccacggcggcagcggcccaggcccttacggccaacgaggaggccctgcagggcggcacacgcggcaaggccgagcgcactgcctttacccaggccgctttggcagccctgggtgcagaataaagagtacattaaaaatactagcgaaagagaagaaggatagcaaatgggttttgcacgttgcagcggtattcttatgccgctttccagcctgccgggcggttatggcatcggcagcatgggcgcacccgcccgtaagtttgtggatttcctggctgccgccgggcagacgatctggcagatcctgccggtcggccccaccggctatgccgacagtccctaccagagctgctccgcctttgcgggcaacccctactttattgatctggatcagctggtcaaggacggcctgctgacccaccgggattttgccaagatccactggggcggcgacgcggcccacatcgactacggcaccctgtacgagaagcgcttcgacgtgctgcgcaaggcctacgccaactttttaaagcagcgccccgtgcccggctacgacaccccctaccccgatgactggtaccgcttccagtttttgagctgcgagtggctgcccgactactgcctgtacatggccatcaagcgggacaacggcatggtggattggcagcagtggcccgaggccctgcgcctgcgcgaccccgccgccctggctgcttttaaagaggaacacgccgaggaggtcggcttctgggcgtttgtccagtacgagttcgaccgccagtggcgcgccctgcacgcctatgccaagagcaaaggcgtatccatcatgggcgatattcccatctacgttgccgccgactccgccgatgcctgggcgggccgcgaactgtttgagaccgacgccgacggcaagccccgccgcgtggcaggctgcccgccggactactttgccgccgacggccagctgtggggcaaccccctgtatgattgggactaccaccgccgcaccggctacgcctggtggatccgccgcatccgccacgccctgttcatctacgacatcctgcgcatcgaccacttccgcggcttcgacacctactgggctatcccggctggggaaagcaccgcccgcaacggccgctgggagaacggccccggcatggacctgttccgcaccctgcacaacgccctgggcgagctgcccatcgtggccgaggatctgggcgagatgtttgactcggtccgccagctgctggccgacagcggtttccccggcatgaaggtgctgcagtttgcctttaccggcgaggacagcgtcgacctgccccacaactacccccgcaactgcgtggcctaccccggcacccacgataacaacacgctggccggctggttcggcgaggagctgacccccgaataccgccagcaggcccgtgaatactttgccctgaataaggccgaaggcgaactgcgcggcatgctgcgcggcgtgatggccagcaccgccgccctggccatcatcccgatggccgactggctggaggagccgtctgcctcccgcatgaacacccccggcgtggcccagggcaactggcagtggcgcgtggatgagaagaagctcacccccgccctggccagggagatcaaggccatgaccgtgcggtacttccgcgcaccggctacccggaaataatcgcataacagccccgcatggtccccgcgtatccagccagggaccgtgcggggtgttttctataacgcagcatctgctttttttgtgaacctaaacaatgttttgcgctgtggtgcgcaaattctttgtgcaaggcagaactatccagcaatcgtattttgtgatacaatagtttggtatttgaaggttattttcctaacagggatcttttgttttaaaaatgaggaactgacatgaaatttgagtataccctcgctgaactgtccaccgcgatcaccgcgctggagcaggtctacggcaaggtcagtgtactggacccctacctgggcaccgtgctggaccccgccaccctgcagcccaccgataaagccgaggaactgaccgcgctggatgagaccggccgcggcgtgcagctggcccaggccgatgacggcccggagctggtgctgtaccagggcatccaggcggacgcccgcccctgcgtgttggctttccactgctgcatgccccacaatctgcaatcctctgccggggccgagaattcctttaaccgcgtgctggcccagatgcaggaggagctgcgccgcgattacctgaccggcgtgtacaatgcccgctatctggacaccgagtaccgccgctacgccgagccccaggcccaggccggcaagcccgtgggcgtggtgatggcccgcgtgaacgagtattggagcctgcgccagaacgagtccgccaatgcggccgactgctgcctgaacatggccgccggtatcctgcagctgtctgtcggcaccgacgacaaggccgccgtgctggcccgtttggaagacggcctgttcgccgtggtaacggtgggtacccccgccgtccaggtggcccgcaaactgcaggacgcgctggacaactcccgccgggagttcagcatcagcctgtcccgccgcggcagctttaccgtgcagctggccagcgccgaatggggcgagaccccggcctgggacatgatgttctctctggctcagcagcgcctgtgatctttgcataaaaacatcccccttgtgtacatactatggttgaccgaccaccacgtacacaagggggattttgttatgcaaaccgataatgaaaaaatgctccaggagatcgtgcagaacaccgagatgggcaaaaacacgctggacgagctgatgggcctgacccacgaccagcggttgaaagacgagatgatgcgccagaagcgggagtatcggcgcatcaaccaggcggcccacaccgcactggatgccatcggggccgaggcccagggccagagcgctgccgcccgcatgagcgtgagcatgggcatccgcacccgcaccatgatggacaagtccacccgcaacctggccaccatgctggccgaaggcagcggccagggcgtgctggactgcaaacgggccgaaaaagactatccctccgccagccccggtgcgaggaagctttgccaggaactgggcgaattccaatcgtcggccgaggagacctggcgggagtttgtttgaagtttgtttggatcatgtgctgccagcccggccctgcccaccctgcggcagggcctttttattacggcatcctgccattataaaagggcgtcaccgcatggtggtgacgcccgcaaggcagacccttaaaataaaatatagtacaccccaccgcaaaaagaaagcgccctgccacataaaagccgccaaaatgcttgacgcaccccgccgccggtattataataagagagccgggttcgtcccggcatacacaccgaggtgttgcgcagttggtagcgcgcgtggtttgggaccacgaggccgcaggttcgagtcctgtcacctcgaccagcaaaatgccgtagattcgttagaatctacggcattttctttttcaagtacactttagtacacacttgcccattttctctgcaagttgtgtactaaatcattatacgcatcaagccgcgcttctttcagtgcatccgtaaggtctatatttgacactgcccgtaaaaagtcactgccgccaacagcagcccttacaggagtctctgcggcttcgtagtagcgcacaggatcttgttccatattttcgtggtccgtaaactcctttataaaccgttcgcccctcttgacgcgcgggggcaattatagcatactggaagggaaaagcagctaagcggggaaacagcgggttgcttttcctctgcccgcctttccgctataataaaagcaacggaggtgaccctgatggaaacaaaagatgtgattttacagctgcgcacccaaaaaggcttgtcccaggacgaactggccgagcgcatcctggtgacccggcaggcggtatcccgctgggaaaacggagtttcccatagttaaagataccacaccaaatatg

SEQ ID NO: 7762 - DNA, 16107 bp, Unknown
  gut microbiota DNA sequence
caaacaatatctttaattaagggaaacgggagagaccgtgcccaacaccgaaacgctgaagctcctatccaaagagttcgatgtatcgatcaacacgctgctgggcacaccgcggcagctggtgtgccagtgctgcggcatgccgttgggggatgccatcatcagccacaacaaggatggttcccccaacgaggactactgcaaatggtgctacgccgacggcgcctacacctacagcagcatggacgatttgatcgacgcatgcgtccggcacatgaccaacgaacacttcaccgaggaacaggcccgcgcctacatgcgggacctgctgcctacgctggactactggaaacgctacgacgtgctgagcgacaacggtcagtttgaggcgttcaagcgccagctgatacaggagatcaacgacctgcacgtggagggcctgcccaaagtggaaaagctgaacgcgctggtggggcggtatgtgaacctggcctatccgctgcccagcggtgcggcggtaaattttttgaacgaccagacaacctatctgggcacccagctgaaatcggagttcggcggtgagcgctgctttggcgtgctggccgggatggattttatcctgatctccacctacggtcctaagggcgaagccccggaattggtgctgtacaagaagcgttaagacgcctgcgtgccgcttgataaaaccacgaaaacatgaggactttaagcgatgaaacagaaaatcaaagtgctttttatctgccacggcaacatctgccgcagcccaatggccgagtttgtgatgaaggatatagcggcgaaggccgggcaggcagaacgatttgagatcgcgtctgcggcgacgagcaccgaggagatcggcaacccggtctacccgcctgcacggcgcaagttggccgagcatggcataggctgcgcgggaaaaactgcccgccagatgacgcggcgggactacgagcactacgatcatctcatcgccatggaccgcagcaacctgcgcaacatgcagcggtttgtgggcagcgacccagcgggaaaggtgagcctgttgatggaccacaccgcccgccccggcgatgtggccgacccgtggtacaccggcgattttgatgccacctggcgggatgtgaccgaagggtgcgcggcgctgctggaagaattaaaaaacaaaatataacgcaaagggagctgccccgccggggcagctccctttactatgtttatgaaaatcaggaatccgaatccagcttcagtacggcggtaaaggcctcgctgggcagggtcacgctgcccagctggcgcatcttctttttgccttccttctgcttttccagcagcttcttcttgcgggtaatgtcgccgccgtagcacttggccagcacgtccttgcgcatggccttgacggtctcgcgggcaatgaccttgccgcccacggccgcctggatggggatctcaaacagcgcgcgggggatgttctccttcagcttctcgcagatgcggcggcccttggcgtaggcgttgtcagcgaaaacgatcatggacagcgcgtccaccacctcgccattgagcaaaaagtccagacgaaccagcttactctcgtgccagtcctcccactcatagtcgtagctggcgtagccgcggctgcgggacttgatggcgtcaaagaagtcgtagacgatctcgcccaaaggtatctggtaatgcaggtccacgcgcgtttcatccatatacttcatgtcaatgagcacgccgcgcttggcctggcagaggtccatcagcgggccgacgtaatcgttgggggtgtagatgtgggcattgacgaacggctcctcggacttgacgatgcgggtcgggtcggggtaggccgaggggttatcgatgacctctaccgtgccgtcggtcagggtcaggcggtactggacgcccggcgtcgtggtgataagatcgaggtcaaactcacgctccaaccgctcggtgatgatttccatgtgcagcaggcccaggaaaccgcagcggaagccaaagcccagggcagcactggtttccggctcaaaactcagcgatgcatcgttgagctgcagtttttccagtgcgtccttcaggtctgggtagtcggcgccgtctgccgggtagatgccgcagaacaccatcggggtgacggtgcggaaaccgggcatcggctccggcgtggggttattggccagcgtaacggtatcgcccacacgggtatcccgcacggtcttgatgctggcggtcaggtagccgacctcgccagcctccagcttctcacaggggctcaactgagtggcacccatgcggccgacttccaccagctggaactccgcgccggtgctcatcagacggatggtatcgccgggcttgacggtgccatcaaagacgcgcacgtagacgataacgcccttgtagctgtcatagatggaatcgaagatcagtgctttcagtggcttgtcggggtcgccggtggggccgggaatatcgcggaccacacattccagcacgtccttaacgccgatgcccagcttggccgaaacgcggggtgcttccatgcagggcagaccgatgacgtcctcaacctcttttgccacggcgtcggggtcggcgctgggcaggtcgatcttgttcaggatgggcaccacttccaggtcgtggtccagcgccaggtagcagttggccagcgtctgtgcctccacgccctggctggcgtccaccaccagcaccgcgccttcgcaggcggccaggctgcggctgacctcgtactggaagtccacatggcccggggtgtcgatcaggttgaactcgtaggtctcgccgtcgtcggccttatagcgcatggtcacggcgcgggccttgatggtgatgccgcgctccttttccagctccatgttgtccagcacctggtccgtcatggtgcgcttgtcgacgctgtcggtcaactccagcatgcggtcagacaaggtggatttgccgtggtcaatgtgggcaacaatgcagaaatttcggatatttttgcgggccatcaggtttcctccaaatcgttccagatcttacagacggtgccgttttctttatatacgcggggcacgcggcgtgccaggccgcatacgatctcatagttgatggtgttggtctttttcgcgatggtgtcggcggtatcccctgcaccggggccaaataccaccacttcatcccccatttttacctccgggatgttggtaacgtccaccagcgtttgatccatgcagacacggcccaccacgggggcgggacggccgtggatgctcataacgccctggccctgcccaccggacagggcgcggggatagccgtcagcatagccgacacaaaccgttgccacccgcatggggtggtccgccgtgaaggtccggccgtagctcacacattggccgggctgcagctctttcacaaaagtgacgatacaatgcagagaaagggcaggctgcagctccgggaagtgggcatcctcgctggggtccagcccatacaggataatgcctgcgcgggtcatatcccgccgccattccgggtggcgcagctgcgcggccgaattggcgcagtgcactgtgccggtggcatagccatccgcctgcaggcggtccaccacgcgggtaaacaggtcgtactgctcctctgtataggccaggtcatccggtgcatcgctgtctgccacggcaaaatgctggaagatgccgcagatcgcaaggcccggcaaagcatacagcgcctcgacctcacggatggtctcctcgaaacccgagcgtaccgcaaagccgatgcggcccataccggtgtcgattttaatatgaacctttacccgcaccccggcctgcacagcagcggccgaaagcgcctgggcgtactccgtggagaagcaggcggtggcaatatcatcctccgccagcgttgcagcgtgggcagggtcggcataacccaggatcaggatgggtatcgtaatgccatggtggcgcagatgatgcccctcgcccaagctgcttaccgcaaaaccggcaacgcctgcctgctgtatcgtcttggcggtggctacgtcaccgtggccgtaggcatcggccttgacaacggcgcagaccggcccgccgaccgcctgcctgatgtatgcgaaattgtggcgcagtgcatccagatcgatctcagcccagcaatgtttttcaaacttcatatccattcacccctttatagcctattctccctgtcctaccctttaaagatttattatatcacactttccctggctgtacaatgacagaaaatcagttttccgcgtcggaatcggtctccgaccatttgccgtggacgcgctgcacgcccaccacacgcagtttggagtggaggaagtgctgctcgcgatacaggctgaagtagctggacatcatgtaggagacggcacaggacagggcgaacagctcaatgttctgcccgccgaacacctcgatggccaggcagcaggacgccagcgggctgttggtacagccgcagaacagtgccaccatgcccagcgccgcgcccaggccgggggccagccccagcagcggggccaccacgcagccaaaggtcgcgccggtgaagaagatgggtacgatctcgccgcccttgaacccggcccccagtgtgatgctggtgaacagcatcttgagcaggaaagcatacggcaccgcctgcccggcgatggcggctgcaataacattggcgcccgcgccgttgtaatcggtggtgcccagcagggtggtcagcgcgatgataagcgcaccgccgaccaccacccgcagataggcattggggaacagctttttatacagcttcggcgcggcgtggatcacctcacagaaagcaatgctcaacgcggccagcagcaggcccagcagcaatacacggatcaggttgcccggcgtaggggcggcatagtcggccaccgcaaaggcggtgggggccagccccataccgctgctgatccacacgccgatcagcgccgagatcaggcagggcagcagcgctgcgtactgcatggagccgacgtcgacgacttccagcgtaaatacggtagcggccagcggcgtaccaaatacagcggaaaacgcccccgccatgccgcacatggtcatcaggcggcagtcccgggcctccagctgcagtctcctgccgatctgcccggacagtgaaccccccagcagcagggcagcgccctcacggccgctggaaccgccgaacaaatgggtgatgatggtggttacaaagatgagcggggcggtacgcagggaaagcggcttatgctcccgcaccgcgacaaaaatttggttggtggagccgccgccatcagggtcgaaatgctggtacaggaacacgatgaccaggccgcccagcggcagcagatagatcaaccgcgggtcagccgtgcgcagggcggtcgctttgttgagcgccagcccaaacattgcgccaaacggccccactacacagcccaccagcgcagccaggatcacccatttaaagcagacatacaggtaccccaggctgctgcgcagataccgcaagatttttttcatagacgacctccccaaggcaacaaaatacaccccctgattatactcccgccgggggaaaaagacaacatctgccaaaacaggactggcgttgcctgtgcgatgccagccctgtttgacttgtttaccatatgcgttgttacgccgtcaccggctgctgattgaaaatcttcatcgattgtttgtagcagtggatgaagtagataatttcggcaaagcccgtcaacgcccaggagcaggggtagagcagatacagcgccggaatggtgtggaagcaggcaaagatcgtgtagacccacgccacgcggaagacgcaggaccccataataacgatgatggtcggtaccacggttttgccaaggccccgggaggcggcgatggtgcagtccataaaggcagagatgcagtaggccaggcccatgaccatgatgcgcttcatgccggcatcgatgacggccggctcggtggtgaaaagcgcgaggaactgccgcccgaagagcagcagcccgccgcccagcaccaggcccacaccgaagccgtaggccaggctgatgaagtagcttttcttcacgcggtcgaccttgcctgcgccgtagttctggctcatgaagctggcacaggccatgtagaaggcggccatagcgtcgtagatcatggcgtcggcattggcagcggccgagttgcccttgaccatcagcgagtcaaaggagttgacgcccgcctggatgaacaggttggcgatggcaaaaactgcgttctggaacccggcaggcacacccagcagcaggatgcgcttggtcatacccaggtccagcttgatagcgtgcaggtccagtgcgtagcaatcctgcactttggtcagtgcgcgcagaatcagcccggcagacacgcactgggagatggcactggccagcgccacgcccatgacgttgagctggcagacgataacgaaaaacaagttgaggccgatgttcagcgcaccggcgatggacaggtagaccagcggctttttcgtgtcaccgatggcactgaacaccgcgttgccgaagttatacagcgccagggcgggcatacccaaaaagtacacgcgcaggtacaaaacagcaccgggcagcaggtccggcttggtgttgagcagttccagcagcgcaggcgaccccagcaggccgacaaacagcaggatgacacccgcaataaagctgatgatgagtgccgaatggacggtctttttgacatcgcccgggtgcttggcgccgtaaaagcgggccaccagcacgttgatgccgttgctcaggccgatcaaaaagccggtgaacagcgtgacaaagatactggtggaccccaccgcgcccagcgccgtagacccagcaaaccgcccgacgaccgccacgtctgacatgttgaacagcacctgcagcaggttggacagggccagcggcaggctgacgaggaggatctgcttcgccagcggcccctcggtcagggtttttgcatttttcatggttccgatttcctcaatttttccttacacaacacccccgcattggggcgaacattcctgattatagcaagtttttatgcctttggaaagaggttttttccagattttggcggtttttaaaaaacagcaaaaaaagaaccgcccggcgcaaaatcgggcggtctttttatctgcaaaatcagggaagatcaggcttcttcagcctgtttttctttttgggccttgatgactttcaggcggctgaattcttcgcgttcgcgctcgcccagcacctcgtcgatggacttgatggtcttttgcatctgggggatctggacgttgcccagggcgttagcacgcttctgggtcttttggatggcctcggccaggcggatgacgctggtctccacttcggtcagctccaccgtcagggtcttgacctcgttgaatttgaggtaggccacatccagcgtgccgttggtggactccagatcataataaatgcccaaaggcgaggtcgtctgcagcgagagggtgggcagttccacgcccatgacgctgcgggtgctcagccgcaagccgtattctacgggcacgccgccggcgtactcccccaccgagcccagcatgatgttggctttctgcagggcgtcatacgcctcggcgtaggcagccgagatgcgatcctggatgcctgcggcgcggtcgatgagctgcatcatttcgcgcacaaggatgttgcgcttgcggtccatcaggtcatagccctgctccgccagcgccaggctgcgcttggtagccatcaggtttgattttgtggggaaaacctgctgtgccatggtaaactccttttattgctttgcgtgcttggcaatgcgggccttggcaggctcgtagtacttgtccagcgtagcatcatcgcagcggtccagcgcggcgcggggcagtgcagccaacagctcccagcccaggtccagcgtttgctccatggtgcggtcggtgttgccctggccgatgaactcctgctcaaaggcacggccaaaggccatcagttgcttgtcggactcggaaagttcttcctcgccgataacgctggccaaagccttagcatcctgcaccttagcgtagcaggcaaacagctggttggacagggtgacgtgatcctcgcgggtgtaaccggcgccgatgccgtccttcatcagacgggacaggctgggcagcacggagaccggcggatacaggccggtggcgtccataccacggtccagcacgatctggccctcggtaatgtaaccggtcaggtcggggatggggtgggtgatgtcgtcgccgggcatggtcaggatggggatctgggtgacagaacccttgctgcccttgatgataccggcgcgctcgtacaggctggccaggtcagaatacaggtagccggggaaacccttacggccggggatctcgcccttggaggaggagaactcgcgcagagcctcgcaatagctggtcatatcggtcaagatgaccagcacgttcttgttcaggtcaaaggccaggtactcggccaccgtcagggcagcgcgcggggtgatgatacgctcgatgatggggtcgttggccaggttcagcagcatgaccacgcgctccatcgcgccgcagctctcgaaagactcccggaagtaggcggcaacgtcgtttttgacgcccatagcggcaaagacgatggcgaagtccgagccatcggccacgctggcctgacggacgatctggacggccagctcgttgtgcttcatgccggagccggagaagatgggcagcttctggccgcggatcagcgtggccaggcagtcgatggaagaaatgccggtgtgaatgtagttacgcggatacacacggctgacggggttgatgggtgcgccgttgacatcgcggcgggcggtggggtaaatgtcgcccagaccgtcgatggggcggcccaggccgtccagcacacggccgggcagctcggggctgaggtccatcatcatgggatggccggtcagcaccgtgcggttgttgaccaggcttaagccgcgggtgccctcgaacacctggatgatgcagcggtcgccttcgacctcaaccacacggcccacgcgggtggagccgtcatccagatgcagctcggccatttcgtcatactgcacgccttttacgccgtccagcacgaccagactgccgttgatttgggaaagtccgatatgctctaaaatcatgttattccctcctcatcagccctgggccacagcggccagtttggcatcgatgtctttctgcatggcgtccagcttcgagaagtcgtcgttgggcacctcgtacttcatcttgaccagctcatcaaacaggccggtggccagcagacggctgaccggcacctgcttggcaaccagcgctgcacacttatcgtacaggtacaggatggtctccatcatcttcagctgcttttccagcggcacgtaggtgtccacggcgtggaaagcgttctgctgcaggaagccgacgcggataacacgggcgatctcgatggtcaatttctggtcgtcgggcagcacgtccgagccgatcagcttgacgatctgcatcaggttattttcctgcagcagcaggttggcgacgcgctcacggcaggacataaagtcatggccgacgttatcgtagtaccagctgcccaggtcgcccaggtattcactgtaagaatcgttccagttgatggccggatagtggcgggcgtaagccagggacttatccagtgcccagaagcagcgggtgaaacgcttggtgttctgggtgacaggctcggagaagtcgttgccctgggggctgacagcgccgatgacggagacggaaccttcggcaccgttcagcgtcttgacataaccggcacgctcgtagaactctgccagacggctgggcaggtaggcggggtagccttcatcggcgggcatctcctccagacggccgctgatctcacgcagagcctcggcccaacgggaggtggagtcagccatcatggcggtgtggtagcccatgtcgcggtagtactcggccagcgtgataccggtgtagatagaagcctcacgggcggcaacgggcatgttggacgtgttggcgatcagcacagtacggtccatcaggctcttgccggtgcgggggtccaccagttcgctgaactcctgcaaggcctgggtcatctcgttgccgcgttcgccgcagccgacgtagatgatgatgtcggcatcgcaccactttgcgatctggtgctgggtcatggtcttgccggtaccgaaaccgccggggatggcagcggcgccgcccttggccagcgggaacatggtatcaataacacgctgaccagtgatcagcggacggggcgaggtcatacgctcggctgccgggcgcggggtacggataggccacttctggcacagggtcagggtgtgttcccggcccttggtgtcggtcagtttgacgatggggtcgttgacggtgtagctgccgttctcggcagcccaggtcacggtaccgcaaacctccggcgggaccatgcagcggtgctggatggccggggtctcggggcaggtggcgtagatctggccgccggtcagggtatcccctgctttaacgttgacggtcacatcccacttggcggcggtatccagagaaggctcgtgtgcaccgcgctcgataaagctgcccatatggctctcgatggcgggcagcgggcgctggatgccatcgtagatattgcgcaggatgccggggcccagcgtaacggacagcgggccgccggtgctttcgacaggctcgccggctttcaggccgccggtctcctcgtaaacctggatggtggtctctttatcgttcatgcggatgacctcgcctaccaggcgggatttgcccacatagaccatttccatcatagccaggtcggttttgcccttgatggtaacaacggggccgttgatgctgtaaattttattttccatagctttgcccctcaaatcgtgatctccagccctgcgttctgcaggaaccagtcgtgctgggcgtccaggcgggcttccagcgtatcatcggcagccaggccggtggcggggttggcagcgcgcaggccgcccagggtgatggtgtcatcggcagccagggccacaccggcgggcagcttgccttgcagcaggggcaggtcggcggtgcgggcgtacagggtgccgctctcgcccatggtctcggccagggcggcagcactcttgaccagccaggcggcatagtccttgccggcggcaaaggcagccagctgcgtgcgggcagcggcaaaggtatcggctgcgatctgctggcgctgtgcggccagcttggcgcgggcctgcatgcgggcggcgctcagctcacggttggcgcgggtgcgggcacgctctgtctcaaagtggagcgtatgctcggccttggcctgctgggcctggcgtgcctcgtccagctggcggtcgatctcggcatcggtctcggtgcggatagcggcgcaggcggcttcaccctcggcgcggatcgattccaggaaccgctcggcgcgggtatctaattcattcatggtcacacctcttagattttaacaccgatggcctcgcggatatagcgggtcaggcggtccttaccggcagcaccgccgccggtggaaggcacagtgataagcagcggcgtacctttggcacgggcgctgtccagcacctcggtgtaggtctcggcgatcttttcggtcaccagcagcacagcgatgtcgggctgcttggcggcgttttccagcgcctggcgcaggtcggcttcgctgcgggccacggtgccctcgataccggccagacgcagaccgttcatggcgtcagagttatcgctgatgagaaagaaccgcatggccttacaccagcttgctcaggatcatgatggagatgaccaggccgtacagggcgatggattcacccagggccacgaagatcaggctcttaccgaaggtcttttcgttctcgctgttggcagcgatagcagcgggggcagcggaagcaacagccatgccgccgccgataccggccagaccggttgccaaagcagcagccaccaggccgatgctcagggaggagttgtggtcgttgtcggtgttggtttcggtggtctcggtagtggaagcggcggcagcggcctcgtcggtgttgtcagcagccaggacgccgaaagcgccgcagcaggtcacagccacaaccagcagaatggtaacgaacagcttgttgaatttgcttttcataagaataccctccatgatttttattttgtgaaattccctctatatagggatcgatgctcgcatcgacccgcgggtggatgcaagcacccgcccctacagacaaatgcggatatttacgcctttttgatattaaacgcggtaaacttgcggccgccgccgttgtagcaacggctgaacatctcgtagaactccagacggataccctggatggcggagagcagcgcttcgaggcagatgaccacgatgttgcccaggatgaccaccagcatattgttgggcgtgccggccagcgtaaagacgaccatcatcatgctggcatgcacgatgacaaacgcaccaacacgcaggaaggagatcgtgttggacaggtaactcagcaccgtctccaacagttcaaacacgctctgcatcaggtagttgcccatgccgccgacaggtttccagggcttgccttccaccatgggggccagcagctccgcgaacagcagcaggaccaggcccgctaccatgccgatggcggccaacacctgcggcaggaaggtgaacgcgcccatgtaagcgctggccagatccacaccgcacaggtaggtgatgacacccaccagaccgttgggggagaagatgaactcaccccactccttgtggcgggcgtgggtgtacatattcagtaccatggccgccagcaccaggacaacgccgatgtaaacggcgaccatcaggatgccggtgatggaatccatgaccgaaacgggcttgcctgccatgccaatggcgtggtagagcgggtccagggcatcctcatagccgaagaaggaaccatagaccaggccgaagatcgtactggagatgccgcaggggatcatcaggtggaacaggtcgttgtgcttgaccttccacataaaggtgctgaacagtgccagcacgataccctgcccgacatcaccaaacatcatgccaaacagcacggtgaaggtgagcgctacgaagccggtgacatctgtctcgccataggcgggcagaccgtacatctcgacgaaaaactcaaaagggcggctccaccaggggttcttcagtttggtggggggcgtcatcttaccggcggcctcggggccgtccacggtaacacgcaggtctttaacggcccgcgccttgccggcgatctcctccacatccggcgccgggacccagccgacgcagaagaaatgggaacctttcacggcagccatgcggcgcaggtcgtacatagcggcgtagtagcgcaccgtgtcgtacagcatctgcaccttggcttcgtggtcatgccacaaagccgcgatgcgggcgttgacatcatccaccgactttttgacaacttccaggttctctttaaaatgctcgatgatctcggcaggggaaccggccgcaccgggcacatgcaccggctcgaaatacagcatcgagaagatgccgtcggtctccagcgctttctcgcggggggtcaggtagatgccccagtagccggtcttggtctgggtgcactctacaaacaggatatagggatcatcggcgtagttgctcatcagcttgttgtagccttcggtgggcaggaagccgaaccgcaccttgacgtgctggcaatccaggatctcatccacatttactttcaggttcaggaagtggctgtactgggcgatgccgtcctcgcagagcttctgctggtccagcaggccctggcgctcggcacacaggtcatcgatctgctccagcaggtcgctcaaataggctttggcttcctcgtccggcgggtcggtgtggcgctgctctttatgcagttccatgccagcctctttcgccatagtctcgatctggtcgcgggtggcgggataggggtttccctcgttgagggcggcgtatcccagcgaatccgacatataacgggtggcaggttccaggtcaaaccggccgtccatacagcaggcatccaggaaatcgttcagctggggcagggttccttgtacccgcaccagcttcatcttttcaaccaatccgttcacactcctttcaatcgtgttcgtcgtagccgatcagcagggctaggacttcttcggcgggcagcttgtagtgcacgccctcgatgatgtggttcaggttccacacctcgcactgggccagccagatgtagcacatcatgaccagcgtgggctcggtggagaaccgcagccacttgcggcaccaatcggtgcggtagcggaagaagccttccttcagcacggtgtaatcgtggtgagccaacagcgggccgtaactggtttgggcaaaccgctgcttgaaagcaggcagatccggcgaggccagcaggtagtcccactcggcggccgtcagggcgctgcaatctcggcggcaggcgttgcgcaccgtggtggcaggcgcccctacgcggatgagccgcgcggcgttggacaccgccgaggtatcgcactccagctcaatcagctcccgcaggccgggctgctcgccctgcttggcgggcttgggtgccatagcgaccagcgcccgatggcggtactcctgcatcagaggttccgcctgggcggtcaggccgcggtccggcttagcgttggccagcggggccagtaccttagcccagggcgtaccctgtaccgcagccaaaaggctttgcagatcggtggctttggccagcgcgtacagatcaatgctgcaacgctgctccaaaaagtccggcaggcggtacaggtaatcgccggggcggcctgcatccaggcaccgcagggcggcggtcagctcgtcgacctcgcagcaaagcgttaagtactggtacacgctgctgcctgcgctgcggtcataccggcacaggctgtcgaagcgttcgtactggctttgccgcagcaggttctccagctgggcgcggcgggcgtaggtggggtttacctcggccagcgtgttggcgtacagcggcagggctttcaactcgttggccagctctgtcattgtatggcaatccgttaagcggcggtaatcctcagcgcgcaggcggcggccatacagggcgcgggcctttgccagcacagcattgctggctttgccgctcgcgtggttcattgtgcagcctcctgggccagggcgcggcgtaccagttctgccgtccactcggcctcatgctgtttggcggctgccgtcatggcggcggcagcctgttcacattctttgtctaaggcggcgcgggcctcggcgttggcggcgtcggctgctttggcggcagcttcggcatccgtctgggctttggcgtcgcactcggcagcgatcgcctgcttgcgggcatccagggcggccagccgcgccgtgcgctcagccttggctttctcactggccttacgctgggcggcgtccatctccaggatcgcctgcatcagatcgttcacatctttcatcccatgcacctcatttctggaattgggatttttccgggtttcgtcccgtattatagcactttcaccaaagatggcaagtctcttttgtgcagttttattagtacaaatttaacaatgtgtctctgcgtttcactttttcttgatgcagcgtaatcctgcgccaaacaccgtgcgcaccagcgggccggcagctaccagctgccacaggaacgcagcggggtagttcagcatggtggtctgcacccagatggccacaaagtt

SEQ ID NO: 7763 - DNA, 10200 bp, Unknown
  gut microbiota DNA sequence
gtgcggttggcgatgtagagctttttaacgccgctttgcgccagctcgtacgcggtcacaccgctgatgccgcctgcaccgtagagcagggcgttgatgccgttcagcttggcaccgccctcctccatggccttgacagcgcccttgccgtccatgccggaaccgtggctgccgttttcatccagacggatggcgttgaccgagtggaacagcttggaagtctcgtccacatcgtccagcagatccacgaagtcgctcttatggggcattgtggggcagaggtagtgaatacccatcaggcggcaggcatccaacagcttgggcagctcacccttcttgatctcgcagggcagcatgatggcattcatatgcaaccgctcaaacagcttattgtagcagcggggcgcattggtcttgccaatggggtcgcccacgttcaacactagttcggtgtccaggttcagtttgatattttccagtttcatagcgggtcactcctttttgccgcccaggtaaacgctggtcagcacgtcgcccttcaggaagtcgtcgccggtaccggccacgacgatcttgccggtgttcatcaggtaagcgcggtcactgatcttcaaggcctgcttggcgttctgctcgaccagcaggacggtaatgcccatctcgttgactttcttgatgacctggaatacctcggcgatgaccagcggggccaggcccatggagggttcatccagcatcagcagttcggggtcggacatgatggcacggcccacggccagcatctgctgctcgccgccggagagggtgccgcccagctggttgcgacgctcgtacagacggggaaacaccttgtagaccatgtccagcagttccttatcacgctccgggggacgtttgcggaagaaggtgccaatctccaggtttttctcgaccgacagttcaataaagatcttgcggccctcgggcaccagagaaatgcccatgggtacgatctcgtggctctttttaccaaccagttcctggcctttgtacaggatgctgccctcatcgatatggaccatgcccaggatggatttcatcagggtggacttgccggcgccgttggcacccagcagcgagacgatctcgcctttattgatttcaatatcgatgtttttcagggctttgatgttgccgtaggaagaagacaggttggtgatcttcatgatattctcagccattattcatcatcgctccttcccaagtaggcttcaataacatcgttgttgctctggatctcctcggccgtgccgcaggcaatggggcggccgaagttgatgaccgtaatgttttcagagatgcccatgaccaattccatatcatgctcgaccagcaaaacggccagatgataggtgtcacggattttacggatggtgttgaccagttctttcttctcctgcgagttcatgccggcggcaggctcgtccagaagcagcagcttgggcgaggtagccagcgcgcggccaatctccagcaggcgctggtgaccgtagggaatgttgcgggcttccaggttcttgacatcctccagccctaagaaccgcaggatctccagtgccttttcgcggcactcggcttcttcctgcatgcatttgcggtagttgaagatgacgttgaacatgccggtcttggtcttgcagtggaagccggtcataacgttttccagcacagtggcggatttgaacaggcggatgttctggaaagtacgggcaatgcccttttccacgatctggtgtggtttcttgccgcagatgctctcactgttgaaaaccacatcgccgctggtgacctgataggcaccggtgatcatgttgaatacggtggtcttaccggcaccgttggggccaatcagggcgcagatctggttttcctccactttcaggttcacgccgtcaacagccgtcaggccgccgaactttttggttacgtctttcagttccaggatcgccattctgctcacccctctttctgttcagccgcttgaggctgttttttactatggctgacgataaaacgcttgatgtagggatacaggccgccggggaagcgcagaatgacgaccagcaaaatcacaccgtagacgaccagacgccagtcacccaggaagcgcagcgcttcgggcaggacctgcatgatgataccaccgaggacggggccgataacggtgccgaagccgccgacgatggcagtccacaggataacgctggaagtgttggatacgaaggtatcggggctgacgtacttgatcatcatggcgtacaggcagccggcgacgccgcagtagacagcgctaagaacgaacgccttgattttgtaagcagtgacgtcgatgccggtcagctcggccgcttcgttatcttcgcggatggcgataaaagcgcggccggtgcgggtgcggatgatgatgctctcataggccagacccagcagcacaaacaggaggatgaggaagtagtatttcttcagtgtgtcaaaggaaaagccgaagatgacggggctctggatacccagcacaccggcggtgccgttggtgacgggggtccagttgatcattacaatacggaccacttcgccgaagcccatggtcagcagggccaggtaagaacctttgactttcagagcggggatggccagcaccacgccgaagaacgcggtaacgaccacagaacccagcaggcaggggataaactgcagcccggcgcgggtgttcatcaacgcggcggtgtaagcgccgatgccgaagaatgcggcctggcccagggacagctggccggtgtagccagtcagcacgttgatgccaatgcccaggatgatatagataccgatcatgttaatgatctgcatgatatacatgtttggggtgtcgatcggcagcaggatcaaaatcgctgcgatcaccagaattttcaggagagcagcgcttttcttggttctcgtcatgataaagccctccttacagtttgttttcgatcttcttgttcagcaggccggtgggcttgacaaacaggacgatgaacaggatgatgaacgagaatgcatcacggtaggcagtggagatgtaggccgagccaacggcttcgacgatgcccaggatgatgccgcccagcaaggcaccccacaggttgccgatgccgcccaggatagcagcggcgaaggctttcataccgatggtggcgctcatgtcaacacgggcgtaggtcagcggggcaatcatgacaccggcaatgcaggccagtgccgcgctgataccaaaagtgaggaagcgcatgtaggtgacgttgacacccatcatggcagcgccctcagggtcagagttggcaagctgcatgcacttgccgatcttgactttggtaaagaagaaatgcaggccggtgatgatagccagcgagatgatgataatgccgatagactgcggagtaatgcggaactcgccaatttcgatcagttccgaggggaacatgctggggaacagctgcgggttggtgccccagatgaccatggacgcattgcgcagcacgtaagaaacgccgaccgttgcgatcagcaggttgacgaaagaagaaaacttgaccttgcgcaggatcacgcgctccagcaagaagccgagacctgcggcgcagatgatgcccagaggcaccgatacatagaaggggagacccagtttggtaataaaagtaagggtgataaacgtgccgaccatcataatgtcgccgtgggcgaagttcagcatgccgagggatttgtacaccatcgtgacaccgactgccatcagcgcatacaggctgccgtttgtcagaccattcaatatctgttgaaacagcatcttgtgctacctccgtttttaataagaaaaagagaagcactggtttgggcggctggcgcccgccagcgcttctcttataaaatctgctctaccaaattagttgtaattcttcacaatgacatgctcgccgttctcgatggcgatgaccagcaggtccttgtccatacggccgttctcatcaaaggtggtcaggccggtggcgccctgccactgggtgctggcaatgtagctgttcagggtctcgccgtcggtgtagtccttgccgtcagcaatgcagcgctcgacagcatccttgatgatgtacacagcatcgtaagactgcggggcgttctggtcgtagccgccgccgtacagctcgttgtacttcttgtcgaattcctggaccttttcatcggggttggcagcatcaaacgcggtggagatcatcacgccgttgacagcgtcaccgcccaggttggtcagctcgggagagttgtagccctggccgatgcagggcaggtcgatgccgtactgctgcatctggcggcagatcatagcgacctcggtgtgatagccccagaagataacaaagtcaggattggcctgcttgatcttgcccaggggcacggagaagtcggtgtcgccggagttgtagacttcgctgtctaccatttccaggccgaagtcatcgcagacggtgctggcaatcttgaaaccaccggtgccgaagtcggaggactcgtacaggatggcgaaagtcttggcattgttttcatcgaccatgtagcccatgacgttgcgcatatgcagctcatcggtggcggtcagctggtagatgtagtcgttgccgctctgggtgacagcgacgttggaggaagccggggtgatctggggaatcttggcggccttggtgatctccatgttggccagggtgcaggaagaagcctgcgcgccgataacggcgttgaccttgtcctgctccaccagcttctgcatggcggtcacggaggtggcaggcacaccttcatcatcgacggaaacgaggttgatggggatggtgccattgatgccgccagcggcgttgatctcgtcaacggccatcttggtagcgttctgcatgatctggccggacacggcagaggagccggacagcgggcaaatcaggcccaggttgaaagcgccttcgacgctggaagattcaacagtaccggcagcagtggaaccggcagtagaaacagtggaggaaaccgtgctgccgcaggcagttgcggtaaggcacatggccgcggccatgatccaagccattgtctttttcatagttagtctatcctttcattgtagaggaaagagggggcatgcttgcatgcacgccccctccgaatgataagggtttgctcgtgggttgttaccgcaagccgttattttgcgatttcggcagtgatcttcaggaactcgtcgatgtcctcgtaggtgtggcagtgcagcggggagatacgaacgatgccgtgctggttgatggagttgacctgacgtgcagagtagaggctggcgtcggtacgctcgtggacgaccacaccggctttctcataagcgcgggatgtctgctcgcaggtgagcttgtcaaagacaatgggaacgatcaggtcgcgctgggtcaggtcgggcatttcaacagcgacgttgacgccctcgaggtccagcaggcccttgacctcatcagagccgtgcagcaggcggtacagcagggcacgctcgtgcagcatgatgcggttcatgccctcaacatagagggtgcggcggtcctgggagtcggtgaagtgctcgccaatccagcagacgtagttgaagatggcgctcagcatggcgtacataccgggggcgcagccgcccatttcccagttgctctgcttctcgcggatgagcttgcggtggggcaggttcataacgcggtcgctcagccagccaacgcccaagccgcgggcaccgccgaacttgtagggagcgaagttgacgcaatccaggccccaggctttcatatcggtcagaccgtggggagtgtgctggacggaatcgcagatgatgaacagatcaggcttgatcttacgggcttcacgggcgatggtctcgatatccaggacggcgccggtgatgttggaggtcatgatgacgctcaacaggcaggtgtccttgtcgaccagcttgacgacatccatcgggtcgatggtgccggtgcgggggttggtcttggcaacacgcagttccttgccgtacttctcagcggggacggcgcagccatcgaaagcggagggatgctccaactcggtggtgacgacgttggtgccgggtacgttggcgatgatggcctcggaaacatcaaagacgatgatggaagcggtcatcgaggtagcgatgcagccgccctcggcgttgaacatcgtggagatatccttgcaggcctgggtgcgcaggctgtccagataatcagaagcggcaccgccgtggccgccgcagttgggcaggtcgtccacattgcggaaggcttcgctggcgtccttcaggcggaaggaaccgccggagttgtcaaagaacaggcgcttgctcttggtgaaggggtcaacgtccacgtggtagtatttatcgcggatctgggcggtcaggtcggccggcatcagctggccgttcttgatgatatcgttcatttcgctcatgatttttgcctcatttcattttgttggacggatcagtcaaaaacgacttcgccgtggtcgaagatcaccttgccatccagctcgatggtgggatccttgaacatcatatcaatgtgcaggatgaaatcctgattgtcggtctcgttgttgcccagggcgcagtgtacgtagccgctgcaaccttcatcttccagcatacggccgcacagggaagcatccgggttcaggccgatgccgatctcgccgatgcggtacatgcgggggtcgccgaccttggccagctcctcagcaaagcgcttggcttcttcgccgccctcgatcttggtgacgaagctgttctcgacgtagatggtgatgggctctttcagaacacccatagccgggtgggtgatgctgccgtcaacgacgatcttgccgtgggcggtgccgggcattgcgccggaggccatctcaatgtccgggggagagcaggtctcgccggggttgcggaccatgccgtactgcgggaagagtttgtggcccttgatgctggcgtagtagtcggtgccggcctcggaggtgatgtggacctggtcgccgtcagccatggacttcaacagctggtcaacgtatttgcggtcagcctcaaagtcggtgtacaggccgccgtgctccagcatctcaatgctgtaatcacagcagttcagatcgcgtgcaccggcagcgcatgcatcgcggcgtgcgtggctgtgggacaggctaaacttggtggcgcgaaagatgacatcggctttcagcatagcggcggctaccagcggggtgggctcttcaccgtgcatcttgcggggttccatcatgaccatcgtctttttggggaactcctcggcggcatcccacagggccatgccgatctccaggctgtcggtatcggtaacgatcaagatgttctcattgggctggcagttagcacaggtggtgagaagacggcggcaagcttcgtagattttcttagccatggtgttgtgctcctttcaagcgtggactgtttcctcattcagtctatttcatgtgttttgtagtgtctcgtgtaacttttattcggaaaaagcttttcttactttttcggggtagcgtttaaacaattctttaaaatctgtacctccttttttgtcatctgatggggtgtctgtgtttttgttgtctgtatgatagcacatgcggttacgcgtgtaaatacttttttgcgatttttttggcgttttgcgagctttcagctgttcttacaactttgcaggtcattatttgtgcaaattgtagctaaaaccggcctgcattgcagttacacgtgtcaagacaggacgttttccgtgtaaagaaacaggcagcggccccgtggactgtcctgaggtccacaaggccgctgcctgccgtaattctatgtgagaaggagaataaagggtattggcgataataaaggctggcatcaggcgctctcgcgcacgcagagggagaccggcagaaactggtcctgcgctttctcgccccgcagcagggccatcagggtatctaccagcttttgggagaaatcttccttggaaaagtcaatgctggtcagtgtgggggagaccatctcggcaatataggtattgtcggtgcctactacagccagatcatcggggatcttcatgcccagctttttcacgtactgcatgatggatgcagcgatgaaatcattgcccgcaataatggcagtggcgcgctcgtccttgcttttgctgaaaaccatgtcaaacacatgggacagcacaccctccatcgtgtccgcattggtgcagacatagcgctcatcataggggatgccgttgacttccagcgcatcgcggtagccgcgctcacggtagccgcgggtgatatacatattgtagcgcagcggcggcacaaacaaaatgcgccgatgcccgcggaacaccagatagttgacagtcttttccacgccgctgtacaggttgggcgctaccgcaacgatatttggctccagatgactgtattcccgcgttttgtacagcaccaccgggatgccagcctcggcaatgcggttcagctgcacggctttgtagcggttggacagcatgaacacggcatcataccggccggaaatcagcgattggataaaatcgtcgccgtcacggctgtagcagtgggaaacattgtatcccagcttgtccagctttttctcggcaatctccagccagtcgttgcgcaggttgtcgcacacaaacgcgatctgcatcgagcggttggttttcaggctgcgggcatacaggttgggctgatagttcaattccttgatggcgtccagcacagcctgggtcttttcctcgctgacgaacttggtcttattgatgacgtaggataccacagcaggggagacccccgccagcttggctacgtcatttcgggttgcgttcttgcccatactcttttccttacttgtgggggctgtgcgcacaggggcgcacatgccggtagatattgttgatgaggcctgccgcgtaggaggccaggataatgcccagcgcaatggcaccggcttcggccagcaccagctggagcagggatgcaaatttggcggagtcgccctcgattaagctgtacatcgtataatacaggtcaccaccgggaatttccggaatcagcatcggaaccaacagcagaatgaccggcgttttgataaggcgggccgtgacttcgctgcaaatagcaatgaccaaactggaagccagcatgccaaaggcttttccgtgcccgcctgccacgctgaccagataaaccacccagccgatgccgctgcccagggcgatgcagcccagcggctttgtgccgcgtatcccaaacagcagggcgaacccgagggacccgactacgcccatggcggtttggataatttctgcctgcaaccttacacacctcccgccagcagcaccagggcaaagcccagtgctaccgagatggcttttaaaattgcttcgctcagattcaaaagaccgctgatggtatcaccattgatcatatcccgcagcgaggtggtcagctggatgccgggaatgaccagcataatgttgccgatcatgatcttgtccgggtggacgccgatgccggccctcaccaacagcagcaccgccagcgctgtgaccgcactgcagatagcggtctgcagcagactgttcatctgcaagatggtgctcatgcgtatcatggcaaacagcaccatgccggaaagggacgccgcgatgccatcggccagattgccgccgaaaaagatggacagcgaaaacgagatgaccatgtagagcaaaagctcttgccaggcaggagtcgggcgctcgtcccggatggcctgcaaggctgtgcggaattcagccagcgtaagagccccggcgcagaaccggcgggagagggcgttgatcttggctacccggcccaaattggtgacacgtgccttgatacggcggctttgggtgatgctcccgccgtccggcaagcgtacggttgccacaatgctggatgtaatcgtaaaaacatccaccaggtcaaagccgcacacatgctcaagccgttggatggtatcctccacccggctgacctcggcaccgtatgtcagcagcagctcac

SEQ ID NO: 7764 - DNA, 28944 bp, Unknown
  gut microbiota DNA sequence
ctggcccgcctggacctgaacaacgagagcgccaaggccgagaccgacgccgcccgcgtggccgagctgaaccagcgcgtcaacgacctgtacagccagatcatggccagcgagggcatggtccgctacaatgccgccaagtctgagtgcgaggccatggtcagccacattgacgccatcatcaacaccgccatgaatggcggcgaccccatgaccgtgcaggccccctccggcggctgcaccggcagctgctccacctgcggcggctgccattaaaccctgacccgtacaaccaacttttgcagaaaacacaggagtgtgaaccatggcggaacaagcagtttccccaatgatgcagcagtattttgaaatcaagaaacaacacccgaacgagattctgttttaccgtgtcggcgatttttatgagatgttctacgacgatgccttaacggcctcccgagagctggaactaacactgaccggcaaaaactgcggcaaagaggagcgcgcccccatgtgcggcgtgcccttccactcctacgagacctacgtcgcccgcctcatcgccaagggctacaaggtcgctatctgtgagcagatggaggaccccgccttggccaagggccttgtcaagcgggatatcatccgcgtggtcacccctggcactgtcatcgagagcagcatgctggccgaggataaaaacaactacctttgcagcgtttacaccaagcgcacccgcggccgctggaaggctggcatctgctttgccgacatctccaccggcgaggcctacgccaccgagttgaacgccgaaaagatcggcggtgcaatcattaccgagttatgccgctacatgcccagtgagatcctgatttgcccggcgatgctggacttcaaggatgtgactgcctacatcaagcagcataccaacgccctggtggaactgcgggaggatgcctgctttaaggacagcgtgatggaagctgccatggcgaaccagttcggccccgattggcgggatgccctcggctacgagaaggatgccctggtgccttatgctgtggccgccatgatcaactacctgcacgaaacgcagaagcacggcgtcgagcgtatcaagaccgtgcagaactatgccgacgcccagtacatgcgcctgtcgcctgtgactcgcgcgaacctcgaactgaccgagacgatgcgcggccgcgagaagcggggcaccctgctttgggtgctggacaagaccgagacctcgatgggcaagcgcctgctgcgctcctggatcgagcagccccttgtggacgccgaggctatcaaacgccgcctgtctgctgtgcaggcgctctacaccgccaacatggcccgcgccgatttgaaagaagcgctctcccacgtctttgacatcgagcgcctgaccacccgtattctctacggatcggccaccccgcgggaggtcaaggccctgggcgatacctgcgctatgctgccggaagtgcgcagccaggccgccgcctgtggtgcaccgctgctgaaagacctggccgaccagatcgacccgctggaagatattctgaacaaaatcacgaccgcgctggtcgatgacccgcccgctaccttaaaggacggcggcgccatccgcgccgggtacaacagcgaagtcgacgagctgcgggatatcatgcacggcggcaaaggctatctttccaatctggaagccaaataccgcgaggagaccggcatccccaagctgaagatcggctttaataaggtgttcggctactacatcgaggtcagccgctcctacactgactcggtgcctgataccttcacccgcaagcagaccctgaccaccggcgaacgctacatcacgccggaattgaaagagctggaaaataaaatcctcggcgccaatgagcgtctgctcgtcctggaacatcagcttttctccgatctgttgacggaaatctccgaccagatcgtgcgcatccagcgcaccgcctcggcggtggcccagctggatgtactggctggttttgccgaggccgcactccagaacaactacgtcctgccggtggtggataccagcggcgagatcgagatcaaagagggccgccacccggtcattgagcagatgctcaagggcagcttatttgtccccaacgacaccctgctggacgaggacgagaaccgcatgctgctcatcaccggccccaacatggccggtaaatccacttatatgcgccagaacgccctgatcgccctgatggctcagatcggcagcttcgtgcccgccgccagtgctcatctcggtgttgtggatgcgatcttcacccgcgtgggtgcttcggacgacctggctgccggacagtccacctttatggttgagatgaccgaggtggccgagatcctcaagcatgccaccagggacagcctggtcattcttgatgagatcggccgcggcacttcgacctttgacggcatgagcatcgcccgtgctgtggtagagtatatctgcgagaacatcggctgcaaaacgctgttcgccacccattaccacgagctgaccagcatggatcaggacatccacggcgtcaaaaactataacatcgccgtcaaaaagcggggcgaggacatcacgttcctgcgccgcatcatcgccggcccggcggatgacagctacggcattgaggtcgccaaactggcgggcctgccgggcaacgtgaccaagcgcgcccacgccgtgctgcgccagttggaggccaacgcccccggccgcagcaacacgatgcagctggactttgagaccgtagaagcctacaacaaccccagcgtgcccagcgaggtggtggacaagctccacagcgtggatattgaaacgctgaccccgctggaagcgctgaacttcctgtacgaactgaaaaccgttttagataaagaataaaggcaggtgagacccatggcggaaattcgtgtgctggacaagcataccgccgaactgatcgcggccggtgaagttgtagaacgaccggccagtgtggccaaagaactgctggaaaatgccatcgatgccggggcgacccagatcaccctctcggcggcccgcggcggcattgcccaactgcagattgctgataacggcaccggcatcgaagcagaatatatcgataaggcgtttatccgccatgccaccagcaaaattgccacggcggatgacctggggcatatccataccctgggattccgcggcgaggccttggcgtccatcgccagcgtggctaaagtggaagtgctgacccgtaccgaaacggacgagtacgcctgctgctaccgcatcgagggcggcgagccccagggcatggagccgggcgcgcgccccgtgggcacgaccatcacggtcaacgacctgttctacaacacccccgcccgcatgaagttcctgaaaaaggacgccagcgagggaaccttcgtctctgagaccgtcctgcacgctgcactctcccacccggagatcagcttccgctttctgcgggacggcaagcagcagtttttgacccccggtgacggagacctgcgcagcacggtctacgcggtgctgggccgcgagttcgcccgtgaccttttgcctgtggacggcggcagtgagctgtataaggtcaccggcctggtcacgccgccccgggcctgccgcgccagccgcggtgcccagcatttcttcgtcaacggacgctatgtcaagaaccgcacgatgatggccgcgctggaaaacgcctacaaaggcacgatgatgcagggtaaattccccggcgctgtgctgatgctggagatgcctgccgacctcgtggacgtcaatgttcacccggccaagacggagattcgttttgccaaagagagcgatgtctttgatgccgtctaccgcgccgtacgcaccgctttggctacgccggggagcggggagtgccgctttgagatgggccacaccgcctccgaggccgaacagaccaccatgcagcccactgccccggcggcacctgccgcacagcaccgcccggcacccgataaaaaccgcttcacaacgctgtcagcggccgagtaccgcgctctggcgggcctggcagcgggcatcccggccaaagaagttcccggcttgacggtggtggacagcccgaagcccgtctacaaaacctcggccggcgctgcgcctcagcctttgcagggccagccgccccgcccggtggcctaccaggcccccagcgagtcggtgctggacattttgccggaaccggaaggggagcctgcccagtccgccgccctgcagcaggaagtgcccgcgcagaccacacccaagccggaggccgaggcaccggtcccggaagagccggactatgtcgtcaacgacccccacgccttaagcgccctgccggatgtggtcaacaccacgccggagcagactgccatgaccccgccgccagaatctgaacccctgcgcctggtgggcgaggtgttcaagacctacattattaccgagcgtgcgggcgagctgtgcgtcatcgacaagcacgccgcgcatgaacgcatcctgtttgagcagctggccaaggactacggcaatgtgcccgcccagatgctgctggtgccggtgcaggtcaacctgaccgccgccgaaaagcaggccgtattgcaaaatattgacctgttgaccgatgcgggcattgaagtcgaggacttcggcggtgccacggtggtggtgcgcgctgtcccggcggacgttccggtggacgatgtcgaggatatgatcatcgaactggccgcccgcctgatcgatggcgcccgcgatgccttgcgggagaaaacggagtgggtgctccattccattgcctgccgcgcggccatcaaggcgggcgacaagaccggcgcagccgagatgctggcgctggcccagcacatcatggacggcaccatcccgccgttttgcccccacggccgtccctgcgtgctgaaaatcacccggaaggagctggaaaaacagtttggacgccttgtctaaaccgcgcgttgtcgctgtcggcgggcctaccgccaccggcaaaactgccctttccgtggccctggccaaagagtttggcggcgagatcatcaacgccgactcgatgcaggtctacaaaaacttaaacgtaggaacggcaaaaccgaccgcggaggagcggcagggaataccgcatcacctgctggatttcctcacgccggaaacgccttacagcgtagcggatttcaccgccgccgcggccccgctcatcacccagctcaacgcccaaaactgtctgccgctggtggtgggcggcacggggctgtatatctcgagccttttaaaaggtgtagcgtttgaaacgcagaacaccgcccctgtcctgcgggagcagctgcgccaggaggccgaggccaacggtcccgccgccatgtacgcgaagctgcgagaattggaccctgactacgccgccaaggtccaccccaacaaccaggtgcgggtgctgcgggcgttggaagccatcgccgtgaccggcaaaaagatgagcgaccagcagcaggatgccttgcccgccgaagcaccctatcgcgccctctgcctgtgcctgacctgccgggacaggaatgtgctctaccgccgcattgatctgcgggtcagccggatggtggatgcgggcatcctgcaggaggccgagtgggtctggcgcaaccgggataccttccgcaccgccgctcaggccatcggctacaaagagtatttcccgtacttcgagggcacccaaacccaggccgagtgtaccgaaaaactcaaacaggccacccgcaactacgccaagcgccaactgacctggttccgcaaccagaacgacgccgtctggctgtatgtggacgtggacgatgtcctcgccaaggccaccgcgctggtacgcgattttctggggaaatagttttgcaataagaggggagatggacacacagcatggagcataaaactcagcgcaccatggcgaaaaaagtgttccgcattctgtttatgctgctcattgcggtgttcggcatctacctggctattcagttcatcatcatcttccaccgcggctacaagaccgagacagccatcgcctacacgatggccgacagtatcagcctgcagggcgttgtttcgtttgacaccgtccgggtggatggcagcggagatctgggctatctcgtctcggacggcgagcgtgtgaccaacggcaccgtcctggccgagtgctacaccgatgattcccagggccttctccgagagcgtcttgaccgcctgggccgcacgatcgacctcttgagcaagtcgcagaattcctccggcagcgacctttcgctgctgaccagccagacccggcaggcgctgtacaacctgctggataagctggacaccgcccagtacagcggcatcaccgatgccgaggatgcctttctgctggcccagaaccgcatgcaggtcaataccggccagaccgagggcttcacccagaccatccaggtcttgcagaccgagtacgacggcatcaaggcccagctggacactttgcagaccatcaccgccgccaccaacggctatttcagcagtgtatcagcatcgcccaccatcgtgaccgatgctgctcagctggatgccgccaccccggcggagctgaacgaactgttgcaaaacggctttccggcggcagacaccaccaactgcgccgggcagatcgccacaggcttcagctggaagttctacgctgtctgcgacctggccacggcggatcggctggacggcatttccagtgtgaagatcagtgtgcccggcaagcagaataccccgctgtctgccgccgtgcaggaattgacccgggacgaggacgccggccttgccaagctggtggtctcctgccagaccgtcaatgccgaaattttgagctttggcgtcgagaccgcgcagatcgacctcaagacctacgagggcatccgcatcgacaaagcggcgctccacatcgtggacggacagcgcggcgtctatgtcaagtatggcaacctgcagcggttcttgaaaatcgaaactttgtacgaggacgagaactacatcctgattcccgataacggcaagctgggcaccgataatgaggtgcgtctgtacgatgagatcatcgtgcagggcaccaatctgcaggatggcaagctgttgtagcggcgttttagcaagaatcttgcggccccgtattgacaactgctataaaaaagaagataatatttagtgtatatcgctgtaatagcgcatatccactgccaaaacgatatgcgtaaccaaaggagtaaacgaccatgtccatgtttgacaatttgaaaagcaagctcggtatcgatacggaagccgattcctacatcgatgataccgaggacgagatcttcgccggcgggcagggtgccccccagcaggattacgaacagccggaggtcaaacagcacagcaacaaggtggtaaacatcaacgctaccacccagctgcaggtcgtgctggtcaagccggagcgtttcgaggatgcttccaccatcgcggaccagctcaacgccaagcgcaccgtcgtgttgaacctggaatccaccggcaaagaggtttcccgtcgtctgatcgatttcctgtccggcgtggcgtatgccaacaacggccagatcaagcgcgtggccaccagcaccttcatcatcaccccctataatgttgacattatgggtgatctgatcgacgagttagaaaataatggcgtcttcttctgatcccgccgccaaaacgcgtggctatatcccgccgcagaacgacgaggaacgccgcttaatgaagcgggcggaagaactttgccgcgttgctgaaagccgcaggattccgcggtataccggctttctttctgaccgggaacagatgttggccgaagccgcctgccacaaagcgggctgcgagagcttccgcttctggggcgggtttgagggagctgagcggcaggtgctctgtatcgagccgccggacacctggcaggaggaacccaccgcttacctgcgcatgcagacctacgacagcggcgctaaactgccaacccaccgagattatctcggttcactgttaggcttaggtttggaccgcgcctgcatcggtgaccttttgcaggaccccgacgatgccgctgtgttttatgcggtggtgctggcggataaagcggagttcatcaccgtaaactttacaagtgccgggcacagccccgtgcatgtggaaacctgcaccgaactgccgccccgcctgctgaccggccccgaacgggaactgcacgaagccaccgtttcggctctgcgtgccgatgcggtgctggccgccatgatgcacacttcccgcaccaaagcagcggaatatatcgccgcaggcagggtagaggtcaaccatctgccgctgcgcgctgcccacgaggccatgtatgaggccgacattatcaccgtgcggggcgtgggacgcttccgcttagcggagatcggcggcaaaagcaaaaaagatcgccagttcatatccttttaccagtattgagacaaagagtcccggactcttcgtataaaatgcaggaccctgaaatccggcaataacgggctttgcccgcaaacaggaggaaagccatgatctcttctgaggatgtccgccgcgtaacatttgacaaagcgatgcgcggctatcgctgcgatgatgtggatgactacctcaagcaggtagcggaaagcatggatgccttggcggctaaaaatgacgagatgcagaaaaacctcgtcgttctggcccagcgtattgaccagtaccgtgccgaggaagacactctgcgcaccacgatgatcaacgcccagcgcctgggtgagaacgtgatccgtgaagccaagcagaaggctgcggaaatcatccgtgctgccaatatgaaggccgacgaccgcgagcagcgcgcccgcgacgatgtggaactggccaagcaggagatcgtgacgctgaaaagcgaagccgacagcttcaagcgttcgctgatggagatgtaccgcaagcacatcaacctcatcagcaagatgccggaatataacccgcctgcgcaggaggaagcccagcagcctgccccgcaacccgctgctgaccagccttatgctgagcccgcccccgaggctgtgccttataccgagcctgtcccggcccccgcgcctgtgcaggagccggaaccccaggccaccagctactataaccccgctgaaactgcccccgcgccggagcagacccctgtggccgagcccgccccggaaaagatagacaccgttgagttcgctatcgccccgcacccggaggaaccggaagaaaccgcccccgccgcagagccgatgccgatcgacggcagccgcttccagcccggtgcagggctgtacagcgatgcgccggaagctgccccggcgcctgccaaacgcagcacccgcaaagccccggccaagcgcagcacccgtaaaaaagtaagtgccgaaccgcaggaggagctgaattctccggcgttcgataactttgagggcgttgactttgacagctgatgtccgataaaccaataaggtcaaaaactatttctatagaggagagtaggaaatcttggcgcagaattacaacgacaccatccacaagatgcagaccccgtttgaaatgcgtgctggtctgccgaaaaaagagccgaaaatgctggaagactgggagcagaaccacgtctacgagcagatgatcaaaaacaacgagggcaaaccccgctgggtcctgcacgatggccctccatatgccaatggcaacatccacatgggcaccgcgctgaacaagatcatcaaggacatcattctgcgctacaagaacatggctggtttccaggccccctatgtgccgggctacgatacccatggcctgcccatcgagctgaaagccctgaagtctctgggcgataagaagtccggcgtttccaagctagaactgcgcaagatctgcaaagagttcgccaccgagcatatcgatgtcatgaactcccagttcaagcgcctgggcgtccagggcgatttcgccaacccctacctgaccctgcgccccgagtttgaggcccgccaggtcgagatcttcggcgagatggccaagaaaggctacatctacaagggcatgaaggccgtttactggtgccccgaggaccgtaccgccctggctgaggctgagatcgagtacgccgaggacgagtgcgactctatctacgtccgctttaagctgaccgacgaccccaacggcgtgctggccaagcacaacatcccgctggataaggcctggatcgtcatctggaccaccaccacctggaccctgcccgccaacgtggccacctgcctgaaccccaacctggagtatgccttcgtcaagatcggcgatgcttaccacatcatggcccgcgagctggtcgagtccacgatgaagggctgccacatcgacgagtacgaagtcctgcccgacaccgttctgggcagcgagctggagctgatgcagtatcagcatcccttcctggaccgcaagggcctggtcatcctgggcgaccatgtcaccctcgaaggcggcaccggctgcgtccacaccgcccccggccatggtgttgaggactttgaagtctgcgttaaccactacccacaggttcccgtcgttgttcccgtggatgacgccggccgcctgaccgccgaagctggcgagaagtttgccggtctcaaggtctgggatgccaacaaggtcattctggagcacatcaaggagagcggccacctgatgggtgtgcagcacatcacccaccagtacccgcactgctggcgctgccaccatcccatcatcttccgcgcgaccgagcagtggttctgctccatcgatgctttcaaagaggatgtctacaaggctattgacagtgtacactggcagccggcctggggccatgaccgcatggctggcatggtccgtgaccgcagcgactggtgcatcagccgccagcgcgtctggggcgtgcccatcccggtcttctactgcaagaagtgcggcaagtaccacatcaccgatgcttccatcaaggctgtctccgacctgttccgcaaggagggcagcgacgcctggtataagtacgatgccaacgagatcatgcccaagggcgaagtctgcgagtgcggcgcttccgattgggagaaagatcccgacatcatggacgtttggttcgactccggctctacctggagcgctgtctgccgcgagcgcccggagctgacctatcctgttgatatgtacatggaaggtgccgatcagttccgtggttggttccagtccagcctgctgaccagcgttgccacccagggccaggctccgtaccgcgaggtgctgtgccatggctgggtcgtcgacgaaaaaggcaagcagatgcacaagtccgctggcaacggcgtggaacccagcgaaatcattcgtgactacggtgccgacatcgtccgtctgtgggtcgcttccagcgattataccgtcgacgtccgcgccggtaaggagatattccgccagctgtccgaggcttaccgcaagatgcgcaacaccgcccgcttcatgctgggcaacatcaacgactttgatcccaacaaggatatggtcgctgacgatcagctgttcgagatcgaccgctgggcgctggaagcctgcaaccagctgaccgccaccatgcgcgatgcctacgaccactacgacttcagccgcgcttaccatgcgttgtacaacttctgcgtcatcgatatgtccaacttctatatggacgttatcaaggaccgcctgtactgcgctgacgaccatgcccgccgctgcgcacagaccgcgctgtaccgcatcctggtcgactttactaaactgctggcccccatcctgagcttcaccagccaggagatctggagctatgtgcccaagatgcccggcatgaaggactatgtcgtctttgagcagatgcccgaagccaaggccgctgctgacgaagccttcactgccaagtgggaccgcatcatggccatccgtgatgatgtcaagaaggtgctggagcaggcccgtgccgataagaccatcggatcttctctggaagcctgcctgacgctgtactgcaacaaggaggtctatgacttcctgaacaccatccccatggatgagctggccgacctgttcatcgtctccaaggttgatctgactgagggcgagggcggtgtcaagggcatcgtcgagggtctgggtgctgccgctgcccacgcagccggcaacaagtgcctgcgctgctggaagtacgagcccgccgttggcgaaaacggcctgtgcccgcgctgcgctaaggtgctgggtctttaatctaccgttcagcggtgcttataattgcataagcaccgctgatttttttgaataagggagtaaccatgatttttggtgttctttctgtgctggcggcggctgtgcttgtgggcgttgaccagcttatcaagcgctgggccacggcggtactgctgcctaaaacggccatgacgctgatccccggcgtgctggagctgcgctactttctcaacgatggcatggcgttttcgatgctagcaggcaaacaaaaactactgattgccgccacctcgctgatgctgttgggcgtattgtggatgttgtttgcccgcaagctgaccccgctggagcgggtagcctggactctggtactgggcggcggcatcggcaacctgatcgaccgcatcgctaccggcgtggtggtcgactacatcaacgtcctgttcatgaactttgccatcttcaacttcgctgacatctgcgtctgcgtaggcgtcggtctgctgatggtgtgggtgctgttcgactcctactttaaagaaaaagccgagaaaagcgtaaaaacggaatcggccgcccccgcagatgatgctaatggaaaaaattgaacttatcgctgggcctgatgcctccggccgcctggacgcctggctggcagggcagtgcgtcgagctttcccgcagcgccctgcaaaacctgatggagcagggcagagtgacccgcggcggcagctgtgtcaacaaaaaagacaaagttgtccccggcgctgcctactgtatcgacctgccggaacctcagcccatcgaggcccagccccagaacatcccgctggatgtcgtctacgaggataacgatttgatcgtcatcaacaaacccaagggcatggtggtgcatcctgcccccggcaacccggacggcacgctggtcaacgcgctgctgtaccactgcgccgggcagctttccggcatcggcggggccatccgccccggcatcgtccaccgtatcgataaggacaccagcggtctgttggtcatggccaaaaacgatgccgcgcaccaggcgctcagcgcccagttcagtgtgcatagcatccaccgggtctaccatgccatcgtttacggcaatctgaaagaggatgaaggctttgtggaaacgtgcctcggccgcgacccgcgggaccgcaaaaagatggcggtcgttccgcaggaagcctcgggtgcccgctacgcctacaccggctggcgcgtgctggaacgcttcggcaactttacctacattgcctgccagctcaagaccggccgcacccaccagatccgcgtacacatggccagcatcggccacccgctggcaggggacgccgtctacggcccgcgcaactgcatcaaaagcctgaacggccaatgcctgcacgctaaagaattgggctttattcaccctgcaacgcagcagtgggtgcagtttgactcgccgctgcctgcctattttacagagtttctgacacggttaagaaaggaacatcgcgcatgaaatcagcgctaagcgatacccttgtcatctgtgatatggataacacgctgctcaccgccaaagaggggctgccggcctgcaaccgcacggtcatcaacctctttaccagcctgggcggcctgtttaccgtggctaccggccgcccgccggagtcgatccgcgcagcgttggaaggcatacgcctttcgctgccggccatctcctgcaacggcgcgctgctgtatgatttttccaccgagacggtgctgcaccgctcgaccctcaaccgggagcaggccaccacggctatcaaggacatcctgaacaagttcccgcgcatgggtgtggaggtcatggccggcaacggcgagatgtacgtcatccacgccaacgagactacccacgcccaccaggtggacgaacacctgggcagcattgcctgccccattgactgtgtgccggacggctgggtcaaggtagtgtttgccgctgaccccgaggccatccgcaagctggggcagtacgccaaaaccaagtactacggccgggataactacttcctggccaccaacaacatttacttagagatcatgcccggcggcgtcagcaaggccaccggcttgcaggacctttgcgcattgatgaacaaatccatcaaaaacaccatcgtcatcggtgattactataacgatcttgaactgatgcgcaccgcaggccacgctgtggccgttgccaatgcacccgccgaggtcaaggccactgccgacgaggtgaccacctgcacctgcgccgagggcgcggtaggtgagtacctgtacgctctgatcgaccgggcaacaaaatcctgacgccatctgggcaaagggggctgtacgatgaaagtaagtgaactgatgaaccccgcaggcgtgcgcctgtacgccaacatcaaagaggccgccgacgtgctgggcatcctggtagaattgcaggaggagaccggcgccatcaccaatggcacggcctactataacgctgtctgccagcgggaaaacttcggcggcaccacggccatcggggacggcatcgcgctgccccacgcctgcaacgccggggtatcggcccccagcatttcggccctgacgctgcgccacggcgtggattggggtgccccggacgtccgggcggtggaccttttgttcatgatcgccgtgcccccgggaaatgaaagcctgcacctgcaaattttagcacggctggtcaacctgctcagccgcaactcgctggtggacgctttgcgccacgccagcagccctgaacgctttgtggagctgatcgccaagacagagaatgcctgctttgctgattgacccacctaaacctcaaaactatataaacagtccgctgcggaacccgaaaagggggggcaatgggctgttttgctgttttttggtaaaaatgctgagaatttgctgctgcaaagtgccaaatttggcaagatagaccttgctttaaagcattaaactgtgctatactttaaagcactaaagcaactgcttttaagggcacgctgtgcggcgcgtaagcatgttgccgttatttggaggaaacaaagatgaaaaaggcactttcactcgctatggcagctgccatgaccatgggtctggcagcttgcggcagcactgcatccagcaccgctgctgctgattccacccccgcagcttccaccgcggggagcgaagaaacttccgccgccgaaagcaccgacgacaaggtctataccgtcggcatctgccagttggtccagcacgatgcgctggacgccgccacccagggcttcaaggacgctttgaccgagaagctgggcgagggcaacgtcaagtttgacgagcagaacgcctccggcgattccgccaactgcaccaccatcgtcagcggctttgtctccactggcgtcgatctgatcctggccaacgccaccgccccgctgcaggctgctgcccaggctaccgccgacatccccgtcctcggcacctctgttaccgactacgccactgcgctggacatctctgactggaccggcactgtgggcaacaacatctccggcacctctgacctggccccgctggaccagcaggcagccatgatccaggagatgttcccgaacgctaagactgttggcctgctgtactgcagcgctgagcccaactccgtctaccagtgcgatgtcattgaaggctatctcacggagatgggcctggagaccacccgctacgctttcaccgataccaacgatgtcacctccgtcacccaggccgctgctgctgcctctgacgtgatctacatccccaccgataacacggccgcttccaacaccgaggccatcgccaatgtggttatcccggagaaggttcctgtggttgccggtgaggaaggcatctgcaagggctgcggtgttgccgccctgtccatcagctactacgatctgggctacaagactggtgagatggctgccgagatcctggccgatggcgccgatgtctccaccatgcctgttgagtttgcccccaacgttaccaaaaagtacaacgcagccaactgcgaagcactgggcatcaccccgccggacggctatgaggccattgccgactaaaaaatcctgaatcacacgcacgaataaacagcgaggagagggttgaaacggctctttccccgctgttttggtgcatcgtttccccagcatgattccaaaaaagttcggaggttttattcatgggattctttgcttccctgatcaactcaatgcccagtgctgtggcccagggccttatctggggcattatggccatcggcgtctacctaacctaccgcatcctggatgtggccgatttgacggtcgacggctctctcggtaccggcggtgcggtctgcgttgttatggtgcttaacggggtgccggtggggctggccctgctggcggctacggcagcaggtatgctggcgggccttgttacgggcctgttccacacggcctgcggcatcccggctattttggccggtattttgacccagttggcgctgtattcggtcaacctccgcatcatgggcttcggcacgggcggcggcaaagccaacctgcccatcagcgtggataagtacggcctgctggtctcggcccgttatgtccgcaatgtggccctcaataaccccatcctgatcctgaccatcttctgcgcggtgctgatcgctgtgctgtactggttctttggcactgagctgggctgctctctgcgtgccaccggcgctaaccagaacatggcccgtgcccagggcatcaacaccaacgtcaccaaggtgctgggcctgatgatctccaacggcctggtcgcgctggccggcggtctgctggcccagtatcagggcttctccgacatcaacatgggccgtggtgctatcgtcattggtctggcggcggtcatcatcggcgaggtcatcttcagccgtatcttccgcaactttgccctcaagctgctgtccgccgttatcggcgctatcatctactacatcgtcatggtctttgtcctgcgcctgggcctgtctaccgacgacctgaagctgctcactgctttggtagtggcgctgttcctgaccatcccgtactggaagggcaaatacttcaccaagacctcggtgaaaaagggggagaagaaccatgcttgagatcaaaaacgtctacaagacctttaacgccgacacagtcaacgagaaagtggccctgcaagacctgaacctgacgctggaagacggcgatttcgttaccgtcattggcggcaacggcgcgggcaaatccaccatgctcaacgcggtagccggtgtctggcctatcgatatgggcaagatcctcatcgacgggcaggacgtcacccgtctgtcggagcatcagcgcgccaagtacatcggccgtgtctttcaggacccgatgatgggcaccgccgccaccatgggcattgaggaaaacctcgccctggcggcccgccgcggcgtgacccgctcgctgaaagtaggcatcaccaaaaaagagcgcgaggaataccacgagctgcttaaaacgctggacctgggcctggaggaccgcatgaccagcaaggtcggcctgctttccggcggccagcgccaggcggtcaccctgttgatggccaccctgaaaaagcccaagctgcttttgctggatgagcacaccgccgccctggaccccaagacggccgctaaggtgctggccctctcggagaagatcgtgcaggagaaccacctgaccaccctgatgatcacccacaacatgaaggacgccatcaagtacggaaaccgcctgatcatgatgtacgagggccatgtcatctacgatgtgcgcggtgaggaaaaggccaacctgcaggtcagcgacctgctccagcgctttgagcaggtcagcgacggcggctttgccaacgaccgcatgctgctctcctgatcggcaataaacaccatacaaaaaccagcgcggcggctttcccggcaaaaggggaaggccgccgcgttttcgtttgtctgtgctgggtaaaactcgaactcaccactgccgccggtactcgccgggggtggtgccctccacctttttaaacaggcgggaaaaatagttggcatcgttcagtccgcactcctgggccacagcctcgatgctgcggtcggtaaagcgcagcagccgcttggattgggtaatacgcagctgcacaagatagttggtgaccgattgaccgaactgctccttaaacacgcgggtcaggtagaacttgttgatgtagaattgctcagccagcgcgtccagcgtgatcttttcggtgtagtgggtgtccagataatccttgatctcctgcaagttctgctttttgctgcccggcgcgcgggcggtgtccgggtgccagctttcttccatcagcagggtcagcagggcaatcagcttttcataaatctgcatgtcccgcacgtaagtgtcggattccgccagcgcgtacaattcgtccagcagcgccgcgtatccgccggggtcagcagcgcggaagcagggcaggccgccccgctcctgatactttttgtaaatggccgccatgttcggcccataaaaatgcacccagtgcagctgccacagatcgtccccggtgtggtgctggtaggggcgctggcagtccagaaacacgcagtccccggcgtgcagctcgtgccaggcaccctcgtactccaacacaccggagccgctctccacccaaaaaaacaggtaggacgccagccccttgcgggtgctggtgtggggctgccgcgcctgcaaactgcccacctcctgcagatggatgaggttcgaccgcgcaaaaggggagggcgtgtagatcacgcgccgggaatgtaccagcttgccgtcaaaaaatggtgttttcatgatgccctcctgccaaagttccttgcaggcatcataccacagcagcatacaaaaagtcaatataatgctactgctttgcaagattacccctacagcaacaggaaaaaatccgctacaataacaaacaaggcccaatcaaaagcatttatatgccgcataaaaagtgcggtagaaaggatatacagttatgaaaaaagcactcatcaccggtatcaccggccaggacggcagctatctggcggagttcctgctggaaaaaggctacgatgtccacggcatcatccgccgttcttctgtcgattaccgagagcgcatcgcccatctggaaggccaccccaacttccacctgcattacggcgacctcagcgattcgatgagcatcctctcggtcgtcggcaaggtccgccccgatgaaatttacaacctcgccgcccagagccacgtccaggtcagtttcgatgtgccggagttcaccgccgatgtcgacgctaccggcgtgctgcgcgtgctggaggccgtgcgtctgtgcggcctgaccgacacctgccgcatctaccaggcatccacctcggagctgtacggcaaggtcgaggaagtgccacagaacgagaacaccccgttccacccctacagcccctacgccgtcgccaagcagtacggcttctggatcgtgaaggagtaccgcgaggcctacaacatgttctgctgctccggtatcctcttcaaccacgagtccgagcgccgcggtgagacctttgtcacccgcaagatcaccctggctgccgcccgcatcgcccagggcaaacaggataagctctacctgggcaacctgtccagcctgcgcgattggggctacgccaaggattatgtcgagtgcatgtggctgatcttgcagaacaaaaagccggaggatttcgtcatcgccaccggtgagcagcactcggtgcgtgagttctgccagctggccttccacaatgtgggcatcgagctggaatttgtcggcgagggcatgaatgagaagggcatcgacaaggctaccggcaaggtcgtcatcgaggtcagccccgacttctaccgccccaccgacgttgtcaacctctggggcgaccccagcaaggccaagcgcgagctgggctggaaccccaccaagaccacctttgccgagctggtcaagatcatggtcgaccacgatatgaagaaggtcgccgtcgagcgcgccgaggaacatatccagaccaatctggccgaataccttgaaaaaggtgtcatcaaataagtataattactattatcactatcctattcattctattcatcctattcattacattcgccgcctttcgccgcctaatgaataagatgaataggatgaatgtaatgaatataatgaataggatagtaattttacattaggagtatagtaacactccaaattttgccgcgctgaagcgggaggaatatgcaattatgatggagaaaaacgcaaagatctatgtagccgggcatcgcggcatggtgggcagcgccatcgtgcgggaactgcagcgccagggctataccaatatcatcacccgtacccacaaggaactggacctctgccgccagcaggatgtggaggatttcttcgccgccgaaaagccggagtatgtctttttggcagcggccaaggtgggcggcatcgtcgccaaccaggaggccctggccgacttcatgtactacaacatgacgctggagatgaacgctatccactccgcctggcagaacggctgcaaaaagctggaattcctgggctcttcctgcatctacccccgcatggcgccccagcccatgcaggaaagctgcctgctgaccagtgagttggaaaagaccaacgaggcctacgccctggccaagatcagcggcctgaaatactgcgagttcctgaaccgccagtacggcactgactatatcagcgtcatgcccaccaacctctacggccccaacgataactaccatcccacccatagccatgtggtacccgccctcatccgccgcttccacgaagccaaggtcaacggcgtcgagagcgtcacctgctggggtgatggcagcccgctgcgcgagttcttgtatgtggacgacctcgccaacctgtgcgtcttcctgatgaataactactccggcaacgagaccgtcaacgccggcaccggcaaggagctgaccatcaaggaactgaccgagctggtggctaaggtcgtcggctacaccggcgagatcaagtgggatacctccaagcccaacggcacgccccgcaagctgctggacgtcagcaaagctaccaagctgggctggacctacaagaccgagctggaagacggcctgcgcctttcctacgaggacttcctgcataacccgatgcgcgccgagcgttgaaaaggagattgcatgaatattatcctgctttccggcggctccggcaaacgcctgtggccgctgtccaatgacatccgctccaagcagttcatcaaaattttcaagaccgccgacggctacgagtcgatggtccagcgcgtctaccgccagatcaccgaggtggacaaggacgccagcgttaccatcgccaccagcaagacccaggtgtcggccatccataaccagctgggtgactcggtgggcgtctgcgttgagccctgccgccgcgataccttcccggctattgccctggccacggcctacctgcatgatgtaaagggcgtcggcccggacgagcctgtcgtcgtatgcccggtggacccctatgtcaataacgactacttcgaggctctcaagcagctgtctgacttggctgaaaagggcggggctaacctctccctgatgggcattgagccgacctatcccagcgaaaagtacggctacatcatccccgaaagtgctggctccgtcagcccggtgcgcacttttaaggagaagcccgacgccaaaacggcggagcagtacatcgcccagggagcactgtggaacggcggcgtctttgcctaccgcctgggctacgtgctggaccgcgcccatgaactcatcgacttcaccgaccatcaggacctcttcaataagtatgaaacgctgaacaagatcagcttcgactacgccgtggtcgagcacgagtccaaaattcaggtcatgcgttttgcggggcagtggaaggacatgggcacctggaacaccctgaccgaggcgatggaagaaccgaagatcggcaaagccatcttgaacgacgcctgcgagaacgtgcatgtgctgaacgagctggacgtgccggtgctctgcatgggcctgaaagatgtggtggtctctgccagtcccgagggcatcctcgtctccgacaaagagcagtccagctacatcaagccctttgtggacaagatcgaccagcagatcatgtttgccgagaagtcctggggcagcttccgcgtgctggacgtggaggacgaaagcctgaccatcaagatcacgctgaaccccggccactgcatgaactaccacagccatgcccgccgggatgaggtgtggacggtcatctccggccgcggctatgccatcgtcgacggcgtaaagaccaccgtgcaggcaggggatgtggtgaagatgcccgccggcagccgccacaccatcgtggccgacaccgaactgaaagtgatggaagtccagcttggccgcgacatcagcgtccacgataaagaaaagttcccgttcccggaagtgtaaccgttaaactcggccaaaaccgtaaattttgccgcggggcacttgacttatgccgaaaaatcagtataataatcttgttgcccttgtgtgctggtatggctcagttggtagagcagctgattcgtaatcagcaggtcgccagttcaagtctggctaccagctccaagcgtaaaagtctgcgacaggtttcctgtcgcaggctttttgtgtatgagggagagacactgcaaaaattaaacaaaaacagcaaaaatgttgcttgaacttaaaccttggttccatgttatagttttatggcaggttgaagatatgcggccttgacaaacccgacggctgcatgtatgatagagcagttgatcttgcaagcatactgaaaaagtaggaaataaaaccccaaggagggaacatccccatcatgacagaacgccttgcccagatattggcggattccttttttaagatcctgatccctggcattaccgtcaccatcccgttgacggcgctgtccttttctatttctcttgtcatctccgtggcggtggcgctggtgcagtttgcccaggtgccggtacttaccaagctggcccgcctgtacatctggatcatccgcggtacgcccattctggtgcagctgtttgtagtgttctacggcctgccgggcgtcggcatcctcattgagccgttccctgcggcggtgctggtgttttccatcaacgagggtgcttacggtgccgagactatccgcgcggcgctggaatcggtgcccaagggccagctggaagcagggcagtgcgtgggcatgagctacatgcagatcatgtggcgcatcatcctgccgcaagccctgcgcacggcgttccccacgctggccaactccctgatcgccatggtcaaggatacctctctggcggccaatatcaccgtgaccgaaatgttcatgaccacccagcgcatcgtcgcccgcacctacgagccgctggccctctatctggaggtcggccttgtctacctgctgttctgcacggtgctgacccgcgtgcaggcctggggcgagaagctgctgaaccgccgcggcgcacaaaggagttgatacgatgctggaaatccatgatctgcaaaaatccttcggtgacctgcatgtcttaaggggcatcaatctcaatatccagaagggcgatgtcgtggccgtcctcggctccagcggcagcggcaaaacaacgcttctgcgctgcatgaactttttggagcatgccgatgcgggcaccatggtctttgacggccagcaggtggagctgagccgcatcacccacgcccagattcacgccctgcgccgccgcaccggttttgtgttccaaaactacaacctgttcgccaacaagaccgcgctgcaaaacgtgaccgagggccttgtcattgcccgcaagatggacaagcaccaggccgacgagatcgcccgtgccgcgctggataaagtcggcatgggggaccgctgtgaccactatcccagccagctttccggcggccagcagcagcgcgtggccattgcccgcgccattgcttacgacccggagatcctctatttcgacgagccgacctcggccctcgaccccgagctgaccggcgaggtgctgaccgtcatgcgccgtttggccgatgagggtcgcacgatgctggtcgtcacccacgagatggacttcgcccgccatgtggccaaccgcgttgtctttatggacgccggcgtcatcgtggagcaggccgacgccgaaactttcttcaccaacccgcagcagccccgcacccgggagttcctgcagaattacaaacaaaggagttttacctgatgaaccgtaaaaagatcaccgccctggccctgaccgccgctatttccgccgccgtgctggctggctgcggcagctctgccgcttcttccgctgccccggctgctgattccgccgccgacagcgccaccaccgataccgccgcttctgccgacctgctgagccagatccgggagcgcggcaccatcaccgtcgccatggagggcacctgggccccctggacctaccacgatgaaaacgacaacctcgtcggctatgacgtggaagttgctaccctgatcgccgagaagctgggcgttgagccggagttcatcgagggcgagtgggacggcctgctggctggtctggacgctggccgttacgacatcatggtcaacggcgtggacatcaccgaggagcgcgccgagaaatacgacttctccgagccgtacgcctacaaccgcaccgccgtcatcaccaagggtgataacgacaccatcaacagcctggaagatctgaaggacaaaaagaccgccaacaccatctccagcacctacgcccagctggctgagcagtacggcgccgacgttaccggcgtggacgacctgaaccagaccttcgaactgctgaacagcggccgcatcgatgctaccctgaacgctgaggttaccttctacgactacaccaaagagcatcccgacgccaacgttaagatcgcagtcctgacccaggacgccaacgaggttgctatcccgctgcgcaagggcgacgagaccgccaccctgcgtgaggctattaacaccgccattgacgagctgcgtgcctccggccagctgaaagatctgagcgagaagtacttcggcaccgacatttcctccaacgactaacagggaaccggccgcctgacagcctacagcaaccacaccgctctgcagtgttctctgcaggacggttttcttgcgaaaaaacgcaaaatttgcatggtttcaccccttgattttgccgccgcgcgtgctataataacagccgcggtatttataagggccgccgtgatagagaacgcattttggaaagtagagagtatagaggaaataaacgcattatgacaaaagaccttaccggcggcaatccgctgaaagtgatcctgctcttcaccctgccgcttgtgctgggcaatctgttccagcagttttacgcgctggcagataccatcatcgtaggccgtttctgcggcgtcagtgcgctggcgtcggtcggctccaccggctccatcaactacctgatcctgggcttcgtcattggcatctgcaatggttttgccatccccatcgctcagctgttcggcgcacgggattacagcgacctgcgccgccatgtggctaatgccgcctggctgtgcatcgcattcagcgtagtgcttaccatcaccacggtgaccctgacccgcccgctgctggtgctgatgcagacgcctgaggacatcctggacggcgcggtcatctatattggctggatcttcgccagcatcccgttcatctttttgtacaacatggtcgccagcatcatgcgtgccctgggcgacagcaaaacgccgctgtacttcctgatcctgaccagcgccctgaacatcggcctggatcttttgttcatcgtgccgttcaaaatgggaatcctcggcgcagcgctggccaccgatatttcccaggccatctccggcgtggtcagcttcggcttcctgtgccgcaagtttgaggtgctgcatatgcagaaaggcgagctcgccttcagcaagcgcgcctgcacccgcctgatgggcatcggcgtgccgatgggcctgcagtgcagcatcacggccatcggcagcgttatcatgcagtgggccgtcaacgtgctgggcagcacggctgtcgccgccgtcaccgccgccagcaagacgatgaacctgctgaccgtcccgctggagagcgtcggcacggccatggccacctactcgggccagaacctgggtgccgcccggatggaccgcgtgcgtaaaggcgttaccagcgcactgctgatcgccaccgtctacagcattgcttcggctcttatcctgcattttgccgatgtagccgtcatgtccctcttcctcgacacgaccaccgaggtggagatcgtcgccatggggcgcgagtacctcttctggaacagcgtgtttttcgtgccgctgggtgcgctgatcgtctggcgttacagcatccagggcctgggcttctccacgctggccatgatggccggcgtggccgagatgatcgcccgtaccgccgtggccatcgtgctggtgccgatgctgggctactttggcgccgagctggcgaaccccgccgcttggatcgcggcctgcgtcttcctgtacccggcctaccgctggacctgccgccagttggacaaccgcctgctggccgcccgcctgcatattcagagcgaaagcccggaacacgaagctgccctgtaaagcaaacgcagattgaattctacgcaaaacagccgccccttggggcggctgtttgcatattcctgcatattttcccgcaccgctcttgccgaaagccggtaaacagcgtataataacaactatcttagttgggaaaggaaagagtagatatgccgcagaaaaagccgtttgttacgctggcccaggcacgggccattgccgccgagatccccacgcccttccacctgtatgatgaggccggtatccgcgcaaacgcccgcaaggtcaacgccgcattcagctggaataaaggcttcaaggagtactttgccgtcaaggccaccccgaacccttacatcctgaaaatcctgcaggaggagggctgcggcgtcgactgctccagctacaccgagctgctgatgggcgaggcctgcggctttaccggcagcgacatcatgttttcctccaacgagacgccggcgcaggacatgcagaaagcctacgagctgggcgcttacatcaacctggacgatttgacccatgtggacttcctcaaagaaacggccggtatccccaagaccgtttgctgccgctacaatccgggcggtgtgtttgagctgggcaacggcatcatggataaccccggcgacgccaagtacggcatgagcgaggaccagatggccgaggcctacacccgcctgatgaaactgggcgctgaggagttcggcatccactccttcctggccagcaacaccgtcaccgatgactattatcccaagctcgccggcatcctgtttgaactggccgtccgtctgcacaagcgcaccggcgcaaaaatcaagtttatcaacctgtccggcggcgttggcattgcctaccgccccgaccagcgcagcaacgacatcgccgccatcggcgaaggcgtgcgcaaaaagtttgaggagatcctcgtgcccgctgggatgggcgatgtagccatctttaccgagatgggccgcttcatgctggcaccctacggtgccctcattaccaccgccatccacgaaaagcacatttataaggagtatatcggtgtcgacgcctgtgccgccaacctgatgcgcccagccatgtacggctcctaccaccacatcaccgtgctgggcaaggaagaagctccctgcgaccacaagtacgatgtcgtcggcggcctgtgcgagaataacgataagtttgccatcgaccgcatgttgcctgaaatcgacaagggcgacatcctctttatccacgatgccggtgcccacggcttctcgatgggctacaactacaacggcaagctgcgcagcgccgaagtgctgctgaaaccggacggctccttccagaagattcgccgtgccgagactccggccgactactttgccaccttcgactttacgccgttcttcaaaaaataatcgcaaaacaaaagcagatgtaccgcaacgggtacatctgctttttgcatattttgttttaggcaataccgcataattctaag

SEQ ID NO: 7765 - DNA, 11332 bp, Unknown
  gut microbiota DNA sequence
atcaaagacgtgctggtgtaaattttgcataggaaaagggagtctcccgtggatgggaggctcccttttttattggaaatttaagagataaacgatgagaacaccgggcagaggatggcggtcatgacgccggcgacggcgacggccaggccgctcatggcgccttcgacttcgcccatctggagggctttgctggtgccgacggcgtgggctgcggtgccgatgccgatgccccgggcgatggggtgggtgatgtggcagaccttgcagaccgtctcggccatgagggcacccaggatgccggtgaggatgacgatggcgccggtcagggctgcgatgccgcccagctccttgctgacatccatgctgatggctgtggtgaccgacttcggcagcagggtgatgtactggctgtggtccagcctcagcagcagggacagcaccagaacactgcccaggctggccagtgtgcctgccaaaatacccatgacgatggcaagtacatttttgcgcagcaggtcccatttttcgtacagggggaccgccaggctgaccgtggccggcagcagcaggtaattgactggcgaggcgctggccttgtaggacgcgtaggggatgccgcagacgcttaaaaacacgatgacaaacaccgtgcccagcagcagcgggttaaaaacagctttaccagttttgtggttgatgagggtacccagggcaaacgctgccagcgtgagcagcacgccccaggtggctgaggtggacagaaaatcattgagcatcgtcatttgctaattcctcctccagttcgggttcggccttggcgaaccgctgggtgacacggcccgccgtggccatgaccaggaaagtgaccggcaccagcgcgatgagcaccggcagcagcatggcgtgaagctccgcccacaggtccatgacgcctgcggcggcggggacgaacagcagcgggaagatgccgatgaggaacagcgccgccgtgcgcacctgttccaatttgacccaccccagtttgagggcggccagcaaaagcagcaggccgtagacgctggccgggatggggaggggcaggaagttatagcagagctcgccggcgaagcagaataccataatgcggagaaattggaaaataagatccattttggataccttctttgtgtggagatgaatgggggatcatcgggaaaaatgggcgcacaaaagccgccatcgggtgtttggaggaagtgagtcccgacagcggcagtggataatttatttgtgaggaacttaataagcagagaacgagaaagcgcgaagtagaggctgcgctaataaaggctaagtagaggtttattcagcggcgggctggtcggggcggaccatctcgcggacggcggagacgatggtttctgccgtcaggccgtagtcacgcaggacttcggcggcggggccggagtgaccgaactggtccatgacgccgatgcggcgcacggggacgggcagcttttcggccacgacagagcagacagcctcgcccaggccgccgatgatgctgtgctcttccaccgtgatgatgcggcggcactcgcgggcggcggtgaggatgatgtcctcgtcgatgggcttgatggtgggcatgttgatgacccggatggcgatgccctggcgcttggccagcacggcggcgcgcagtgcctcggggaccatcaggccggtggcgatgaccgcgatatcgtagccatcggtgagcttttcgcccttgccgatctggaactgataggtcgcaggatcgtggaaaaccggcgtggccaggcggctgaagcgcaggtagacggggccgttgtaatcgtaggcggcgatgactgcggcgcgggcctcgacgtcatcggccgggctgaggatgaccatgcccgggatggagcgcatgagggcgatgtcctcgcagcactggtgggaggcgccgtcctcaccgacagacaggccggcgtgggtggcggcgatcttgacgttcaggtgggggtagccgatggagttgcggatctgctcgaagccgcggcccgccacgaacatggcaaagctggacacgaacggcacgtaacccatggtggacatgccggcggctacgccgaccatgttctgctcggcaatgccgcagtcaaaatgacggtccgggaactctttgcggaagatctcggtcttggtggcggcggccaggtcggcatcaaagacgaccaggttgtcggcgccctggcgggcaagctccaccagcgtgttgccgtagcttacacgggtggcaatttttttcatatcagccattgatcagctcaagctccttctccagagattcatgggcggcgcgcagctcgtccatggcctgtgcgtactcttcgtcgttgggggccttgccgtgccagtcgacggcattttgcatgtagctgacgcccaggcccttggtggtgcgcagcaggaagcaggtgggcttaccgctgccatggctcaggtcaaacatcttgaaagcctgctccagctccgcaaagctgttgccgttgcagacgatggtgttgaagccgaaggcatccatctttttatccagcggctcgctgttcatgacctcgcgggtggggccgtcgatctgcaggccgttgacatcgaccatgatgcacaggttatccagcttgtagtggttggcgaacatgaaagcttcccagcattcgccttcctcgatctcgccgtcgcccagcagggtgtagacgttgatgtcgctgccggcctgcttggcggccagtgccatgccgcaggcggcgctgacgccctggcccagagagccggtgctcatatccacaccggggacggtgttcatgttggggtggccctgcaggtagctgttggagtggcgcagggtgggcaggtcagccacggggaaaaagccgcgctcggccagcgttgcgtacagggcaggggcgcaatggcccttgctgagcacgaagcggtcgcgggcaggatcctggggctgctcggggtcgacacgcatctcacggaaatacagataggtcagcacgtctgcgcaggacaggctgccacccggatggccgcagcctgcgccgtgggtgccctcaatgacgcccatccgcacacgggtcgcagtcagctttaactgcagcgtttccatttttgtcataatcaagttcctccggtcccgtttggggttttgttggcggcaggctgcctgccgggggcgcagagctttacatagtattatgtaaagagaaacgcgcggcccggtgggagatagtataccgcaacataattcactactttatattatacacggtttcggcacgggtgcaagagattttatggaaattgtcggattttaacggtctgacaatttttggagtttttgatttgcaggggcggcctggtcagggccgattcttctgcagggggatacggtcttgcgaacggatgtgacccatgataaaaggccctgccgcaggggaggcagggccggggcggtgcttaagccgtcaggcgggaattgtgcggtgttgcctaaagaaaaactcagcacagcggtgccaccaaacgcaggcaggcgctgagcatgctgcctaaaaatccatttcggcagtcgtcggggccgaggcggcgggaaacggactcgatgccgtcgagatcgcggcggatgtcggagaggacctcgccgccgtagaggacggtgctgttctcaaagtggagatacaggctgcggtaatccagattcaccgtgcctaccgcggccgcgcggtcatcaataagccacgttttagcgtgcaaaaatcccggcgtgtagctgtaaatctttacgcccgccttgagcagatgcgggaagtaactgcgggacagctggtagatggtctttttgtccggcacgccgggggtgtagatgcgcacgtccacgccgcgcttggcggccaaacttaaacaggtgagcaggtcgttgtccaaaatcaggtagggcgtgcagatgcgcaggctgtgcagggcctggttgatgaactccagatacacatttttggctaccacttcccggtcgacggggctgtcggcaaagggctgcaccagcgtgccgccggtaggggccacgggggcgacctgcggcagcagcttgtcgtaatccgacgtttcatcgggaaaatgtgcccgccagaacgtgaggaacacgttcgcatagctgcgggcggcggggccttccaggcggacgccgctgtccttccagtggccgaaacgagtcactttattgatgtattcatccgccagattcacgccgccggtgtaggcgatgcggccgtccaccaccatgatcttacggtggtcgcggttgttcagcaccagattcagcaccggcacgcagcggttgaaactgaacgcccggatgccgtcggcacgcaacagatctacatagttgtggggcagcaggctcaggcagccggcatcgtcgtagatgacacgaacgtccaggccggcggcggctttctgccgcaggatctcgtggatctggccccacatctcgcccatgccgatgatgaagctttccacaaaaatgctgtgctgcgcggcctgcaggtcggccagcatatcaggcagcatcacatcgcccacggggtaatacctgacggcggtgccgccgaaaacaggcgaagcagcgtagttttgcaggtaatcagcggtctcggccaggcgcgggtcgcggcgggccagctcggcgcgggcggcggggtcgccggtgcgcaggggcgccagctcggcctcggcacgctccatgcggcggcgcagggggatggccgggcgcttattgccccacattaaatacaggaggccgccctgcacgggcatgagcatgaacaaaatcatccagctgattttaaattccggcgcggtggagtccttgcggaccagcgccaggcacatcagcgcgctgacggcgagccccacgcgggagatgaggtgcgagtagtcgctcagccagtaaaacacgctgaacagccacaccgcctgcgccagcacgagcacgaccgtgaccacggtgcggctgaagacgatggacagggcgcggtgcagcagccagcgccaatctttgggtttgtgcagtttttgcatagatgcgtcctttttgatgaaaaggggaacaaaaagccccctcggcacggccttgcggcaacgaaaaccgggggggtattgcaaacggctatacccaagctacagccgaaagcaaacacagaaattatgcgcagcaccgtttgttgcgggctgccggggcgaatcaggcgtggagacgtgcgtcgatagcggccatgcaatcgtccatggtcaggaacgtgacggcgcagtcagagccgataaaccagcgttcttccccgttgcaaacgatcttgcggatcagtttgccgtggtactccgtctggatgtagatcccattcggcatgtggtcagccctccttacatttatatgtattatgggggcgtcccccggatcgaacttgaacttatagtattatcgcataaatgaaacggtttggcaagtggggaaatagacagatattgggggattttgtggcttattttctacgcggcaaggtatacattttgtacggttttacgtgatgttttatcgccttggattgactttggagggttgctttcggtgttccgccaccatgcggcgggcgcctcgatataagagcatattgcttttaggccttcctttttggacacccaaaaaggaagcgaaaaaggtgcccgctacttgcgaaagcgcgggaggcccgccttaggggattgcggggttgcgagcaaggggccacagttgagcgtggcgaaactggggagcgagcaatgttcgccccagcggggcgaataaccgcacgagcgggtttgcgcagcaaactggcggccatcgttttggccgccaagcgctcgcccctaagaaccccaaagttgtggtcgagtagcaaaaaagctaaaaaatgcaggagtgctgcatttttcttcacgctttttcgctcctctccatattgaccccttcggggccgaaattcctctactcccatactgtaggggccgatgctcgtcatcggcccgcataggtgggcggctacctgtggggcgatgcaagcatcacccccctacactttagcgagaccgtgtgcctatgcagaggaatcggcggcgggcagccgccagaccaacatttgttaaattcttaagagaaactgcgcggagcgccgctcagaccgcatagcgggctgagccgtttctcttaagccgggctgctgtgcggttgcgaagcaatcaaagccccggtggggctttgaagcacacgagcgggcccgctttgcgggatggcggcgctcgttgtgcgccgccaagcgcgcgctatcggaagtagcggggaccttttcggttccttttgggtctccaaaaggaacacctcaaaagcaggacgccgttgaatcgagtgaagcgccgcatggtggcgcgcaacggaagcggaaacctaaagagaagaaagaacaatttattgtattcctcccgcgactatggtatacttgccttgtatgtacttgcaaaagtgcactaaaatttgtaacgggcgtgagcctgttttgggaggaaaccccctatgaagtatctctcctacggcgagcgggcgtttttgcgcgggcacctcaaccgcgtgcggcatgttacgctggaccccgacgggccgggcgtcgtgcgcatccaccttatcccctgcaccaagcccgaccgcgatacgccgtttgtggccattttgaacggccaggatattctgccgctcaacctcagctgggccattctgctgaccaacctgatcgaggcactgcagccccacgcggggactgagttaaaggacgccgactggtcggccatcaacgcccaggcagtggcggctacccgtaaaatttatcgtaagaccgaacctttgcagatcgaatccgatttgcagatgatgctggatacccttatcgccgtggcgcggggcaaggagccgccgctgcacatccagccgatctcgctggcccagtacgccccccgcatggccgcgccccaccgtatggacctgatgatctccacgatggtgaaggacaacgcctggcattgcaatcaaaaatgtttgcactgctacgccgccaaccagcccctttccgccgtgcccgaaatggacaccgaccagtggctggcggtgattgaaaaatgccgcagcatcggcataccgcagctgacttttaccggcggcgagccgacgctgcgccaggatctggtcaagctggtgcaggctgcacaatggtttgtaacgcggctgaacaccaacggccgcatgctgaccagcgccctgtgcaaggacctgcgcgctgccagcctggacgcagtgcaaattacgttctattctgccgacgaggccgtgcacaacgagctggtgggcgtggacggttacaccgacaccgtgaacggcattaagaacgcactggccgctggcctgaacgtgagtttgaatacgccgctctgcagcctgaacaaagattatcgtgctaccgttgaatttgcccacgacctgggcatccggtacctgacttgcagcgggctgatcccggccggcaacgcggcggagtcggccagcaaaagcgtgcggctgacccccgaggagctgaccgaggtgctgcgccctgcgatggattttgcgctttctcacggcatggaagtgaactttaccagtcccggctggctggacgaggacaccctgaccgggctgggatttacccagatccccagctgcggcgcgtgcctgagcaacatggcggtggcgcccgacggcaccgtactgccctgccagagctggctgaccggccacggcttgggccatattttgcgcaccccgtggaaccgcatctggcgaagcccggagtgctgcgcgatccggatggagagcgcccggatgaagcggctgtgccagctgggggataccccgatgcaggagggtttttaaatgtttcagcgtaagcgctggggcggtgtggggaaagttccacgcggcttcgtatgcagttttctgttattgatttttgttgcagcgtccctgctgttcccgctgtctgcccgggcggagagcggtcaggcggatttggacaggctggcgccgtatgcggacgacggggatctggattatattcccgactacttcgtcacggtggacctgcgggaggatggctcggcggacattgtctacgacatcacctggcaggtcatcgacggcgaccagaccgactacctctcctgggtcaagatcggcctgcccaatgcctacgccgaggacctgaccccgctgaccgacaccatctccgatttgcagtacaccggcgacggcggcagctacgccaaggttgtgtttgcacggcggtattactcgcccaaggtggccgcccaaaacggcggcgaaagccgggtgcggttcgcgttctcggtgcatcagagccacctgttttccttgaatagtgacggtacagcgacatttgagttcacgcccggctggtttgacgacctggtggtggagcacatgcaggtgcgctggcgcagcggcgacggctttgtggccgacaacaccagcgaggaagacggctacctgatttgggattttggccccatgggccacggccagagcgccaacatccacgtgaccgtgccggtgacgacggccgagacctttgaccccgacgcccagctgacggcggcggattacgacgacggcggcatgaccgccgacgagatgatcggcatcctgacggtggtgatcgggctgctgatttttgccgcagcactgattattattgtcggctcgatgacaccggactggggcggcggcttcggcagcgggctggacccggacgactggttctggtacaccaacggcgtacacaccatccatgtggcccgcaccgcaccgccccccaagggctacacccgcaccgatccgccgaaaaattaccataccggcggcggttcttcccgcggcggcggcgtggggcggcacaacagcgggtgcgcttccagctgcgcctgcgcctgtgcttccagctgcgcgtgtgcctgcgcctgtgcgggcggcggccgtgccggatgcactgcaaaagatttttacacgtacaaactgccccataaggcggaccgggaggatgaccaatgagcctggaagatcagtatgatgcctgggtgcgcggcctgatgggcggtaaaaaatacgccgctacgtcgaaacaggccgaggaggccaacgacgccgtgcagcagatgcaggctagcctggacgcgctgaccgctgcccaaaagcggcagagtgcggcaggctcggcgctggatgctgtgcaaaaagcgggcgctgccaccgccgagagcgtgcgaaaaatgagcagcgagctgacgagatcgctgcatcaggacgggctgctgggcgggactaccgccgcgccggctgccgaaccgaaaaacgcggacaagcctgtgaacacggattttggcggtgtagcggataaaattaaagcgcaggtgttggggcaggacgcctttgtgacggcgctggtcaaggcgttccgccgcccctttgtgatgggcacggcaggggacaccggccgcgcccgcaacctgatgctgctgtgcggccccaacggcaccggccgccactacgcgctgacctgcgcggtggaggagctggccgaccgggggattttgcgcagcgcggctattgagcagatggatttatcgctctatcccggcccggcccaggaaaaattatttttacaggatctgtatgcggcgctgcagtccgatgccgaggttttggcctttgaccactacgagggctgcgcggccaattatttaaatatgttgtcgacactggccatcgaggggacgctttcgctgagcagccgctacgtgctgcagcggggcatcctggtggacgtgggcaccgcgctggcgcccggagccgtcggagaattgacggccggcggtaaatattttgtgtttttctccaacaaggacgaggccgcgctggccgatacctttggggcgcggttcgtggatgcactggccggggacgtctgccgcacccaggcctttacccccgaggcgctggccgccgtggccgcccgcgagctgaactggcttgcgcagcgtgtgcgcaaacaatgcggtctggcgctgtccatgggggccgacgtgcgcgacctgctggccgcccagtacggcaagactaccggcatgcaggccatgcgggattactgcgagaccgcctaccgcgccctggccgagtacgtgctggacgcggaggagccgcccgccgacggaacacccgccgtgctgaccgctgcggatggaaaattgctgcttagcgtaaatggcggcgagccatttgacctgctggccctgctgccccagcagtaccgcggtgacgtggatgccgtggaggccgagctggacgagatcgtcggtttggctgaagtaaaaaattatgtgcgtgacatcgccaaaaatgtgcaggcccagcagcgccgcaaggcccagggcctcaaggtggccgaggtcaacatgcacatgatctttaccggaaaccccggcaccggcaaaaccaccatcgcccgcattttggcgaaatatctcaaggccatcggtgcgctgcgcggcggccagctggtggaagtgacccgtgcggacctggtgggccggtatgtggggcacaccgcgcccctgaccaacaccgtgatacagagtgcgctgggcggtgtgcttttcatcgatgaggcgtacagtttgtaccgcgggggcgaggatagcttcgggctggaagccattgatacccttgtgaaaggcattgaggataaccggggcgacctggtcgtgattttggccgggtataccaaggaaatgcagctgtttttgtcggctaactcgggtttggcgagccggttcccgaaccagatcgagttcccggattacaccggcgaggagctgtaccgcattaccttgtcgattgccaagagcaaggggtataatttggacgaaagctgccgggatgtgctgattaaatggtatgatgcgcagcaggcggcggatgcggcgaccaacggcaacggacgtatggcccggaatgttttggaaaaggccattttgaaccaggcaaaacggcttattgctgacgctgacgcggatctggcgctgctgctgccgggggattttgaattggattgatttgattttaggcaataccgcataattctaagcgccg

SEQ ID NO: 7766 - DNA, 37320 bp, Unknown
  gut microbiota DNA sequence
aattgtgcggtgttgccttaattattgccaagcccccttttgtgcggtataatgagagaaaactaccgccaaggagggcttttattatggcctggactgccactgactttgccgggcgcggatgcggacgccggtacgagaaagaactggaaacacatttccgcgattgtatgttgttttatctggatggccgcatccggtttgagcggtattgctacggcgaggccgcgtgtctggtgttcagcgtatgggggcacggcatcgacgctgacggtaaactgctgtgggaccgggaaccggaatttgaaagccagcagaccgccctgccccggtatttgaccgatgtgcaggaggacggcaaagccctgcaatttgacggtgcccgcaaacggtatatcctgaccgaggaatttaatgaggataaactcaatggatattccaaattcaaagttttttggatgaagaggaagaagtaagcagccgccgaaggctccctctgtgagggagctgtcagcacaagctgactgagggagagacttttcgtaggctctctcccccacccgcttcgcgggagccccctcccagagggggcctttattatggctctacaataaacaaaaggcatgcagccaaatcgactgcatgccttttcttattgattttgtttagagtttcttcggttccttctttgcaaagaaggaacaaaacgtactcccgtaacttagcggctgcccttatcgtaggggatgccctcggccttgggggcctgagagttcttggaggtgaaaatcagcacgatcatcgtgacgatatacggcagcatctggtagaagttggagatctccttaactccatcgaacttcggcaggaaggacagcgacgagctgtaagccgcgatgaccttgaacagcgcaaagaacaccgaggatgccaggatcgggaacggtttccagttaccgaagatcataactgccagcgccaggaagccatagccgcccacgtcggagttgaagccggaaccggctgccaccgtgtaggccagacctccgatgccgcccaggaaaccggagatcagcacgccagcgtagcgcatcttgtagacattgatgcccacagagtccgctgcctggggatgctcaccgcaggcgcgcagacgcaggccaaagcgggtcttgtacatgacgatataggccacgataaacaggatgacggcgatgggggtagtcaggtagaaatacttgaagatcaggttgttccagaaactggggccctccaccggggcgaggccgaaagtttcgcgggtgatgcgcacccagctggggatggcgatggtggtcaggccctggccctggatggcccaggtcataacgactgcgaaggccggggcgaactggttcagcgccgtgccgccgatggtctggtcagctttcaggttgatggcagcaaaacccaggaagaaggagaagatcacgccggtcaggcccgccaccaggatagcaaccagcatggccagctgcggatgtgccggaccgaagccgctctggtcaaacgcctgcagggtgaagcaggcaaacagagcgccaatgatcatcatgccttccagcgcgatgttgataacgccggaatgctcactgaacataccgcccagggcaaccagcagcagcggcaccgcaaacaggacggtcaagctgataatgttagcagcgatcatcatttggcagcgccccctttctctttacggccggaaaccgccttggcgatcacgccgcgcatcagcagggcgaaagccgccagatagatgatgacagcgatcacgatgtcgatcgtctcggaggagtaagccggctgcatggcagcgccgcccacctggatgtagctgatgaacagcgccgagaagatggtgccgatggggttagagcttgccaacagcgcaacggggatgccgttgaagcccatgcccaggatggatttttcgataacgtactgacccgtgccggccaagtagtagatgccgccgccgatgccggacagcgcaccggcgatgaccatggacagcacgatgttgcgcttggcgttgataccggcgtactgggcagcgtcgcggctgagaccgcaggctttcagctcatagccgaaggtggtcttttgcagcacgacccagacgatcagcgcgaagatgatggtcaggatgatgccgatgttgatccagctggaattaccgaacagcccggcgaacgggcccttgggcaggatggcgccggggttggcggcagacagcgccgcggtacggtccgagttggaagcgccccagccggaagccagcatcttgggcgagttggccagaatcaggttgacgaggtacatgccgatccagttgaacataatggaggtaatgacctcgttgacgttaaagtatgccttgaacaggccggggaagatgccccagatcgcaccgccgatggccgctgccagcaggcagacgaaccaaggcagctgaaactggatggcgcacagcagggcgaagaacgagcccatggtgtactggccaggtgcgccgatgttgaacaggccagtcttgaatgcaaagccgaccgacaggccgcacatcatcagcggcgctgcctgatataataccttgccaagcttgtccatgctggcaaagccggtggtcatcatagccttcatgccttccagcgatgcgccggggttcagcaccacaagcaggataaagcccagcaccaagccgatgacgatagacagcaaacttgccagaacgcctaccacgccggggttctgcaaaagcggctgtttggattttttactcatgctttcgcctccccttgctttttagcgcctgccatgtacaggcccagttcctcaaccgtcgtggtcttgggatcgaactcgcccacgatctcaccctcgtacataacaaggatgcggtcggacaggttcatgacctcgtccagctccaggctgacgaggagaacagccttgcctttatcgcgctcggccacgatctgcttgtggatatactcgatcgcgccgacgtccaggccgcgggtgggctggacagctaccagcaggtcggggtctttatcgacctcgcgggcgataatggctttctgctggttgccgccggacatgctacgggcgatcgtgatgggaccctggccgctgcgcacgtcgtactgtttgatgaggcgctcggcatagtccatgacagcactttttttgatgaagccgtggttctggaactccggctgccagtagcgctgcaataccatgttgtcggccacggtgtagtccagcaccaggccatgcttgtggcggtcctccgggatatggctcatgccatccttggagcgctcacggatgggggcgtgggtgatgtccttgccgttgagtttgaccgtgccgccggtgactttctccaggccggtcaggccgtagatcaactcggtctggccgttgccttcgataccggccacgcagacgatctcccctgcgttgaccttgaagctgacgctgcggacggcgttgttcttgtgcgccttgctgggcacgaccaggccgtccacttccaggatggtcttgcccggcttgcaaggggccttgtcgacagcgaactgcacgtcgcggccgaccatcatgcgggacagttcctctttggtggtgttggcaatatccacggtaccgatgccgcggcccttttgcaggacggtgcagcggtcggcaaccgccatgatctcattcagcttgtgggtgatgaacaggatgctcttgccctcggccttgaagccgcgcatgatctccatcagctcgtcgatctcctgcggagtcagaaccgccgtaggctcgtcgaaaataaggatctcgttgtcgcggtagagcattttgagaatttcgacacgctgctgcataccgacggagatgtcgctgaccagcgcatcagggtcgactttcaggccgtacttctcgctgagctgcatgacctttttgcgggcagcgtccttttgcaggaaaccatggcgggtatcctcgacacccagaatgatattgtcaagaacggtaaaacattcgaccagcttgaaatgctggtgcaccatgccgatgccaagcgcgttggcgtcgttggggttctggatcttgacctctttgccatttttcttgataacgcctttttccggctgatacagaccgaacagaacgctcatcagggtagatttaccggcaccgttttcgcccagcagcgcatggatctcgcctttgcgcagctgcagcgtgacatcgtcgttggccttgatacctgggaactcctttgtgatgtgcagcatctcgataacgaaattatctgccaatcggtacacgcccctttctattttcatagtatattaatttatattatataaaaaaatcgcgtattgtacaagagaaactgcgcaaaaagcggaaaaaagttggagaagatgtacttattggtgcggctgaagcagccacgcctcagtcgcctgcggcgacagcgcccctccaaggggagcctttagccttcccttgagggaaggtagtgcgcagcgccggaaggctggctactttagcagagtatttccgcaggggtcgatgcttgggttcaacttactcttatatataaaaaaccgccccgcgcggttaagcacggagcggttgacttattcagttacgaattagccctggtagtccacggtcacgttggtgacggaaggagtaacagtggtatcgaagctgtcgtcgatggtcagggtgccgtcaacgatggaagcatacatagcgtcgtactgctcctgggtgaacttgttgaacttgctggtctccatgggcaggccaacgcagttctcggcagcgcccagcttggtctccttgccggcgtaagtctcggtgaacttccagccattgttcatggagtcggtcagagcctcgttcacggactcggccaggcccttcatggcagaggtgataacggtgtcgtaccggccggactggtcgacgtcaacgccgatcatcttgccgccgttggcctgagcagcagcgtcgcagctctcgcagacggggccgccgcaggcaaagacgacctcggtaccctcagagtaccagccgtccatcttgttcttgacctcatcggtagcagcgaagccgccggagtaccagtacttgatgttgacatcgtcaacgcccagctccttagcagcagcgtcagcgccctgcacgaagccgtagccgtaacggataaccgcgggaacagccatgccgcccaggaagcccagctctttgtagccgtcgtaaacagcggcgtagccagccagataaccggcctgctcttccttgtaggtgatcagagcggtgttctcagcgggggcagtgtcgcccaggtcgacggtggaaacgtccagagccaggaactcaacgtcggggtacttggcctgagcctcagcgatagaggaaccgaacaggtagccggcaacgacgacggccttagcgccgtcattgacagcgttgtccatctgctccaaacgggcagcgtcggagtcctcggtaggacgatagtagttagcgttcaggctgtttgcagagcagaagtcctgcacgccctgccaggtgtactggttgaaggactggtcgtcgatgttgccaacgtcggtaacgaaagcgacgtcggtcttgctgccggaagcagcagcctcagaggtagcctcggtgctggtagcagtgctctcggcagtgctggcggaggaaccgccgcaggcagccagagagagggccatgcagccggccatcgccatagaaataaacttcttcatggtgtaagctctcctttgtcatggaaccaaaaatggttttttcagggcaggggccttccctgccacagtagtttcagtataccgcattttggcgggcatttcaacgcaataataatcacaatttcattacaaaatgcaattttttcgttgtttcatcagttttgcttctccaccgtcacgttgggggtgtcgggcagggtattcatgtcggcataggtgtccaccttcaggtcgctgttgcgcagctgggtgtacaggcgctcatagtcgtgctggctcagctcggcaaagcgccagtgggggcctgccagggccacggcgccggtggtgtagcccaccttttcgctctggcctgccgcagtctggtcccaggcggcattgccggagaagaaggcatacagttcctgctgcacggcggagttatagcacttgatggcactgcccaggatcagatccgaggaatcgttctggtcatagtcgctggccatcacgcggacctcgttgccgctggtggtctccttggcggcgtcgatagcactagcgatcaggttgccgccattgacgaagagcagcgtggtgccgttgttgcaccaatccagcatgcggttggtggtgtcatcgctggcgctgtaggtaccggcaaaccaggtgcgcagatccaccgtaaggccctgctgctcggccgcatactcggccccctgcaaaaagccggtgacgtagcgcaccacgccggggatctcctcggcaccgataaagcccagctgggtgtagccgtccgtcacggcggcgtaacccgccaggaaaccggcctgctcctcctggaagaggacacagtggacgttggactcggtggtatagttggtgtagctgctgttgtggggctcgccgtcaaacagcaggtagtgtacgccgggatagttgttctggatgttgaacagcgcctgggccatgacctcgccgcggcagacgaccagcgccgcgccgctctcggcggcttcacgcagggcggcttcggccgcctccaccgaggtatcggcggcagtgtggttctcggccgtgtagccgtaggtgccggcaaaagtctggatgcccttccacagcagggtgtcggcgccgtcgtccaggctggcctgctcggccgccagggcgatggttgccccgccgggcagggtggcagactcgccgttttcgtcaaccggggccgtaaaggtataggtactgtcgtccatcggcaccgtgaaggtcaccgtctggttgccggccttgctgctacaggcgcacaggcttaccgccagcgccagggtcaggaccagcgcaatgaattttttcatgggattcgggaaactccttaacataggtttaatcgaggttcgccgggccgaagccgtagggcagcagttcacccaaggtcgtcacgatgtaatcgtcctcgctcttggccatgataacggtcaggctcgggccgccgaactcgaacaatgcctggcggcagaccccgcaggggccggtgacaagggtgtttttctcccccaccttgctgcccacgatggcaatcgcggtaaactcccgctcaccctcgctgaccgccttgaacagggcggtgcgctcggcacagttggtgggggtgtaaccggcattctcgatattgcagcctttgtagaccgtgccgtttttgcccagcagcgccgcgcccacatggaagcgggagtagggcacgtaggcaaacttctgggcttcaaaggcgtcgcggatcaggctttggatctctgctttttccatattacttctccaaataagcatccacgcccagggccaccttcatcatttcggtaaagctggtctggcgctgttcggcggttgtgatctcgggagagacaaagctgtccgagatggtcaacaggcaggcggcgcgcttgcccagcaccttggcattgtggaaaagggcgaagctctccatctcgacggccaggcagcccttctcgtcccgcagcttttcccaataagtcggcttggcatcgctgggctggcggtagaacacgtccgaggaatggatattgccctcgatcagaggaatgttctgggcggcggcgctggcacgcagggcgttgttcagctcgcagctgggccgctggatgtcgtcggtgtcgccgctctgggtcacagcgtagttgctctccgagtaagcgccggtggccagcaccacgtcaaacagcttggccttgtcggtgtaagaaccggcagagccgatgcggatgatgttctcgacgccatactggctgaacagctcgtaggaatagatgccgatggacggcatgcccatgccgctgcccatcacgctgatggagcggccctggtaagtgccggtaaagccgtacataccgcgcacgtcggtgacgaggcgcgggttctccaaaaaggtttcggcgatgaacttcgcccgcagcggatcaccgggcatcaggacggtcttggcaaaatcgcctttttcggcgcggttatgaggggtagacataaacgtactctccttttcaggttattgtaatataatagtataccacatttcgggcgtttgtggtaaaatcaaatggaaaaaagttgtgaaagaggttggaaccatgcagctgccgaatccttgtaccctttgcccccgtgcctgccgggcggaccgcgcccacgggcagcggggtttctgtggggccgacggcactttgcgggtggcccgcgccgccctgcaccactgggaggagccgtgcctgagcggcgaccccaacgccgccaccggcagcggtacggtgtttttttccaactgcgcgctgcggtgctgctactgccagaactatcccatcagccagggcgatgtgggcaaagaaattaccgtggagcggctaacggaaatctttcttgagttgcaaaagggcggcgcgaaaaacttaaaccttgtcaccgccacccaatacctgccctgggcactgcccgcgctggatgccgcacgggcggcaggttttgccctgccggtcgtctacaataccggcgggtatgagacgttggagaccgtcaaggcactggccggctacgtagatatttggctggccgatgtaaaatatgccagcccggacctggcggccgagctttccgccgcgcgggattatcccgccgtggccgaagccgccctgcggcagatgctgcgccagaccggtgcgccggtgtacgatgccgacggctacctgcaaaagggcgtcatcgtgcggcatctggccctgcccggccacactgacgacagctttgccgtgctggcgctgctggcccgcatccgggacgaggagggcgtgcccttcattcccagcctgatgagccagttcacgccgttttataaggcggccgaacataatttggggcggcgcatcacgacctacgagtaccgcaaggtcatcgacgaggcggtgcgcctgggcctgaccgacggctacatgcaggagaaaagcagtgcgcgggaagaatacaccccgccctttgacctggagggcgtgtgatgcttatcggtatcgcgtatctggcgctgtttttggccgccgggctgctgctggcacggtgggccgtgccggacggctcccctgccgtggcggtcccgctggggtgcgggtttggtgtttcgctgctggcggcgctgcccgccgggttcgcgctggtgtgcggcttcacgctgcgggccgtctggcttgcggctgccggggccgccctgctttgcgcggtattgatttttgccgggcgcggacatatccgttttgctagggaccccgaccgcggcgcgatgtggctctgcctgctgccggtgctggccgtgacgctgtacctgctgcacacccatgtgctgcacaaggtaaacggcacgctgcacaccggtcagagctgctacggcgacatgccgatgcacctggggttcatcgagtacattgcccagagcggccagttcccaccccggtatcccctgctggccggggcgcaccggttcggctacccgtttttgtgcgagaccgtgtccagcgtgttccgtctgctgggggccgggcggcgggcggcgtatctgctgccgatggtgcccgcctttgtcagcgtatacggcatgttctggcagttggcgcggcggatgctgggcagcgcgggcaaggtgtgtctggcgttttatctgtttttcatgggcagcgggttcggttttgcctactttttaaaagatgccgcgacgtttaaaggtatctttaccgggttttacactacgcccaccaactatacgacgaaaaatatcgtgtgggtcaaccccatcgtggacctgctgatcccccagcgggccacgctgtttggatggtgcgtgctgtttgcggcgctgtacctgctgtggcgattcgcgtttgagggtgagtcacatctttggctgccgctggcggtgctggtattgcctctgccccttttgcagacccacagtgcactggcgctggtgttcctctgtttggcgggcggactgtacacgctgacccgccgcccccgcacggccaaaattttgctgccctggctgggactggcggcggtgtgcggcgtgtgctggctggccgagatgtccggcacggtgctggcccaaagtctggacggcaccaacatgctgcggctgcacttcaactgggtcaacggcaacggcgacgacacgctgaaagacccgtggctgtggttttacgtaaaaaatatcgggctggtgtttctgctcatcctgccagctgtgcgccatgccggcacccgccagcgctggctgtttggcggcggtgcggcgctttggctgctggcggagtttgtggtgttccagcccaacaactacgataataacaagctgctgtttattacccacgcccttggctgtatgctggcagcgcaattgctggcggattgggccaaacggctgcgcacccctgccctgcgggcggcggtgatcgcggtttgctgttttgtgggcatgttcggcagcgtgctgaccgtgggacgggagctggtgagcgactaccagcagtgggacgcctctgacattgcgttagccgactatatcagcaaaaacgccgaaagcgacgcgctgtttttgaccagtgacagccacctgactccggtgttcgccctggccgggcggcacattgtctgtggttcgtccagctgggtgtatttccacggcatggactacggggctgagtatgcggccatgcaggctttgtatgagaccccggatgaggatactttgcagacctggggcgtggattacgtggtatttgacggctctgccctggcccggtttgacactgatgaagattggtatgcggagcggttcccggtgtggtacgaggatacgggatgcagaatttataaaacagccgcggcctaaagtctccctcttggagaggggccaacacaaagattaacagctggcacccatctgaataggtgccagccgttttgtttttatttacttttccttgtcgtccgccgtttggtggtcgttttccgtgccgcttttttcggcgcgggggccgggcgcatgtggacgaactggatcggattgccattggccaaaatgcgctcttccacttccagttccggcagggatgccaggaacttgttcaggctcttggagccgaagttgcgcacatcaaagtccgggtaacgcttgatgagctggtcgcccacgcgggaggtgcgcacccaaccggtgccgtcgtccatctcatcgatcattccgtcgatgatgcggccgatggattcgcgattgatggcggtatcgtcccctgcggcggcgcgggcaccggcttcggcggcaggcaccgccggggtgctgtcggcctcgccatggtccaggatcaggtccagatacttgaactggtcgcaggctttgacaaagggaccgagagccttgctctcgcccatgccgatgaccagcttgccggcctcccgcagacgggcggccaggcgggtgaagtcactgtccgaggacacgatgcagaacccatccaggttgccgctgtacaaaaggtccatagcatcgatgatcatggccgagtcggtggcgtttttgccggtggtgtagctgtactgctggatggggatgatggagttgttcagcaaagcatctttccagcttttcagccgcacgtccgaccagtcgccatagatgcgcttgcaggcagccacaccaaaggacgctgcttcgtccaaaatcacctttacatatttcggcgagatgttgtccgcgtcaatgagaatcgcaagtttcaggtcctgcataggcttacctcttctcgcgcttgggctgctcaaagtacatatacagctggcacgggatcatgccgttgtatattttgcggcggcgggcggcctttttgccaaaatgctgctcaaagtcgacatcggcggtgatggcatacaacccctgcgccgggtggcgctgccagacctggcccagcgttttggccagggcggcggcttcgcccgcgtcgcccaggcgctcgccatagggcgggttggtcagcacggtggcggcgtcggcggcggtaaagtccttgacgtcggccacctcaaagcggcagcgctcccccacgccggccagcttggcgttagcgttagccagggccacagcggcggggtcgatgtcgtagccgatgccctcaaaggcggcatcggtgcgcacctcggacagagctttctggcgctgctcggcccaaatagacgcgggcacaaagtcgaaatgctcggcggcaaagcggcggcgcagaccgggggccaggttcaacgctttctgggcagactcgatgaccagcgtgccggagccgcagaacgggtcctgcaccagactgtcgcggcgcacgcggcccaggtcggcaatggcagcggccagcgtctccttgatgggggccagcgtggcgtttttgcggtagccgcgcttgtgcaggccgtcgccggaggtatcgaggtagatctccacggtatccttgcgcagggcaaagcgtaccttgtacagtgcgccgctttccggcagggtgctggtcttgtggccggccatcaggcgcttgacaatagccttttttacgatgctctggcaggcgggcacgctggaaagctggctggacaggctggaacccttgaccgggaaggccgcgtcggcaggcagcagttcttcccaggcgatgttgtagcagccgtcgaacagttcatcaaaggtggtggccttgtaggtagccagcagcagcagcacacgctcggcggtgcgcaggttcaggttggcggcggcgatgatgtcggccccgccctggaacgccacgcggccgtcggtgacctggatgttctgggcacccaggcgcttgacctcaaagttcagcgtggattcggtgccgaaaaagcacggcgccaccatggtatacagtgtaggcataaagatcctttcgttattatattataagacaggtaaaattcacaaaaaggccctgaccccggcgctgttgctgccggagcagagcccattttattcaaactaattgtgggccaaaatcagccgcggcggcgggaatagcccccgcgatggttttcggtcacgcgcttgaggtcggcgatcttttcctcgctgcgggatttatagcgggccatcatatcctcaaagctcatctcgccctggggtgcctggggcttgggctgccagacgcggggcttctcctcgcgcttctggcgcggctggttcgggcgcgggccgccattgccgccgccctgggggcgatggccgcgctccggtgcgggctgcgtgcgcttgatggaaagcgcgatcttgccgtccggcgcaatggaaagcaccttgacctgcacagtctgcccatcgctcagcacggcagaaagatcctgcacgaactcatacgaaacctcagaaatatgaacaagacccgtcttgccctcgggcagagaaacaaatgcgccgaaaggcttgatgccggtgaccttcccctcgacaatatccccaacttgtaatgccaaactatgataccccttttttctttagactgaatattcagaggggttgccgcaaagcgcccccgctaaaacaaaattatttgccgctgatgtccacaaacacgcgctcgttcgggcgcacatagccctgctcgcgggcgtagcgctcaataatggcgctgtcgccctggtccagcgtgctggacaactcggcattggtggtttcctgggctgtaagctggtcctgcaggctttgcagctcctgctgtttggaggcaatagacacctggtactggatcagcaggaaaaacaggtagccgcaaagcgccacaaaagcaagaggcaccagccagccgggaagcagtcctttccgctttttcatcttaaagaccgcctcccttccgtacaaatccacattacagcttacgcatagctaattatataatatcttcgacttcttttgcaactggttttttccagatttttttgattttcccgctttttcccgcggtcggcggggacagcagcgctttttcagagctgccaggcgggcgcaggcagctttgcgcagcggtacggcaatgtaccgccgcccccagcgagccggggccagcagcaatcggacgatccatgcggccaaggcatgcagcggcggcacgatggctttctgccaggccagtgccccggcagccagccccaccgccatgtaccagcgggccagcccggccgcgctgacgcccgccgagaagcccaccagcagcactgcagccgccgtaaaggccagcaagtccagcacaaagcagcgcaccgggccgcggcccaccagcagctccgcaccatcccgcacagcccagagcagacagcccagccctaagcaccacagcacatccgcccagacagccgcagcggcgggcgcggcggccatcagcggaaaagcctagccagtaggctgccgccggattggcggttctcggcatactgcagatactcgatcttgccggaaagctgtacctggccgctggccaccgaaagttcgctgacctgcaggccttgcccgccaaccgtcaggttgcccagcggcgtttccagcacggcagcgttttcatcacagctgatgatgcgggtaacgccggtaagcgctaaacggctgcggtctttcagcgccaggctgtggctgcggggtgtatttgcagtttgcgccgggcctgccggggcggcgggctggtgcagcggtacggtcttgctttcctgcatgggcatgtttccctcccgcgtggcaatttcctaaagtgcgaattccctataagatatgcggggcgggacggaaatattactcgatgacctcaaacaattcgcgggcgacatccttgcctttcggctcctcgacggccagcacccgcactttgacagggcggttgccgaaggtgatctcgatgacatcaccgactttgacggcatagctggccttggcaggcttatcgttgaccatcacgcggccggcatcggcgacctcgttggccagggtacgccgcttgatcaggcggctgacctttaagtatttgtccaaacgcatggggttcttctccttcttattgactaaaaatgcaccccgtgccgaagcgacggggtgcagaactttgggatagcttactgaacagcgtccttcagggccttgccagccttgaatgcgggcagcttggaagcctcgatggtgatctcggcaccggtctgggggttgcggcccttgcgctcagggcgctcgcggacctcgaaagtgccaaagccaaccagggtgaccttgtcgccgcccttcagggactcggtgatgacatcgagagcgccgttgacagcagcctcggcatccttcttggtcagatttgctttttccgcaacagcggcgatcagttcaactttcgtcatggtttgtacctccaaaaatttatcagcaaaaagcagctgcgaacgcggggcgtgcccggtcctgctatgcttcttgtcttacagttggtgcgtggctgcggtaaaggcggcgttggccttttgcagcgcctgctcggggtccaggccagccagacgggccagggcggcggttttaaacagcagctcacccagtgcagcttcggcgttgtcccctgcttctacccggcgggccagggtctccagttctgccgggtcggtggtgacggtcaccccgccgcgggcagccctcttttgcagcttggcggcgcgcatcagggcgggcagggctttaggcacgctgtccaggtcgtcctgcagggtcacacggcccttttccttattcttgagcgcatcccagtcttttatactggtgtcaccgccaaaaatatgcgggtggcggtcaatcagcttacggcagacgccgtcacagacctgctgccaggtaaagcggcctgcctcctgctcgatctgggtatggaaacccacctgcatcagcacatcgcccagttcctcgcacaacagttcggggtcgtccaggtcgatggcgtccacggcctcgtaggcttcctccaggaaattcatgcggatggatgtgtgggtctgcaccttatcccaggggcagccgttttccgggtcgcgcaggatcgccaggatggccagcaggtcgtcggcggtataatgctctttttgcgggtaggcgttcataggcatggtttgttatgctgccgcgcagctcgtaacattttactcccaaatcaggatttgtcaagccctgcgggcggagccgtgttgacagcgccgcccgcaggcatcaaaatcgttgcgttattccgttatttttgcggaagctgtaaactttacagctgggcgccgcaatggttgcagaagagggcgtcgccgtccacctcggccttgcagacggggcagatcttggtctcgccgcgcagcttaatgggctcttcctcgatttcttcctcggcagcttcttccccggtggcaggctcatcctcaatgatctgctcttcttcctcagcctcgcaggcggcgcactcctcgggagtcatgttggctttcagctcctcgatggacttttccacctcagccacggcgtcgatgtatttatcaaccaggggctggttttcttcgccagccttatgcaggctgtagaccagggcacccaactggcgctgtgccttggacaggcgtgcctgctggttcagcagctcgagctggtttttgcccttatcagcaatgtcctgggcggtctttttggcagtgtcgaagagctggatgccctgctctttcagcatatcaatatcgagttcaaacatagaaaacacctctttctataaccctgcgcgtttctgctccatcgcgctttgtagccttattatagccgattcctacgcggtttgcaacgcgcaaatgtatattttccgtgaattatgcgccaataaactcccgcagcatgctgtccgccgggaccagggcggtatccagcggcgggaaagccgcaaaccgtgcccgcagcgtatcaagctggcggcgctgggtggcggtcaggtcctcgtccgggggcatggtgtccagcagggcgtgccacaggcagacctcataggtgtgggtggtatccagcagcaggtcagcgcggggcttgaagggcttgatgtactggtcctcgcccgcgcagactttgctccacaagcccagcgtaaaggcggcgccgtggccgcggaacaggcagtcccgcaccaaacggcgggccaggcggatgtcccgggtggccaggcagcgggtgctgtcgggggcggcatactcctcccgcagacccgcgtacaggcacagggcggcgtcggcgggcaggcgctcagtcagggcagggttcagggcatgcagtccctctatgatgaccacgccgtcccggcaatcgatggtccgggtgccgttgggctgctgaattttaaagtcaaagatgggcgctttgcagacgccctcggtgtgcagcttggcaaggcactcctgcagcaccggcaggtccagcgaacccaggctctcgtagtcgtcggtaccgtctgggtgcttagggtagcggcccgcgccggcatagaaatcgtccaggctgaccaccgcgctgcggcaaccgcgggcggcgatggcatcggcgatcttgtgggctgaggtggtcttaccggcggcagacggaccggtcagcatcacgatatgccgcccgctggacagcacctcgttggcgatgaactcgatctgggcacggtactgaccctcgctgtaatcggcaaaggcctggggttggttggcggccagggcgaccagctcccggctgacgaaacgtttacgttgttgtgtagcgcgcataaaagtcctccacgccctgcttacgggcgagaatctcctcaaagcggtcaatatattcggtaggatacttgaagttgaagatgcgctcgatcttgccgcggcgctggccggggatgaccagcttggtggagccgcccgcaccggcggacaggatcgtgtggatttcttccatgatataaatgttgtacaggcactcgcagccgggcttggcccagccgatattctccaggttttgcagcgtacctttctggcggtacatgtagtatgggcggtagccgacgtcggccagttcgcggcagctttccaacatggcggatacatcatcgtatgcggcggcgcggtgttccaccaccaggttgctggcgcgcttgagcgtcagggtatgcacggtgatgttctccgggtccagggcgatggcctggcgcaggctggcggtgaaaccctccaccgtatcgccgggcaggcccgcgatgaggtccatgttgatgttggtgtggccagcggcgcgggcggcagcgaaacagtcgatgatgtcctgcgcggtgtggcggcggccgatattgcgcagaacttcatcagagaaagtctgcgggttgatggagatgcgggttgcgccatactgcttgatgatatgcagtttttcggcatcggtgcaatcgggacggcctgcctccaccgtgtattcatcaagagcagccaaatcaaaggtgcgggcaatatggctcatcagctgttccagctgagccgctgaaagcgccgtaggcgtgccgccgccgatatagaaagtacggatgcgcaggccgcagcggtcggcggtttcgcggatagcggtcaactcccggcacagcttgtccacgtagggctgcaccagcgcgcgggtggctttgtcccccaccgtgcgggagacaaagctgcaatagctgcaccgggtggggcagaacgggatacccgcatagatgctgcaatccatggagtcggcagcgtccagcacagggcgctgcaagtccgcaatgcccagcgccagcttgaatttttccggcgtgcaggcgaagtggtcgaggaacttttcagcgatagcctcctcgctctcccccgccgcgcgcaggtcgtggatgatgcgcaccgggcgcacgccggtcatcatgccccagggcgggtcgatgccggtaaggtctttcagcaggccgaattccagcttgcacagggcatattcggggtcagcttcggggctgcgcagatcggtgcgccaatagaggcggccgtccttgcgtacaaggatcaggtcggtcatttcgtggctttccgccaggacgaaatcctcggtttccggcaagtcttccgccttttcggcgcccgggaaaaagatacgggccgtatgctcggcttcgtaaccagcggcggggccgcgtaaaatgatctgcatagatccacctcctgttcagtcagttctcttttgcttgggatggcttagtaggcccagccgccgtccatgtaggggttggtgcggcgctcctgcccgagggtggagaagctctcgtgccccggcaggacctgggtgtcgtcgcccaaaggcaggttggccagcagggacaggctttcctgcatctggcgcatgctgccgccgggcatatcggtacgcccgcaggaaccggcaaacagcgtatcaccactgaaaagcaggttaccacagttcagcaccacactgccctgggtatggccgggggtgtgatagattttaaatgttaaaccgtcaatgttcaactcgttattggcgggccagttcttgtccacctgcccggatttcaacggcagcagctgggtgccggcggcgtccaccgggtccatatagacggtgcagccggtggcctgtttcaacgctgccacggcccccacatggtcgtagtggccatgggtcagcaggatatgggtcagggtagcgttctcggctttcaaggcatccaggtaggcctccggcgcagcggcagcatcgatgaggatgccatgccctgcgtcggtggtgatgagaaaggtattggtatacagcggcggcaagccgtggatgtgctgaattttcataaacagctccttatttcttccactcgtcggtatcaatgacgatggtcacgggaccatcgttgacaagatcgatcttcatgtccgcgccaaactccccgtgctgcacgtctttgaggccctgatgggacatttcgtcgaggaatttctcgtagcaaggcacagccagatctcccttggcggcatggctaaaactggggcgtttgccgcgggaggtatcgccgtaaagcgtaaagttggacacgaccaaagccgagtagcccagctccactgcgctgcggttcagcttgccatcctcgtcctcaaaaatgcgcagatgcgcgcatttctcggccagtttgggcacaatggcgatgtcgtcggtatcgcgcacgcccagcaggatgacaagcccggggccgatgggccggggctctccgccgttgacggccacgctggcacgggtcacgcgctgaatgactgctcgcataaataataactccttatatcagttgcggttcacgctgacaacatccttgacctttttcaggcgggcgaccacgctgttcaggtgttcggtgttggtgatgcccacagtcacgctcatgcgggcgcggccctgctcggccgagcgggcggtcagcgagtagatgggcacccgcatatcacccagcgccagcgccacgtcagacaacaggttcgcgcggtccatgcacagcagatccagcgtagctttgtagttttccttggcatcgtcggcccagtaggcgttcacccagcggtcggcgttctcgccctggcgcatgctctcccgcacgttggcgcaatcctttttgtggatggacacgccgaagccgcgggtgacgaaaccgatgatctcatcgccgggcagcggagagcagcacttggcaaacttgatggggcagttgtcgatgccctcgacgacgacgccgtcggtggagtgcatccgcttgatgtccacggtcacaggcttgacctcggtggccttgagcttggtgtactcctctttcagtttgggcagcatacggctgatctgcaaaccgccgtagccgatggccgcatacatctcatccaccgagttgcagtggttgcggcgggccagcgcctccataaaggtctcgtgctgctcatcggtcatcgacatgaggttgcggcgcagctcgcgttccagtgcctcgcgtccctcctggatattctcttccctgcgttctttcttgaaccagttgcggatcttgttcttggcttcgctggtctttacaatgttcagccagtcgcggctggggccgcggttttcagggccggtgatgatttcgatgatctcgccggtctgcaccttatgatcgatgggcacgatgcggttgttgaccttggcgccgatcatgcggttgccaacggcggaatggatggcgtaggcaaagtcgatcgcagtggcaccggcgggcaggttgatgacgtcgccccgcggggtgaaagcaaacacttcctccggcagcaggtcgctcttaatgtcgctgagcaggtcggtggcatcggcgctggagcgttggctttctaacagttggcgcacccaggccaggcgctcgtccagcttatccctgctgccgttggtgatgcctgccttgtacttccagtgggcggcgatgccgtactcggccatgcggtccatatcccaggtgcggatctgcacctcaaaggggatggcctcgcggccgatgacggtggtatgcaggctctggtagccgtttggttttggcgtagagatgtaatctttaaagcggttaggcagcgggtggtacatgtcgtggatgaggcccagcgcgttataacactcggacacattctcgaggatgatgcgcacggcgtaaatatcgtagatctcctcgaaatccttattctgcatgtacatcttgcggtagatgccgtagatgctcttgacgcggtggcggatggtggctttctggatgccgttttccgccagatgcttggcaatggtgtggcagaccgtgtgcaggaactcgtcgccgtgcttgttcagcaggtcgcggatggtttcatagcccacggggtccaggtagtgcaggctgcggtcctccagctcctccttgatattgctgatgcccaagcggtgggcaatgggggcgtagacctccatcgtttccagagccttatcgcggcgcttctgctccggccaagcgtcgccggtgcgcatattgtgcagccggtcgcacagtttaatgatcatcacgcggacatcctgactcatggccagcagcatcttgcgcaggttctcggcctggcggtcctcgacattggagaatttgatctgggtcagtttggtgacgccgtccaccagcagggccacatcggggccgaatttctgcttgatttcggccaccgtgacgggggtatcctcggccacatcgtgcatcagggcggcggcgatgctctcgctgtccatacccagttccaccagaatggacgccaccgacagcggatggcagatatacggctcaccgctgcggcggcgctgaccgccgtgggctttctcggccaatgcgtaggcacggtcgatcatatcgaaatcataggggcggccgctgtccaccagcgactgctttaagtcctcataggtgatgggcatttttacatcaccggcttgggtgttttccatatgagattccccttttgcaatttattcctctttcacgagagagtgtaggagtcgatgcttgcatcgacccgcgggcggatgacagcacccgcccctacaggatgtcacttaacaactgctgccagcttttgcaggatcggcgcgctggccaggtcctgcttggtggttaccggcacgggcagccaatggccattctgctcctggatcagccccagctcgtgcagggcggccaagctggtcagggtcttgccggtgttctccggcccttgggcggcaaacacaggctgcagatcgcccgaggcgacctgcccgccccggatgcgcttgtacagcatcacggtgtcggcacggtcgggcagcagcgcggcggcgcgggcgggttccagcgtgccgccggtgcggaacgcctcgaaccaggcggcctgctcgctgggcagattgcccagccccgcggggcggatggcccgcagatgggccgagaccatcggcccgctgcgcccggtaaagatcgaaacttccagcgcggcttccaccgctgtgcccaccgggtaggcaaaagccgacggtgctacgccgaagatcgaggcaaacagggtatcgttaccctggcgcagccgcacccgggtgtggcgtccctcggcgcccataggccagataccatcgatcatagcgtcgcagaccagcagcaccggcatggggttttcccggccaaagggcgccagacgggagagttcctgcacgttgggcagcgtcagctccgagagctgcaccgcggcgtccagtttcagttccggcgcaccggggcgcggcgcatgctcggccgcccaggtgttgatggcctggcggaaagcgggcagcttttcttcctcaatttccacaccggcggccgccgcatgcccgccaaagcgggtcaggtattgggtgcagccagccagcgcaccgtgcaggtcgaacgggtcgggcgcacggccgctgccgcgtccctctccattttgcagtgagatgacgatggcggggcggttgtacttttccatcagccgcgcggccacaataccgataacgccggggtgccagtcctcgccggagaccaccagtacgcggtcccgctggcgggcagggtcggcttccagcgtcttttgggcggcagcgaacacttcctgttccgtctgctggcgttcggtgttgatctccgccaggcgggcggcaatgccggcggcctgggcttcatcggtgcaaagcagcagctttaacgcgaccgccgcattatccatgcggcccgctgcgttcagccgcggggccaggctgtagctgacggtgtccgcggtgacgggcttgcccgcgaccccggcgttttccatcaacgcctgcaggccggggcgcatcgtgtcctgcaaaagggcaaggccctcccgcacgagggtgcggttctcccccaccagcggcatcacgtcggccacggtacccagggccaccagctcgccgtacatttccagcaagtccgcaggctcgcagccttccagcgcggcacaaagcttaaaggccacacccgcgccgcacagatccttaaaggggctttcgtcatccgctcgcttggggtcaacgacggcgacggcatcgggcagggtctcgccgggcaagtggtggtcggtcacgataaggtccagccccagctccttggcacaggcggcttcctcgatggccgaaatgccgttatccacggtcaccaccagcttaaagcccttttcggccaggctttccagcgccgggcgggtcagaccgtagccggtgccgcgggtgggcagcttgcagcgcacgtgggcgcccatactgcttaaacattcatacaaaatggcggtggcagagataccgtccacgtcatagtcgccataaataacgatggtctcctcgttttccacggcctgctcgatgcgggccacggctttgtccatatcccgcagcaggaacgggtccgaaagttcggccccggctcccagcagggcctgcacttcggccgggtcggtacagccgcgggcggccagtacccggcgcagcagcgcaccgcacccggccccggccaatgcctgctcggcggcgtggtctgcggttttgatctgccaggcgggatagttcataaacgggttctccttttatcttttactttaccttaaagtccgcgtcaaaatcatgggtcaggccatcctggcgcagcatggcttccagggtgtcgatctcggtggaaacgtccatgctcacatcttgcaaaagggtgtcgtacagtttggtgtaggccccattcagcgtatgcaggatggcggtgatgtcgcggcggatttcggcagcattcgctgtctcgctgtcccccagcccctgggcggtatccagcagcttgcgagtggtgggcaggtaatattcccggaagcggcgcacccgtggcagctgctcggggtgattatgcacgaagcccaaaatcgacgcgcaggtcttctgcatttttgcaatctcttcgtcggcctcgctgcctaatttgccgcggcagatttttagatagttcaaaaaatccacgccgtcgcggttgaattgttcggcatccgtcagggtttgcacgggcgcggcctgcggggccggggtactggccgggcagagggaatcgtccagatacagcgtgctgtagtcgtcgctgatggcggcgttgggcaggtcgccgttggccacagctttggccaccgtgtcgtaggctttttcctgcttaatttgggccttgcgggccagggatggcaggtcgcaggtccaatcgttggcggctcgcagcagtttgcgcaggcggccaaagtagctgagctttttcatacccacaatggccatgaacagaaaacccagcgtgaccgggtaaaatacagcggtcagaatcggcagcgccacaaattcgtcgggtgtcagtcccagcgtacccgcgccgacagcggtcaggatgcccagcaccagcgctgcgatgccgaagcagccggtgaaggtccagcccacagccgtaagcaccacgcccaccgattggccgccgtttttccatttgcgctccaggcggcgcttccaggccgaaaagctatccggctgggcagcggcacgggtcatagcgtccccggcctgctccagtgcatcggcaatgctgcccagcaccgaagaaccgacctgcgtgccaaactgcacggctgagtcgatcatatcgccgaggtcgtaatcgtagttgtttttgttgttatcaggcattttatgtccttactcacacggtttgtatcgtttcatcaactcagcggcacaacgcacaccgtctacggcggcggtcatgatgccgccggcgtaaccagcgccctcgccgcaggggtaaagcccgggcagggcttcgcacaccagcgtttccttattgcgtaccagacgcaccggactgctggtgcgggtctccaggcccgtcaatacggcgtccggggcacggtaggcggccagcttgcggccaaaggaggtcaggcccgcccgcagggcactgctcagttcatcgggcagtagtgcgcccaggtcagcaggcgttacgccgcgggggtaggtaggctgcacagcgcccagctccagctggccgcgcccggccaaaaagctgcccacggtctcggccggggccaggtatcccccgccgcccgcacggtaggcggcctgttccagctggcgttggaaggccaccgccttggctgggtcattatcaaagtcgcggccatccacgctgaccaccaccgccgcgttggcgtttttgccgttgcgggcatgcaggctcatgccgttggtgaccacggcgttttcctcgctggcggcggcacaaaccgaaccgccggggcacatgcagaacgtatacacgcaccgcccgccactgacatgctggctgagttggtactcgcccaccggcagcaccgggtggccggcggcggcgtggtagaggcttttatcaatctcggtctgcagatgctcggcccggaagcccaccgagaaaggcttgcattccagcggcatgccctgcctgtgcaacatggcaaaggtgtcccgggcgctgtggccgaccgccaggatcagctgctcgcaggcaaaatcgcccgctgtggtctcaacgctcgccagggcaccgttttcgatcttcagaccggtcagggcggtgttgaaccgcacctcaccgcccagcgcgataatttcctgccggatgctgcggatgatgccgcgcaaaaggtcagtacccacatggggcttttgccgccaggcaatgtccgccggggcgccgtgctgcaaaaaggcatcggtcacaaaggcgcaaagcgggtcgcccacgcgggtggtcagcttgccgtcggagaaagtacctgcgccgccctcgccaaactggatgttggcgttcaagttcagttcaccggtcttttcaaaatgctcgacggctttcacgcgctcgtccagttctgggccgcgttccagcaccagcggacggaagccgctgcgggccagcagcagcgcggcaaagaggcccgccgggccaaggcccacgaccaccgggcgcgtttttaacgctgtatcgcctaccgagaaagaaaacctggcgggctgtgtgaaacagacgcagggcgaggccccggcgtatgccgattcctcaccctcgtctttgagcgtgattgccatggtatagaccagcacgggcttgccgtgccgggcatctaccgataattttgccaccccgcagcgggccgctttgtgggcgggcacgcgcaggatgtgcaaagcctgggccgccgcctctgcgtccgggtcaggacagctgagcggcaggcggatattgcggactaatagcatagataacctctttggctccctctgtgagacagactcccccgacgcgggggaggtggcacgaagtgccagagaaggagtgctgtcagtgaagctgactgagggagagacattcaaaccaaggctctctcccccacccgcttcgcgggagccccctcccagagggggccatttgcgggatgagcactttttatttcgccgtgacctcgcactgtaccgtgtagctgccggtggcgaagatgcgggtggaggacgggatctggatggtgaccgggatggtctgctggcctaccgtcaggctgatgctctggcagtcgatctgcgcgactacgctgtcggcggacagctcctcgatctcatccttcgggccgtacaattccacgccgctgaccaggctggacaggatctccatatcatagttgctgggcacgttgaccagccggatgttggagatgttcagcgtagtggaggccatgtccgtagtgtcaaagctcagcgttacatttgtcacgccgtccagcgagactacgccggcgggcagctcgatcaaacgctggtagtcgcggtccatctcgaactcgcgggccaggtcaaagtcggtcacggtcaggctttccagcgcactgacggtgcgggccgggcctgctacgcgcagcttctgctggctcaaggtgtagtgcaggctgctggtgtcaaagccgttgggcacgccgatgaaatccacttccagcggcagctcccgcacctggtagattgtcagcgtgacgttggcggaatcgctgtccatcgtggtgtactgcggggtgatggtgttgccgttctcgtcccgcagctccagcgtggagggcgtggtggtggtgtcggccagcgcgtcgtcgctcagcaccggggccaccacctggctgatctgatccagctcactggtggggccgcgcagcgtgatctcagcgggaacagcggaggtcttattcagcatatagccgtcggcgatagagacagccgaggcatccaccgtgacgggcacggttttttcgctgacttcatcgaacacgacgtcgatcgtatcgtagggtttttccactgtacacttgatgttgccggagtaatcggtggtattggtcacgcgggcctgcaggcgcagggtgaccttgcccgcaccgctgacgccggaatagctgggatagaccatgatgtcggagctggtcatcttaccaatgctggtgatgttgccctcgacccgcacggttacgccgctgatgtcgggccgctccacaatgtccaagccctggttggtgtaggtagtggcggagttggcgtagttgatgggcacatcccggatggtggtgctgccctggggatcgatgtagatggtaacgaccaaccaggtagccaggccgcaggccagcgccatcaggatggaaactacgcggttatccatcagggatttgcgcccctggggtgcgttattcgactttggcatggggtgcgttccctccttttcgcagcagttttttcagcacggattcgttgtcttcctcggtctcctcaggcgggacgacctcctcctgcaagaggttaaagaggttctggcggtccaggcggcggatcagcacgccgtttttcgccagcgagataatgccggtctcctcggacacgaccacgacgatggcgtcggaattctcgctcatgcccaggccggcgcgatggcgggtgcccatatccttgcccatatccaggttgttggaaaggggcagaacgcagcccgcagccacaatgacgccgtcccggatgacgactgcgccgtcgtgcaggggcgtgccctcgtaaaagatggtgcccagcatttcggggatgacgtcagcatgcatcggcgtgccggtgcggatgatctcgtccaggttattgcggcgttccagcaccatcagggcaccggtgcgggtgtcggaaagctgttcagccgcatcgcagatggcaaccacagcgctctgccacacaccgcgcagcgaaggatcggtgcggcggttgccgaacagccggttcgcccatacggtggtctggcccatgcgctccagtgcacggcgcagctccggctggaagatgaccactgccgccgtaaaggccacagtgaccacgttgttcagtacccaggtgacggtgcgcaggtccagcagcaccgcgaagccgtagaataagatcagcagcgcgatgcccttgaccaactggccggcccgggatttgcgggcgaactggataagctggtaaaacacaaaggaaatgatcaggatgtcgagcgtgtctgaaaacagatcgaacgcccgcaggctgctgatgatagcggataacgtttggttttgcagcatgggtaaagtcctgtcctttcctctaaaggttggttacgttcactcgatcagagcgacagcgtgggccgcaatgcccagcccttcgccggtaaagccgagatgttcctcggtggtggcctttacgctcacagcgtccagcggcaggccgaaggcatcggcgatattcttacgcatagccgggatgtggggggccagcttcggccgctggcataggatcgtcgcatcgatgttgcccaccttgtagccgtgagcggcgataattttcgctacttcgcgggtcagcgccagggagtccgcacccttgtaggcggggtcggtatcggggaaatgctggccgatgtcacccagggccgctgcgcccagcacggcgtccatcaccgcgtgcaacagcacatcggcgtcggaatggcccagcaggcctttctcgtaggggacctctaccccgcctaagataagcttgcggtcctcgaccaaacggtgtacatcatatccgtgaccaatacgcatggtgttctccttttgtaagtcctctttggtggtgatttttaaattggcgtagtcacccgccgtcagtgtgacgggcaggccagccagttcaaacaggctgcaatcatcggtgaccaggctggctttctcgccgctgacagcttccagcgcctgtaagtacagtgcccggtcaaagcactggggcgtctgcacggcgtaaagggtggcgcggtccggcgtggtgacgactttgccgtccttgtccgccaccttgatagtatccttcacgggcaccgccggggcggcagcgccggtattggcggcagcctgcaagacttgggtgatgacttcctcgctggcaaaggggcgggcagcatcgtggatggccaccagctggcccttggcggcagccaggccattatgcacactgtcagcacgggtcgcgcccccctgcaccacggtgcagggcttggggcaggccgcggcgatagcctcgcactgggggcggttgccgcccgccaccagcaccagctcgtccaccgccgggtgggcgacaaacagggcacagcttgtctccaataccgtgcgcccatcgggcaggcagtagctgagtttatcaaatcccatgcggcgggaggcccccgcggccacgataatggcagttacagttggcagccccttttgcggcatacagctgcgcccccttacacttagatatatacttatcattatacagggtcagcttgaaaaaatccactaaaatcaagaggttttttcggtgaaagttccgaaggtgctctctcaccttacacgaccttatacgagcggcacagaaccaccttgacggaactgcctgtaccttctataatagtatatagaaataacaagccacagaaacggaggcttttgcctatggcgtggatgatcgtatgtgacagctcctgcgagatccgggaactggagcaccccagtaccggggtgcagtttgcccttgtaccgttcaagatccgtgtgggtgagcgcgaatatgtggacctggccaccctgaatgtgccccagatgctgcaggccatgaccgactacaacggcgccagcaccactgcctgccccagcccggaagaatgggccgagtattttttgcaggccgataactgcattgcgctgaccatcagcagcaatctttccggcagctataacgccgccgtggccgcccggaccatggtgctggaagaacaccccgaaaagaagatcttcattctggacaccctcagctgctccggtgcgctggccggtgcggccgagctggccaataagcttatcggcgagggccagacatttgaggacatctgctttgcgctggaaaagttcgccgaaagcacccacatcctgttttccctggccagctttgacaacctggccaaaaacggccgcgtcagcaaggtggtgggctttatcgcaggccgcctgaacatgcgtgtactgggccgccgcacctccgatggtaagatcgacttctacttcaagacccgcggcgagacccgcgtgctggccaagattctggagcagatggacgaggacaactacgacggtgtgcacccagtgctcatcagcgagtgcggtaaccagaccgccgcccgcctgctggaacacggcattctggccaaatggcccgaagcccctgtgcgcatcgtgccctgcagcggtctgtgcagcttctatgcccaggaccagggtattatcatcacctactgatttttgcaattttaccaacaacacccccgcacagccgttttggttgtgcgggggtgttgtttatttttgataaataaaaaaggattattctttgttcgccttgcgcttcatacgctccagcagggcagctttctgcttgtcccacttggcgtcggcctcaggggtggcaggctcagtgcaccgggcaaagctccaatgcaggccgtcgcggcggctgagcttgaaccgcaggtaccacgccccgcagtaggggcaggtgcaacgggtgtagtagccggtgttcccccgcttgagccacacttcgtcaggcgtcagcggtgcgctgcactctgggcaggctgcctcggtcagttcggacacgttgcggtagtcgtcatgctccatccggttcatgaacaggcggatgtcccgcgcggcggggttcggctcggcgcccagcaaggcttctttcagcagttcttcctcggtggggtaggtcgccagcccctcggccagcggcagcttacggcagaccttggtggtgtacagtgcgtcatccaaagcgttgtggaagggttcctccttggggatgcccagccggtcgaccacgctttccagcgtcaggccctccccttctttgcggggataggcctgcaaaaagatacgctgcaggtcgtaccagcggtcgggccagttctcatccaggcctgccaaaaaaaggttctgcttcagaacaggtacgtcatccaggccccattcggccagctcggcgtccgggccggcccaatccaggaacttctgcagaccctctttcatcggcagcccggcgtccaggtcgccctggctcaggccggtcactttggcgatgtggtgctgcaatttgcggaagatgcgcggtcgcaggttcacttcaaaagtatccagcacgtcgccgcgggcattgatgcgcaccgcaccaatctggatgatctcaccccgcagcgtcaattctgtaccgtggtacaaaaacgttttgggctgatacccgatattccattcgaggtcaaaaacgatcaggttcacaggtcagttctcctcgctcaagataaatttttctacagccagccccacaccgtcgtggtcgttgtcggccgtctggtagtcggccgccgcttttacgggggcctgggcattgcccatcgccacgcccataccggcgcagcggatcatcggcaggtcattccagccgtcgccgcaggccatcaggttggcagcggtcaggcctttggcgcgcagcagcatctccagcgaggtatccttgcccacgcccagcggcatcgtctcgataaagaagggctggctgcggcagatggacagcttgcccgcgaactcctgctgcatcagctcctccacatggggcatgtccacggggtcgccggtcagcagcagcttgttgatgggataattcacggtggcaggcaggttttctacctggcgcaccgggatcttgttgatgcgggcttcctcctgcacgtaggggctggaggcgttctcggtaatgatgccgtgggtgtcataggtcaggggcaccacgttccagtagcgggagaaagtgcacaccggctcgatgaggtccggcgggaaggcgtgctgcaccagcacgtggccggtcttgcaatcgatgatcttgccgccgttgtagcttaaaatgcagccgccgtatttttgcagttccagttcccgcgccagcggctcaatgccgacggtggggcggccgctggccagcacaatgcagacgccgcgggccgcggcttccatcaaagctgccttggtgcgtggcgtgatgattttctcgctgttggtcagtgtaccgtccagatccagtgccagaactttgtattgcataggtatcccccgattacttatattaaatccatcctattttaccccaaaccgacagattgtgcaaggggcgcagcgcgtcgggaaaaaattagacatttctaacgtattgacaaactttcttttccgtggtacactacaaaaataacataagggagtagtcagcaccctatgcggtggagcagccgcgcggtgcagttctgccaacataatggggcgtacccctggcttaactttaaacgacgagacttatctgttcagcgccttttgcgcaggacagataggtctttttttgtgcccttacaaaaacggaggaatacccatgacattatttgacctgatcctgatcgccatcagcctttccatggacgcttttgccgtttcgatctgcaagggcctttcggtccacaaggtcagctttgcccacgccatgacctgcgggctgtggttcggcggcttccagttcttgatgcccacactgggcttcttcctgggtgaccgcttcgccgtggtcttgaccaacttcggtccctgggtagcctttgtgctgctggccatcatcggcgtcaacatggtgcgggaaagcttcggcggcgacgaaaagctggacgatgactactccgccaaagcaatgctgccgctggccgttgccaccagcatcgatgccttcgctgtcggcgtcagctttgccgccatgcaggtcaatatcctgcccgccgccggcctgattggctgcatcacctgcctgctgtctgccatcggtgtgcgcgtaggtgccctcttcggcgataagtaccgcgctccttccgagcgcatcggcggcatcgtgctgatcctgatcggcctcaagaccctgctgacgggactgggaattttgtaatttttgctgtatactttccgttcctattgtaagggtcgatgctcgcatctacccgctcccgcagccattcgctcttccaacaaacaaaaagtgcatgcgccttcacccggcacatgcacttttcttttcctattttattatccccggcaggcgtccacaaaactgcgcagcaaactttggctttccgccgcctgccaacgatgttccgggtgccactgcacggcctgtacgaaacggtattccggcaagtaaacagcttcgaccaacccatccgaagccactgcctgggcatgcagcgccggagccagccccttgatgccctgatgatggcggctgttcaccgccagcggaccggggccgtataacgcagccagcggcgtgtcgggcaggatgttcacttcatgcacggtgcggtcatacggcttgtccatactgtgggtgatctcggtgccggtctgggttttcaaatcctgatatagcgtacctcccagcaccacatttaaaatttgcagcccgcggcagatgccaaacaccggcttgtccgcctgcaaagccaactcgatgagcctggcctccatgcggtcacgccacgggtcattttcgccgcagaacgtctcttttgtctcaccgtacagcaccggtgccacatcgttgcctccggtcagcaaaaggccgtccacccggtccacaaggtctttcagcatagcagcatcatccgtcagcggcagcatcatcccgatgcccccaactgcctccagcccctgcatgtacccgggcagcatccacaggctgtcccgtcccgcgtccacgataggcgtcaatccaatcaacagtttcattggctgtccccttccctctctataattttgcattatagcgcagcctggaagcggtgtaaagcacccaccccgattcacgtagatttttaagaaaacacccgaaaaaaatgttggattttaagaccaaccgttgttattcagcgcacaattttatttttgcaggtacttttccgcgtccttttccatctctttccaaaccggataggaagcgccattttcctcaaacagctttttcaggtcgcggttaagcgtgctcatctcctcaatggcattcattgcgtggtccgaggcgcagactttgcccaggcccgttgcgcacatcagggtaaagaatttcacgcaggtcttgcggtacttttcgccctcaaactcctcgtcatccttgggcaaaatcgcatggccgctgtttttcagtgcgtgatagccctctacattggcatcggtcatcttattaaagtaagcggtgtcccctttcaaccgcttgaggtcgccgtcagttttgtagcaggcaaaggccactggcagcacaaaggcggcgtgacaaagcagatagtcccccatgttcggctcatatgtaactttataacctgtcccagcaaagattttctgaatcagttgctcgttagattgcgcaccgcgcagctggccgatcgtaatttttttcagatcaactgaaacaacacggtcctgctcacggtgccctgccgaagaggcaaaggcgaacatcacattcttttctggcagagccgtcaccagtttctctggctgcacattattgcccaggaaaacaacgtttttgctcttattggcgcgcaatgcatccaggatcgtagccacctgcgtgtagcgcgcagcaacgaagatcacatcatactcatcctccgatgccaattccgtcaccaccggcacacggacggtcgatttcactgggagcacatagtttttaatgcacagcccgtttgttttgatggtctcggcccatttccctcgcgcaagcagagtaacgtccttccctgccttgaaaaagtctcgtgccagattgcaccccagcacacccgcaccatatacaagaattcgcatcgtgcccatcctcctctattttgcagttaattaatgctaacccattgttacaagcatacgccggacttggggtgctgtcaagcgctgtgccctcaaatcatcgtttgcttcatcaacttcagccgtctatttccctcagttctgtaggaaaggctgcacataacaaaaagctctgcctccgaagaagcagagcttttatggtgacccgtgcgggaatcgaacccacgttaacggcgtgagaggccgctgtcttaaccgcttgaccaac

SEQ ID NO: 7767 - DNA, 15142 bp, Unknown
  gut microbiota DNA sequence
gtccgaatacagcaatatcggcatcaacaaaattgatgccatgctcaaacagcccaactgtcctttcgtgttgtatgtagggtcaaagaaattggtcaaacgcaaagaatttgaagcctacatcagcagcaagctgattatttaagagaggtaatgccgttgaaaatagggatttcatgtgctataatttcagtatcgcgttggattcccgctttggaaaggagtccactatgggtaaaagcctaaagcgaaaagaatgcggaaaaggcatacgccaaagaaaggacgggttatattccgcaagatactataccaaagacggggagcggcgagaaaaatatttcaagtcgctgcctgaagccaagaattggcttgccgatacgaaatacgaattgcgtcatcgcgtcattacctgcaactctgacatgtccgtagacaactggtttgactactggatcacgaacatcatctgtaacctttccccgaactgcatccgcaactatacggaacgctataagagaaatgttcagccgctgattggaaccatgtgcatgggcgacgtaaagcctatgcactgccagatcattctgaaccgcatggaaagtacttacgccggttctacaatccgtcagacttacattgctatgggtaccatgttcaaatctgctgtgatgaacgatattatcgtcaaacatccgatgaatggcgtgcgctataacaagccggtccgtgcagtggacgatattcgctacctttccgttgaggaacagaagcgcttccttgccgtagccaaggattctcacaactaccggcaatatgcactgctgctggaaaccgggctgcgcacgggtgaactgattggtttgacttgggatgccatcaactggaaaaagcgtactcttaccgtcaataaaagtttggagtaccgccaccacttcaagtactggcgtgccgggcctcccaaaacggtgaaaagctaccgcactatccccttgaccgataccgcatatcgtattttgaagagctgctatgatgagcgcttgacccgtaaagagtcgcccaccatgcagcagattctggaatacacggaccgccgtaccggaaggcagatgtacttctgcatgcacgatttggtctttgtaaactatcgaaccggtgagccgattaagaacagttcctatgacacccacctctataagctgtgcgaaaaagccggcattgctccctttgggatgcatgcgctgcgccatacgtatgctacccgcgcgattgagcgcggcatgcagcccaaggtcttgcagcagctgctggggcacgccagtatcaagacgacgatggacaaatacgtccatgtttctgatgattcaatgcagaacgccgtgcgtctttttgaggcagctgatatagagaaaaaggggtaaacctcgaaaatgggggtaaaatgggggtaaaacccccaatccggtaacaaaaaacaacgataataaaggagatatggagaaatatgaaattaggtatcgtgggccttcctaatgtaggcaaatccaccctttttaatgcgctgaccagcacacagaacgcacaggcggcgaactatcctttctgcaccattgaaccgaactccggcattgtgccggtgcccgacccgcggctggacaagctggccgagatttgggagactgacaaaaagacgcctgctatcgtggaatttgtcgacattgcaggccttgtcaaaggcgccagccagggcgccggcctgggcaacaagttcctgggccacatccgcgagtgcgacgccatcgtgcacgtggtgcgctgctttgacgacgacaatatcatccatgtggtcgaggacgtgaacaagccagagagcgttgaccccatccgcgacattgacgccatcgacctggagctgattttggccgacctggaggtcgtaagcaaccgtttgggccgccagcagaaagctgccaagaccggcaataaggccgcagccgccgaggctgcctggctggccgacctggctgcctggctggaagccggcaagcccgcccgcagcttcgcctttgacgagagcgacgacgctgtgaaggccacccgcaaggagctgggcctgctctccgccaagccggtcatctacgcctgcaacgtgggtgaggacgacctgctgggcggcctggacgagaacccctactatcccctggtcgccgcccgcgccaaggaggaaaacgcccaggctatccccatctgcgccaagaccgaggaggacatcgccggttccacccaggaggaaaaaatcgcgttcctgcaggaaatgggcattgaatccacgggtctggacaagcttatcaaggccagctacgagctgctgggactcatcagcttcttgaccgatggcaagaaagaatgccgcgcctggaccatcaagcgcggcaccaaggccccccaggcagccggtaagatccacagcgacttcgagcgcggcttcatccgtgcgcaggtcatcgcctacaaggacctggaggacgccgacttcaactacgccgccgtcaaggccaagggcctgcagcgcaccgagggcaaagagtacgttgtcaacgacggcgacgtgatcgagttcctgttcaacgtgtaaaatttggagatacaacgatgattattggcattatgggcgctatgcccgacgaagtggatcagctgtgtgcccagctggctgacgtgaccaaagagaactacgccggggtggagtaccactgcggcaccctgcagggcaagcaggtggtggtgtgctgcgccggtatgggcaaggccaacgccgccagcaccgtgcaggtgctttgcacaaaatataacattgataagttgattttcagcggcattgccggcaatatgacgagcaaaatcggcatcggtgatgtttgcgtgggcgagaccgtggtctaccacgacgccgagctgagcatgatcgcccagagcgccccattccagaccgaataccacggcgaccccgcgctggtacaggccgcgctggatgcctgcgaagcctgcggcgtgaaggccattgcgggcaagatcgccaccggcgacacctttgtaggtgacgcagctacgaagaaaaccatcgaggaaaagtgccaccccgactgcgtggagatggaaggcgctgccgtgagccagattgccggccgcaacggcgtgccctgcgttatcctgcgcgccatgagcgacaacgccgacgagagcgggtatgaggtgctggtggtcaagcagttcagcatcaccgagtacgtcaagactgcgaccgaaattgtgacgcggatgattgagagcgtgtgatttgatgtaaggcgtagtgtaggggcgaacattgttcgcccgcgggcggatatggaatccgcccctacggaatttgcatgccattttccttacgctcgtaggggccgattctatatcggcccgttgtacctgcgtttgccgcgccgttagtgggcgcatactgtgcgcccctacatcaacaacagcattatgctgccggtactgtttatgcagtctacccaacagttgtcctttccataatggtgggtatcaaacatcagtaatcaagcaaagtcttaagcaacaacgcgactggttttgaaatatagcttaacaatgctgataatatgatacagaaaatgaaatatacgatgaatgtaaagattggatgccaagcatatagaattgcacgcggaataattacaataactaatagtacatggtggataagaaaaatacgataactttgctttgaaaaaaggcgtatgaataagcgtatggaatatggaagcttttttaagtattgggcagaaacaccagcaaatagtattataaaaatggcggagaagaaagctatgtattttgtgggtacatataataatgcaaggactccacatatgactccgcagaatacaagttgtttacaattgtacttacgaccgaaaagctgtgaaagcaacatgccaacccaaaacacaaaggcttgtcccaataccatgtgattaccatcgtatggcaaacacaaagaaggcccaataagccaaaatagaaaaagaatagaaccaccaaagaacgtccttttgttaggcgaaacgaaataacgaaaaatagggaacaaaaaatataaaatgagtaaacatcctaaaaaccattcgccaattttataaaacgtagaggtgaactgttgcatgtagccgtcaacccctataatagaaaagatgagtttccattttgggactgaggcattatttccatgcaagacttctccatagacaaataaagaaaaaaatatcacccaaaaatccggataaatcgctaaaattctgccttttacatattcctttagattccacctgttttgccaacggtgggttaagcttgccccagaaagcaaaaagaataaattgatcccaatgcttccccaaaagctaaacatttggagtataaatggagaaaaatggatatatccagctgtatttgattcaataatgaaatggtacacaagtataaatattgcggctaaatctcttgagcaatccaactcaataagatagtttttatcagatgatcctgttcccataattaacctgccgtttcataaagctcataagcagtttcaagagtaatttgtccaaacaatcactttggaagatttcagagaaatcatccgtttcttttttacatttcctacaaaacacaaaaaatcccgcagctggttatagctgcgggaatttttattcttcctcaaactccaagtaccgtttggggtcccagtggcaggcggcggccatgtggtttaacagggtgtcgccgggggtcagagtgtccagcagcaggtcctcggcaatgcggccgttgtgcaaaatcagcgcacggtcgaggaaatggtccacgtcctcgatataatgggtcgagagcatcagcgtttcgccgccggtgagggtggcgctcatcagcttgatgaagtcccgccgtgtaaaggggtccttgcccaaaaacggctcgtccatcaggtagtagggcacccgcttggcaaagcccgcggccagctccacccgggcgcgctggccggtggagagatgcccgatgacgtccgacccgtgcaggctgaaaaactccaaaaacttcgcgtaccgcgcggggtcaaacgccgggtgcaggtcggccagcagctggccgtaggcggccaccgtcagcgcggggtaatagctgccctcgccggtgatgtagctgatgcgcccatactgttcgcccgccggtctgccgtccagcagcgccgtgcccttgtggggcagcagctcggcaatgcagcgcagcatcgtggtttttccggcgccattctcccccaatacgcccacgatctgcccgtccggcacggtgaagtccgcccccagcaggcccacggtctggccatggctgcggtaggtcttttgcagattttttacctcgatcatagctgtctctcccggtctttctcgtaaagttcgtagttcatatagtggcgcgcagaccagctaaggtagtacttgttcagctgcccgccccaatcgcggtcggcgccgttgtccaggcggccgcggtagcgcggggcgctgccatccagtggatagaccagcagcagcgtgccggtctggtagatgttgtagctattttcggcgttggcatcgcccacggtggtgtattcgggcgtggcgatgagcagtgcatcaccggcggtgttcagcacggcgtcctcggcgttgcgcatgtagaggtcaacgctgttcaggtcgatgttgccctctatggagaggcttttgttcaagataaacttgccatcctgcacacgcagggccacaagcgtactgccgtagtcgactttcagcacggcgtcgcggtcggtggtgcggggcagcgcggtcaccgaaaaatcaccgttgtcgccctcgatgcccaggtcgacatggtccacctgctcccccgccgcgttgacgaggtcggcgcaggccttgttcagcgggtcaaggtagacgcagagtgtcaggccgtcgtccatgggcaggccgcagaccacctgtcgggcgttttcggggcagtagaacggttccagcgtgccgaactcggtggtggcgcaaagcacgtcgcggtcgccgactttgccgtcggcaggcagggcagcgatatcgtcatagctgatgggggtggccttgtacagcccggccttgcggtcggcaacggtgtaccgccaggcaaggccctggccgtcgcccagcgagaaaatttgcccggcaatgtagcggtaatcggtgttggtatcccccacttcgtcggagaaatcggccgtgtaatcatagctgacgctggtgcggtccagataggtggtgggcacctcggcgttggcgcttaccgagatgggcgcatccagcaccacatcccgcagggccacgcggagaacatcgctgcccatgctgatttcggccatcacgcggaagtgggacgcggtgctttgcatctgccagttgtcgtcatacacctgtacgcgctgggcggcggcgtttacttcgtcgcgcgtttccggcgttacagcgtaaaaagtcgagtaagatgctccccacgcactgtagcggtaccggtcgtcgctctcgtcggggtcaagggcaaagctggtgtccaggtagccgtcgtgcaggtcccagtaggtgtgggcggtgtcgaagtagctctggccgcgcatcgtgaagccgcgcagggcggcggggtcgcctgccaggtcggtgagggtgatgtccagcgcgctgcgccagcccagcagcacccacagggcaccggcggcgaggatggccgccgatagggtgacagcaatgataaagttacgcagataagtagattttttggttttcgtttctttcatagcaggtcactcccctttcagcaggtttcgcctcggcggatgctgcgcactgcccaccacacggtgaggacggccagcacggcggcgagagccatggcaacgttgcggcttgcagaggtgaacatccacgcggggtgctgctcaacggtcaccaggtagaagcactgccaggcgcacagcagaccgacggcgaacacaggcagcttgcgccagccgcgcacggtatccagcgcggccagcagcagggcggacagggccaggatgcccagcaagatcaccagctgcaaggggcggcgcggcagcaggcgggaaagcaggttgttggcgacgacctgctcgtacaggttggcgggcggcagggccgcgccgtacagcttgcgggccaggtgaacttccagcgcggtgacggggtaaaattcaacgatgtaccacacaaactgccaggcggtaaagacgacctcggcggcggcgatggtgatggccttggccccgaacttttgccccggggtgccgggcagtgtggcccaggtgtacccgctgcgggcgcggcggctgttgtgggtggccagccccgccgccaaaccggtaagcagataaaacccaagataggcaaaaatttgcatggtaacgtaataatgggacgccaaccccatgccggcagcgccttgccagcagatgcgaacgaccaccagcgccagctgctgggcggcgaagatgccccacagcgccagcaggctgcgccgcgccaggcggaagttccacgcggcaagggtgagggtgtgtttcatagcggacctccttgtgttgtgtattattgttgtaatacgcttacggtacaaaaaagttttcgttagtcctcgtcgccccaaaggtcgctgaccagggcgatgacctttttgtagctgagccggttggccttggcctgggtgacgaactgctccaccaggccgcgggtcagttcctcgctgatttgttcccgcagggcgggggtcagtcggacaaagctgccgctgttgccatcggtgacgacatagccttcttcggtcatcaagcggtaggctttttgggcggtgttggggttgatgccggtctgggcggccagctcgcggcggctgggcatggggtcgccgtcctgcacggtgcctagcaggatttggcgtttcaggtactcggcaatttgctggtacaccggcgcgcggtcgtcaaaccggagattgctgaggttgaccaagctgtctcctcctttcctgggaaattgatggtttatgtgtattatatgcgtagtacgccagattgtcaagggggaagtttgaaaattgttgctcacttgaatggctccccttgaggggtgtctccccgctgtgcggggagatgtcgcaaagcgacagaggggcccggccgcgtaagcggtcccgcgtcagcgggtgaggggtggcccatgtgcagagtagttgcatccacacaaatgcggtcggctaaagtagccacccctcagtcaccttcggtgacagctcccctccaggggagcccttaacctgcaaccaattaaaaaatcccgccagccattgcagccagcgggatatacttattttatattttacgtcttaccgttccattttccagtagcttacactgtacggtgccagctcgctgccgccgccgaaatcgtgcggggcgccggtgatcatgtccaccgccataccacagccggcgtcaaagtgggcggtaaaggggttgccgtcggcgttgatggccaccagcacgcgctcgccgtcagcgtaacgctcaaaaatcagctgcttgggctgcaccagtacgttgcggtagctgccatagcacagagcgcggctggccgtgcgggcgtgggccagcgcggtgatccaggcggtcaggtcgttggattcagggcgttccacggcggggcgcagggtggggtcgccgttgcgtttgtcgccctccatcccccactcgctgccgtagtagacggcgggcacgccgggcataccaaacaacaggccgtagaccggctttaagcagtttttatccgtcagaatcgtagcaatgcgcgttacatcgtggttatccacaaagctcagcaggtgcttgccggtgtacaggcaccactgctcgctgccaaactggcggttcaggctgtagctgatctcgtgcatgttgccggtgttgaagctggaatacagccccttgtagcactcgtagttggtcacgctgtggcaggcgtggtcgttcatccagcggttgtagtcgccgtgcagggtctcgcccaccaggacgaaatccggcttgatgctgttggccaggccgcgcagctcgctcaaaaagcccaggtccaggcagtaggccacgtcgaggcgcaggccgtcgatgtcgtagtcccgcacccagttgcgcacagcgtcgaacagataatttttcacgtcaggatgctgtaaattcagcttgaccagctcgttgcagccctcccaggcctcgtaccagaagccgtcgttgtaattggtgttgccgtcaaagctgatgtggaaccaatctttgtaggggctgtcccactttttctcctgcacgtccttgaacgcccaaaagccgcggcccacgtggttgaacacgccgtccagcagcacgcggatgcctgccgcgtgcagggctgcgcaaacctgcttgaggtcgtcgttggtgcccaggcggcagtccaccttgttgtagtcgcgggtgtcgtaaccgtgggcgtcgctctcgaacagggggttgaacagcacgcaggtcgcgcccagcgccttgatgtggtccacccaatccagcacccgcagcaggcgatgctggtcggcctgggatgggtcgccgtcattttgcagcggcgccccgcacaggcccagggggtagatctggtaaattacagcttcatcgtaccacatgttttttctcctattatcgtttattttttgcttgtttcgttggaatgatgcttgccttgcagttgtagaggccgatgcttgcatcggcccattggggggcgtcgaggacgccgccccctgcaaaccaatttgcatgaatctgcttttaatgcaaaaacttcagcttcttcttcaaaatcaacctataataccgggtcagcgcgccgaccgcgcggtcgcagagccagaaggagaggttgccggtggccagcagggcggccagcatgccaacaccgtcggccagcagctcgtccaggatggcagggccgagcagcgcaaagagcagcaggtaaaccagcaccgtggccccgttgaacaccgcaaacttaatgacccaacgcagcagcgtactttttatccgtgccaattgctggcgcagcacaggataatagccgatgacaaacacgtaaaaaaacgccagctccagctccggcaccagcagcacggacaaaatcgacacagtagcgtacaaaagcagggcgtacttggggccgtactcgtccagcacggggatgagcaggaacgcggccagcatcggcgcggcgtaggtgccgatttgcagcgccgcgcccaccagcagcagcacgaccgacagcgcccccagcacaccgcagagggcgattttttggctttcggtcttgcgcatggcggtttctcctttgggattccttgggcgtttggatttgctgtgttcaattatagccgatttgaactaattttgcaagtcattcatttgagaaactgtacaaaatgtgtaaccctgctcccggaaccaggcgatgatgtcaggcagggctttcacggtctggccggtggctttggtgtcgtgcagcagcaccacgcaggtgtcgcggccgtcggcgtcccgccggatattgcgcaaaatttgtgcggcgttggggtggctggcggtggcgtcctcggcgcagacgttccagtcgatccagtgcaggccgcgctcctcagcctgggctttcagccgtttcatgatgccgctgccgccgtatttgtggctgaccgtgttggtgctgccgcccggaaagcgcagccaggtcagggaatcggcgtccacgtaggggctgatggcctggcgcagctgcttgatgtcctgccagaaagcatcggtactgcgatagattttgctgtactggtggctggcgctgtgcagggcgatctggtggcctgcggcggcgatgtcggcaattttatccaggtgcgcttcgttggcatcctgagcacagacaaaaaaggttgctggtacgtgctctttttccagtatatctagaatttccggcgtgtgggcgctggggccgtcgtcaaaggtaaggcagacgattttgggcacggcagtctcccctgttgcggtggccgagacggcggcaaagcaatcgttgggggtggaggtctcggcgtactcggtgtgatacaaaagatgcacaaccgctgccagcaccgccgccagcagccccagcaccagaaaaacgaacagatcttgcggtacagttttcccttttttgttgcggcgcatagtatcccctcccttggtttggtgatgtatatgcgggtggggacgagatgatgctttgcttgcggcagcctataaagaaagacctgccgcaagatggcaggtcttgaaagcaactattaaaatcaaaccttggcttctttaaaagaagaaatccgcttccgccacagccggggcgaaaacagcgccagcatggggtacagctccagccgtcctgccagcatgtcaaagctgagcagcagcttggccggggccgagaagtccgcgaagctgcccatggggccgaccatttcgagaccagggcctacgttgttgaagcaggtcagcaccgctgtaaacgtcgatactatgtcgaatccatccagcgaaagcagcagcaccgacagggtgagcagcagcatgtaaatgttgaagtagttgtgtacgccgcgcagcactttctcgtccaggggcttgccctcaaagcggacggtggtgacggcgtgggtgtgcagcatcttgttcaggtcttgcttggccgcctttaaaaagatgacgacacgcgaaattttaagcccgcccgccgtcgagcccgcgcaagcgccgcagaacatgaggatgcagatgacgatgcgggagtaggtcggccagaggttgaagtccgccgacgcataacccgtggtggtgatgatggacgacacctggaagaacgccgtgcgcagcgccgtgccgacgttgtcgtacaggtgcaggatgttgagggtgatggtgaccgtggagaagcccacaatgccaaggtaggccagcatttcctcggagcagaaggcatcgcggaaacgacgcagcaacaagaaataatagaggttaaagttgatgccgaacagcagcatgaatacaccgatgacgatttcaaagtacgggttattgtacgcccccacgctgagccccttgttgctgaaaccgccggtgcccgccgtgccgaaggtgtggatgagcgagtcgaacagcggcatgccgcctgcgcagagcaggacgacctcgatgaaggtcatggcgaagtagatggcatacaaaatcttcgcactatcgcttaatttgctggaaatcttgcccaccgtcgggccggggatctcggcgcgcatcaggtgcatggcgcggccgtcggtcatgggcagcaccgccatggcaaataccagcacgcccatgccgcccacccagtgggagaagctgcgccagtacagcgtgccgtgactcagggcttccacgtcggtcaggatggtggagccggtggtggtaaagccggagacggtctcgaagaaagcgtcaataaaggacggtatttcgccggaaatcacaaagggcagtgcgccgaaggcactcatcagcacccagaccagcgccacgatggccaggccgtcgcgggcaaagatggtggtgtttttgggggtcttgcggctggtgatgaaccccagcaccgccagcagcgcggcaggcaacaaaaatgcaggcagcagataccactcgccgtagagcatggcgcagatcagcgggaaaagcatcaaacctgcttcgattgcaaagatgcgccccagcacaaaggcaaccattctataattcatgccggcgccctcactttacgatgtcgcgcagggcgtgcagggtggtgtcggtggtaacgatcactacgtcgtcgccctcctgcagggcgtctgcaccggagggaatgaccggcgcaccgttctgccgcacgatgccggccaccagcataccctcgcgcaggttcaaatcttttaacggtacaccgatgaaaggcaggccggggccgacgttgaactccaacgcttcaacgcggccgcccaccaggcggtgcagggtcttgatgttgtcagagtcaaaactattttgcatcgcacgcacataccgggcaatgatttcgctggtgacggcggcggtggaaaccacgctgtctaccaggcctttctcgttggccaggtcggcaaagctggggcggttgatcttggccaccaccttgcagttggcaaactggctggcgtacatggccaggatgatgttcgtttcgtccaggccggtcaggggcacaaaggcgtccatttcgctgatgcgttcctcgctcagcagctcgctgtcggcgccgtcgccgtggatgaccagcgcaccggggaacttctcgctcatggcctggcagcgggcagcgttggaatcgatgacggtcacccgcttctggatgtcctgcaattccttgaccaggtagtaggtgatgcggctggcgccgacgatcataatgttgttggcgcgggccttgaagatgttcagcttgcggaagaagctttccagctcgcgggcgctggcggtcaagtaaatcttgtcgcctttttgcagcaccgtagcgccggtggggatgatggtctgctggccgcgggcgaccgcgcagatcaaaattttaacgcggatgttgcggtacaggtcgctcagctgcagacccaccagggggttgccctcgttgatgcggtactccaccagctcaaaccgctggcggcagaactgctcgcgcttgatggcgctggggaaacgcagcacgcgggcgatctcccgcgcggtggccttctccgggttgacgaccatggaaaggcccagctcctcgcgcataaagtggagctgcttctcgtactccgggttacggatacgcgcaatagtatgcggtgtaccgagcttttttgccacaaggcaggccagaatattggtctcgtcgctggaggtggtggcgatgagcaggtcggcgccatcctcaaaggcgtccttctggatgtcgtagcagccgccgttgcccgccacaccgcggacgtcgtagatgtttacgaggctctcgatcaggtcagagtcctggtcgataacgacaatatcgtgcttttccgccgcgagctgttccgtcaggacgcgcccgaccttgcccgcgcctacaaccacgattctcatagtgtttctccttttgtttcaggcagaagtgggccaaaagtgtatacttccacagtagtaagctcattatagcaaagcggcggaaaaatgcaagcggcagtgggatgtttggcggtttttgtacgaattgggacaggatttgggcgggaaaagcggggtgaaagccggatgtcagcgtgcgccaaggcttgacagcaggcgcggggacgggtataataaggatagaaaaaggcgctgcgacaagcggttggcccttttgcgatgagaggtttagatcaaagacctaagaaccgtcaccggccagggtggcggttcttgctttttactactaaactcagcgtaacggtcttgtgaccgatatggaaagtcaataagcgctatgctgtcattattgtggacgacgtagaataccgccttgcccacccggaagaatggacggattttgagcgtttttgtcaggaagaaaacagacgcttaaacccgcaaatgtaccaataaacaaaaagacacgccacggctcttacagggcttgcgcggcgtgtcgaaatatgatattgtaaatatgccgcttcggcggcaaggcgctgcacaacacggcaggcggttggccacacttcccgagagggggtgagaccatgcgaatcacgatgcacatcggcagttttactgtgacgatcatcattaagaaacgcaaaaaccgccactctgccaagtgacggtttttagggtaacctaaatgcaattactttggat

SEQ ID NO: 7768 - DNA, 28068 bp, Unknown
  gut microbiota DNA sequence
ggcacttagaattatgcggtattgcctttgcttactttcttttcaaagaaagtagggtttcaaagaaagcgggggaaaccaaggttattgtaccccattttgtgccccggtgcaatatgaaataaaatagggacttgtttttaccgctttacagcgctataatggatttaaccatcatccgcgctttgctgtgcggctaagcgcgcctggaaatataagggagagtgcaaatcatgttggatattaaaattgttaaaaccgaacatccgaaacagaaaccgcaggacgagtcgaagctgggcttcggcaagatcttcagcgaccatatgttcgtgatggactataccgccggtgagggctggcacgatgcccgtgtcgtcccctacggtccgtgggaaatggaccctgctaccaccgtgttccactacgcccaggaaattttcgagggcatgaaggcctaccgcaccgccgagggcaagattcagctgttccgccccgactgcaacgctaaccgtttcaacgattctgctgaccgtctgggcatgccccccatcccgccggaggattttgtccaggccgttaagaccctggtcgatgttgaccgcgactgggtgcctcattcggacggtgcttccctgtacatccgcccgttctgcatcgctaccgatgtgggtctgggcgtgcatgctgccaagcattaccgcttcgccatcatcgctgctccctccggcgcatactatgccgagggtctggaccccgtccgcatctacgtcgaagaccagtacatccgtgccgccccgggcctgaccggctttaccaagtgcggcggcaactacgctgcttccatcaaggccggcgagctggccgaggagcgcggcttcagccaggtgctgtggctggacggcgttgagaagaagtacgtcgaggaagtcggctccatgaacatcatgttcaagatcgacggcgagatctacaccgcaccctgcgtaggcaccgttctgcccggcgttacccgtcgttccatcatcgagctgctgaaggattggggctacaaggtacacgaggagcgtgttgccattgctgacatcatgaaggctgccgacgagggcaagctggaagaggtctttggcaccggcacggctgctgtcgtttcccccgtcaaggagctggattgggagggcaagactgcccatatcagcggcggcaagatcggcgagctgacccagaagctgtatgacaccctgaccggtatccagtggggcaaactgcccgacaccaagggctggacggttcccgttgatgcccagtaaccttttataaaccctataaaccgcatgttttttgccccggcgcattttgaacgcgccggggctttttgtatggcttttgagttgatgattgtgcaattttaacaaaatgcagtgtaacatttattgcaggttgtataaatccgcatcttgcaatctcgacaaaaatagtgtaatatttaggcatcgaaagcaaagagcgcttgaggcgctgcaaagctttcccaataggtaaaagaggaagaataccagagcgccctgccgattcccaaggaacggcatccacttgtagaggggtggtttccattcgatgcaggcgccggcaagacgttctgtttttctccttctttttaaagaaaacgagacggggcagtggccgtctcgtttttgtttttattcttgttttttccccgtaagcgtgctaccgtaagcgtgctatatttataaaaagtagggctgtttcctgctaaggaatgtatattcatcgttttttctgtataaaacgtgctttttactgtatattatgcctaaaaaagcagaaaaattagaaaatcctttgtggattttaccgcttgcaattcttgtataaagttgtataatatgcagtatcagatgaataaatattcacgacggcggcaagcaacattccgggcgtcctgaacaaatatgattgggagaggtaagaatcatgaaaaagagcaaacaagacatcaaaaaagtcgttctggcatactccggcggtctggatacttccatcatcattccctggctgaaagaaaactataacaactgcgaagtcgttgccgtttccggcgatgtcggccagggcaccgaactggacggtctggaggagaaggccctcaagacaggcgcttccaagctgtatgttctggacctgaagaaggattatgtggaaaactacatctggccctgcctgaaggctgacgccaagtatgaggattacctgctgggcacctcccatgcacgtccctgcatcgccgctgctctggctgacatcgccaagaaagagcatgccgacgccatctgccacggctgcaccggtaagggcaacgatcaggtccgttttgaactgaccctcaaggccctggcccccgaaatggccatcatcgccccttggcgtgagtggaacatcaagagccgtgatgaggaaatcgattacgccgaagcccacaacatccccctgaagattaaccgtgagaccaactactccaaggacaagaacctgtggcatctgagccatgagggcctggatctggagaagccctctctggagccccagtacaacaagcccggcttcctggaactgggcgtctccccggagcaggcccccgataagccgacctacgtcaagattcactttgaaaagggcattcccaccgctgttgacgggcaggagatggatggtgtggccctgattgagtacctgaacaagttgggcggcgccaacggcatcggcctgctggacatcgttgagaaccgtctggtcggcatgaagagccgcggtgtgtatgagacccccggcggtgccatcctgtacaaggcccacaatgtgctggagaccatcaccattgacaaagaggctttccacttcaaggagagcattgcccagaagatgggcgaactggtctacaacggccagtggttcaccccgctgcgtgaggccctgagtgccttcaccgacgacctgcagaaaactgttaccggcgatgttaccctgaagctgtacaagggcaacatgatcaatgccggtgtcaccagcccgtacaccctgtacgatgagcagaccgcttccttcggcgaggatgacgattacaaccaggccgatgcgaacgggttcatcaacctgtttggcctgcccattgcagagcgtgccaagctggcccagaactggcccgctcaggactaatctgtccaacgctataagcaccgccaggagggcacgcgcccccttggcggttttctatacactgtgcgtgccgggcggctgcaccgccccgcatgcacgctataacaaacaaaacagaattggaggaaccgtatgccgcaactttggcagggccgtgcaagcaaggccgtagacagccgcgtaaacgactttaactcatccatccgctttgatgcgcggatgattgagcaggatatccagggcagcctggtacactcagccatgctgggccgtcagggcattatctcccagcaggatgttgacgatattcacaaggggctgcactccattctggaggatctgcacagcggcgcactggaaattgaccccaacgccgaggatgtacacacctttgtagagcagaccctgactgcccgcgtgggtgatgcaggcaagcggctgcacaccggccgcagccgcaacgaccaggtggcgctggacatccgcctgaatctgcgggaagccagcaagcatatccaaggccagattaaagaactgattaccgtgctgtgtgaccaggccgaaaaaggggccggttacgtcatgcccggctatactcatctgcagcgtgcccagcccgttactttcggccaccagctgatggcttacgcctggatgctgctacgtgacttggggagactgcaggatgccaccgcccgtatggacgccgagtgcccgctggggtccggcgcactggcgggcaccacctacccgctggaccgcttttatacggccgagcagctgggctttgccgccccctgcgggaactccatcgatggtgtatcggaccgcgacttctgcattgagctgtgcagtgccatggccacctgcatgatgcacctttcccgcctgagcgaggaaattattttgtggtgcagctgggagttcaagttcattgagctggacgacgcctttaccaccggctcgtccatcatgccccagaagaagaaccccgacgtcaccgagctgatccgcggtaagaccggccgcgtctacggcgacctgaacacgctgctggtcatgatgaagggcatccccctggcctacgataaggatatgcaggaggataaagaggccatttttgacgcgacagatacgctggagttgtgcctgcgcaccgtaaccccgatgctggccacaatgactccgctgcccgccaatatgcgccgcgccgctgctaagggctttatcaacgctaccgactgcgccgactatctgaccaagaagggcatgcccttccgcgatgcctacaagtgcaccggcacgatggtagccgcctgcatccgcgagggcaagacgctggaggaactgacgctggacgaattcaagcagtacagcgacctatttgcggaggacgtgtataccgccattgacctgactacctgttgcgagggccgcaccagctacggcggccccaccaaggccagcgtgctgaagcagatcgaattggtaaaagagaaacttgcctaaagggatatttgcggctctgtagggggcgatgcttgcatcgacccgcgggcggatgcaagcatccgcccctacaaactgtgtgcttgcctacatgataggggtgtaaaaatgggaaagtataaaatctttgttgacggcagttccggtacaaccgggctgcgcattgcggaccgtttggccgaacggtcggagttcacgattctgcatatttccgaggccgaacgcaaggacgtacacgcccgcgcggcggtgatcaatgagagtgacctctctttcctctgcctgccggacgatgccgcccgcgaggtggtgccgctgctgcggcccgatgtccgcgtgctggatacctccaccgcacaccgcacggctcccggctggacctatggtctgccggaactgcacgatacccgcaaggcgctgaaaaccgccacccgcgtagccgtgcccggctgccacgccaccggctttattgctccggtggccccgctggtggaactgggcctggtgcccaagaccgcgctgctgcactgcaccagcctgaccggctactctggcggcggcaaaaagatgattgcccagtatgaaaccgagcgtaccgaccccgcgctgaacgcgccccgcccctacgggctggcgctgcaccacaagcacctgccggagatggccgccatcaccggcctgactaccccgccgactttcgtgccggtggtggccgattactacgccggtatggagacgatggtcccactggatctgcccgctctgggcctgaccgcccagcaggtggccggtgccctggccgactattacgcagggcaaaagatgatctcggtccatccgctgaacgagggtaccgacggtggcttcctggctgccaataagctggccgggctggaccggctggagatcttctgcctggcgaaccccgacggcacccagatggagctcatcagcctgttcgataacctgggcaaaggctcctcgggcgcggctgtgcaatgtatgaatctgatgctgggcctggacgagaccgccggtctggtactgtaaaaagaatagggtaaacgaaaagggtaattagagaattagagggagacgattatggaaaacttcaagctgatccccggcggcatctgtgcacccgccggtttctccgccgccggtgtgcattgcggcatccggcataaccattccaagctggacctggcacttatcaaggcggacgtccgctgcgccggtgccggctgctacaccaccaacaaggtctacggtgcgcccatcacggtggatcgcgagcatctaaaggacggctacgcccaggctatcgtggtcaacagcggcaacgctaatacctgcgcccccaacggcattgagttggccaaggagacctgcgagatcgtcgccaaggagctgggcatcagcgccgacgacgtgctgccctcctccaccggcgtcatcggccaggccatgagcattgagccgttcgccaagggcatccccgaggccgccgccaagctggccgccaccgaggctggcagccacgacgctgccaccgccattatgaccaccgacacccattctaaagaggtgtccatcgaattcaccatcggcggcaagacctgccgcatgggcgccatcgccaagggctccggcatgatccaccccaacatggccaccatgctgctcttcatcaccaccgacgccaaggtcgagcccgctgtgctgcaggctgccctgtccagtgtggtgcccgccaccttcaaccagatctctgtggacggcgacacctccaccaacgacaccgtgctgctgctggccagcggcctgtccggcgccgaggtccagcccggcaccgctgactatgacacctttgttgcagccctgacccaggtagccgagcaactcagccgtgaactggccggtgacggcgaaggcgctaccaagctgctggagtgcatcgtgaccggcgcgcccgatctgctgaccgcccgcgctgtctccaagagcgtcatccactctgccctgttcaaggccgccatgtttggtgaggatgccaactggggccgtgtgctctgcgccatcggctacacccccggcgacttcgacatcagcaagacggccgttcgcctcaagagcaaggccggtgaggtctttgtctgcgagaacgccgcctaccacccctacagcgaggacgaggccgccaaagtgctgaaagaggacgagatccagatcctggtcgacctgggcagcggcgactttaccgctaaggcctggggctgcgacctgacctacgattacgtaaagatcaacggcgactaccgcacctgatacaggccggggacgggggagaatgcgcaatgaaaaatgaagagatggcgctgcttttcagcgaagctacgccctatatccaaaaataccacggcaaaacacttgtcatcaagtacggcggcaacgctatggtcaacgatgagctgaaactggccgtcatgaacgacctggtcaccctgaccctgctgggcgtgcgggtggtgctggtccacggcggcggcccggccatcaacaagatgctggcccgcgtgggcaaggagtccaagtttgtgggcggcctgcgctacaccgatgaggagaccatgggcatcgtacagcaggtgctggcgggccaggtcaacaaggacctcgtcgccctgctgaaaggccgcggcgttggcctgtgcggcatggacggccacaccatcacctgcagccgcaagtccgatgtggacctgggctatgtgggcgagatcgaaaaggtggataccacgctgatcgagcatctgctggccgacagcttcatcccggtcattgccaccgtcggcatggacgacaacggcatcccctacaacatcaacgccgacacggctgcggcggagattgccatcgccctgcatgcagaaaaactcgtcagcatgacggatattgtcggtctgctctatgacaagaacgatgaatccaccctgatccccgaggtcgaagtctccgagatcgagggctacaaggcggccggtgtcattgccggcggcatgctgcctaagatcgaaggtatggccgacgccatctatcaaggcgtacacgaggccgttatcatcgatggccgtgtgccccattccatcctgctggaaatgttcagtgaccgcggcgccggtaccatgttctaccgccgcggcaaccattaaggagggtacgccatgcaaaccgaaaaagtcatcaaacgcgataacaagtacgttttgcacacctacgcccgcagccgggtcgtgctggccgagggccacggcatgaccgccgccgaccccgagggcaagcgctatctggatttcacctccggcatcggcgtcaactcgctgggctactgtcaccctgcctgggtgcaggccgtctgcggccaggccgccaccctgcagcacacctccaacctgtactacacggccccctgcggcaagctggctaaaaagctatgctgccgcaccggcatggatgccgttttctttggcaactccggtgccgaggccaacgagggcgccatcaaggccgcccgcaaatattctactgatacttatggtgctgcccgcaacaaggtcatcacgctggtaaactctttccacggccgcacgctggccaccctgaccgccaccggccaggatgtgttccaccagtatttcggaccgttccccgacaactttgcctatgtacccgccggtgatttttccgccctgcgggatgctgccgacgacaccgtctgcgccgtcatgctggagttggtccagggagaaggcggcgtggtggcgctggatgccgactacgtggccaaggtggccgagttctgcaaaaagcgcgacctggtgctcatcgtggacgaggtacagaccggcgtaggccgcaccggcaagttcctggcctgtgagcattttgacctgcacccggacatcgtcacgctggccaagggcctgggcggcggcctgcccatcggcgccgtgctgatgaccgccaaggttgccgagcatatgggtcccggcacccacggttccactttcggcggcaacccggtggtctgcgccggtgcgctggccgtgctggatgccatggacgaagcctttatggataacgtgctgacccaggccgcccgcctgcgcacgggcctcaagaccctgccccatgttaccgaggtcagcggcctgggcctgatggtaggcatcgcctttgaggacggcatcaaggccgccgatgtccgcgccgcctgcgagaaagagggcctgctggtgctgacggccaagacccgcctgcgcctgctgccgccgctgattttgaccgagaccgatgttgacaccgcgctggacaccctgcgtactgttctggagaagttctgatgaaacatctgttgaaattgagcgccctgacccccaaagagatcctgcacattctggatgtagccgacgagtacaagcgcctgcacaaacagggcgtcgaccccaaggacctgcagggcaaggcggtggcgctgatctttgccaaaaactccacccgcacccgcaccagtttagaggtgggtatctaccagatgggcggcctgggcacctacctgagcgccaacgacctgcagaccgcccgcggcgagcctgtgcaggacaccgcccgcgccctgggccggtactatgatgccatcgtctgccgcacctacaagcagaccacgctggacgccatggcccagtacagcggcgtgccggtgatctccggcatgacggattacgcccacccgctgcaagtcttgaccgacctgatgaccgtgcgggaacgcaagggcaggctggccgggctgcgcgccgggttcatcggtgatggctataacatggccaacagcatgatcgtgggttgcctggccgtgggcatgacggtgacggtggcctgcccgtcccactaccgccccgctgccgatgtgctgatgctggcgaaaacctacggtgataagttcaagctggtcaccgatccggacgaggccgcccgcgatgccgatgtgctgttcaccgatgtgtgggtcagtatgggcatggagcgcgaggtggagcagcgccgccgggatttccacgggtttacgctggatgccgcccgcatggcgctggccaagccggactgcatgatccagcatccgctgcccgcccaccgcggcgaggagatcaccgccgaagttctggaagcccacgccaacgaaattttcgatgaagccgagaaccgcatctacgtagagaaggctgtgctggcgattttactggccgggaaataagctgatcttctttctttgaaaagaaagaagcaaagaaactttcaataaaaataaataagttatcaacaaaacggccctgccaagtggaaaaccaccggcagggccgttttatattttccttatatcttctttacggcgagccaaattaaagtttctttggtaactttcttttcctaaggcaataccgcataattctaagtgccgatacggcgagcgaggtgcggcagctgctaagccaaaagcgcagataatactttgtgtattatcgagcattttggcaacgcaggtgccgtgccgcagccgccggagcggtgcttaagccgtcaggcgggaattgtgcggtattgccctaagaaagttacgcgcaaatcttttcaaagcgctgggcgaggttgcgggagaagcagaggaccatgcccatcacagcgccgatgccagcctgcaaaatttcaaacggcagcttgatgatggcgtactccggcgtgctgtagacaaaggcacggcccagcgtgtagccaatgaccatgataatagcccccagcaccacgccgatgcccgcgcccagggcctttttctctttgaacaggttgtgggcgcatagcgaaacaacgacagcctccagaccatgggacgccagtgagacgaacatcggcgcagggtagaagaagaaatcccccaggaacgcgccgacaccgcccacgataaacgcgcccagcgggtccagcaggatggccgccgtgcagatgacgatgtcgttcaggtagagatgcccgcccggcaccgggatgctgaaggagctgagtaccacattcatggccatcagcaccgctaccatcgttagccacagtacaggcttctttttgatcaggttgtatccgttcattttcctatatcccctctcgttttgtggtataggcacatcatacgccttttactggcaccatcaaagcgccaaattatatcttttttataggaccagtttggcgaattgcgtgcaaaaaaggcacctccgtttttggggatgccttgggataggttcttagttcagtttcagatacttgcgcaccggcagggtgacggcactggccaccacgccgcagatcagccactcgatgacggcctgcacgcccaccagcagcacaatgaacataaaggcgttggtagcgcccagggtctgagccaggttctgcacgtaatcgcagttataaaagaacagtaccaggaagcccatgaagaacacagtgttcagcaccggggtgcagatggcaccaatgacgcagcagagcttttcctttttcggcatggccttgcgcagggcgttgaagatcagcgcagcgcacaggccttccagcacacgggctacaaagctgaccacgaaggcgccgaaggggttgacgctgaacagcgcagcgcccatggcgcttttgccctcgaccatctggataaagctggtggcaccaaaaattccacccaggatggcaccggccagggggcccatcgtcatagcgccgatggccaccggtactgtcagcagcgaagccgacagcggcccgagctgcagatagcccagcggggtgtagttcatcaccagcaaaatggccgccagcagtgcaagctgggtcagccaacggacgttggtacggtttttcatattcaattttcctcctgctgccgtctcctacatctcgggagtacagcgcaaatgtacgggccgggcggcccgccgtgcaacagtataccgcaaaagtcctttgtttacaagggttttgggggcagcctgataaatttttgaccgctttttgacttttttaggccgctatgttatactggtggcactttgtatgtgaggtggctatgcagtcattcaaaaaaattgtttccgctttcacgctgaaacggctgttctggctggtgctgggcacggccattttgtccttcggcatccacaacatccaccagcgcgccgccattaccgagggcggcgtcatcggcttggtgctgctgatgaaccactggctgggtatcccggcatctatcgcctcgccgctgctggattttatttgctatgcgctggcgttcaagttcctggggctggatttcatcctgactgccgccgtggccagcgtgagtctggccgggttctaccgcctgtgggagagtttcccgcccatgctgcccgacatgacgccctggccgctggcagcggcgctgctgggcggtgtgtttgtgggcatcggcgtggggatcatcgtgcggcagggcggctccagcggcggcgacgatgccctggcgctggtcatccaccaactgaccgggtggaagctggcgcggtcgtacctgtttaccgatctggtcgtgctgggcgcatcgctctcttacatcccggcgcggcgcattgcgttttcgctggtgacggtaacggtctccagcctgctcatcgattgggtgcaggggttaggccatgatgaaaaaatccatggcaatgacgccgcaaaagagattgaatagtggcataccataaattgatttagggaggtcctctaccatgtatcaagctgaccaaagccgttacactgtcctgccctaccgccgctgcggcagcagcggactgctgctgcctgccgtctcgctggggttgtggcacaattttggtgatactgcgccctacgagaacatgcgggcgctctgccgtaccgcctttgaccacggcatcacccactttgacctggccaacaactacggcccggaaccgggcgcggccgagaccaactttggcaaaattttgcgggacgacctgatgccctaccgcgacgagctgatcatctccaccaaggcgggatacacgatgtgggacggcccctacggcgattggggcagccgcaagtacctgctggccagcctggatcaaagcctgcgccgcatggggctggactacgtggatattttctaccaccaccgtatggaccccaagaccccgttggaggagacgatgggcgcactggcccaggctgtgcgcagcggcaaggcactgtatgcaggcctgtccaattatgacggccccacgctggaaaaggccgccgccattctggacgagctgcatgtgccgtttgtcatcaaccagaatcgctactccatcctggaccgcacggtggagaaaaacggcctgaaagagactgccgccaagctgggcaagggcattatcaccttcagcccgctggcccagggccgcctgaccgaccgctacctgcatggcatcccggctgacagccgcgtgcataccgacggccgctttttaaaggaaagcgacctgacgcccgaactgctcgaccgcattgccaagctgaacgacctggccgctgcccgcggccagacgttggccgagatggcgctggcctggctgctggcaaaagaggagatcaccagcgtgctggtcggcgcctcccgcccgagccagatcttggacaacatcaaggccgtggaaaacaccggttttaccgctgaggaactggcggagatcgaccggctgagcgtgtgagaaggataaggcaacaaaaaagcgcagcttcggccaatgccgcttaattagcgccaaaaagaaacagaaaccaacccgcagaattacccaccaaagattctgcgggccgggcaatcatttgacaggaattgtacatggtgagctttgcaaagaagccgcccattctgcgtctgttgtcaaatatttagaagaacaaatccctctataccacttcttgcgttggtatagagggatttgtttgtttaactgagtgacattgctcccggcggaggcctttttgcgtgtccccatcttgcggcgcattgcaaagcctgttataataaaagatgagtgtaaaacagacgaaaggcagtacaaacatgcagtttacggaacttacccgcgttgcgcccgagatcctgcaggctacgcaggccatgggctttaccgaaatgaccgagatccaggagaaggccatcccgctgatgctggacggccacgatatgattgccaaggcccccaccggcaccggcaaaaccgtggcattcggcatccccatcctgtccaaggtggaccccgccagcctgaagccccaggctgtcatcctgagccccacccgcgagctggcccagcagatcgcccaggacctgcaaaacctggcgcagttcctgccggacatcaagatcgtctgcgtatacggcggcgccgggctggacaagcagcagcgccagttgaaagcaggctgccagatcgtagtcgccacccccggccgcctgatggaccactatcgccaccacgccatcgatgtttcccacgtggagaccatcgtgctggacgaggccgacgagatgctgaacatgggcttctacaaggatgtcaagcagatcatcgacacaatgaagaaccgcaagagcctttcgatgttctcggccaccatcagccgcgaggtgctggacatcggctggctgtaccagcacaacgccgccgaggtcagcgtacagccggtggaagactccagcccgaaaattgcccaatataaactgctgaccaccggccgcgacaagctggccgacgccgcgcagatcatcatcagcgaggggtacaagcgggtgatgatcttctgcaacaccaagtacaacaccggcatgctggccaaccagctggcgcgcctgaactttaacgtggactgcctgcatggcgacctgtcccaggcagagcgcaaccgcattatgacgcggttcaaggccggtgagatcagcgtgctggtggccaccgacgtggccgcccgtggcattgatgtttcggacgtggacgccgtcatcaactacgacgtgcctgaggaaaacgagcactacacccaccgcattggccgcacgggccgcgcccgcaagcagggcgcaagctacctgttctacaccaaagacgagcagaagcgcgtagaccagctgctgcgcctgacccgcaacaccgacgactgcaagagcgtgaagtttgatttcaaccatgagaagctggtggttgaggaggctgccccggcagataagttccagattaagtgctacttttaatttttgatttataagttcatgctgccaagggggaccaccatgcggtccctcttttttattacggcatcttgccgttaaaaaaggccctgccgcaaggttggcagggccggtcaggctgcatattaaaaccaacaaaacaaaccgcagcgttagctatgattctcccacaaattgccgggtacctcccgccaatcggtcaggtcgtagttttcctttaaataggcgcccaggtagtccgccattttggtggcgccgcttacgttcaggtggtgcgggtcgcagaaatccgtctcggcgctgatgccggcgtcctccatgtgctcaaacatgctgaggtagccgcagttgtgctcctcgcaatattcctgcagcacgttgaaatactggtactcctcggtggaccagggggccacccagaacaccacctggcagcctttttcctgcagggctgccaccatgtcgtccatcagctccagagagcgatctccgatgacccaatcctccatctcggtccaatccttgacgtcggccacgaacacgccgtcgcgggggtagaagcccatcgtgtccataaaatcgatactgttagacgtcctgccgaagcttaccgccgtcagggcgtttttattttcatgataggccaccagcgggaaatagtaggaaatgtaccgctctatatgattttcaaagcacattttcaggtaggcacgcttgtatttcgactccgggatgggcgtggtgtagtagatctcgccgtccatgtcggtgtcaaactcgttgctgttgatgtgcatgccctcgatcagcgccaccttgggcgtctgggtcgccagcgagtcgtggacaaacagccaggtggtgtccaggtgctgccaattggcggcgtaattgtaggcaccgatgccgtacttgtcgtacatctcgtcgacgttcacgttgcgccaggcatggctggaaccgtaaacgatgacgtcgatggaattttccggcagtttgtggaagttttccacgttggcgatggccacatcgtcgcccaggggccgggtcagatgccccagcgccagcacaccgacgaagatgagcaccacgcagagcaggatcgctgccaattttttagccatactttctgctcccctcccttaaaactgcgaatagatgaaattggatgcctcgaagccggggccgtaaacacccagcagcagcaccgtcagcacgcccagcgccaccacggccacctgacagagccagtgctgcttttcgatgacagagcgcacttttatccgcctgtacttgcagacatcggcggcaaagatgaccagcacatagatgcccagcagcgcaaagttaaaggcgtcgatgccgcaggcaaagattgaaccatcggtgaagatctcaaagttatgtacggtcagcatgctgatgaagatgcgtaccgcatccatcaggcggtaagcgcggaagaacaccatcgtggagctgaacagcacaaaagtgaccaccacccgcagcagcttgtgggggcgggacttggggtcgatgtgcagcgcgcgcaccactgccgtgcgcagcggcatcagcgccgcgccgatgacctggtacagaccgttcagcaggccccaggccatatagttccactgggcgccgtgccacaggccgctgacggcaaaggtgaccagcacgtttaaatatttgcgcagcgtgctcttgcggttgccgcccagggggatgtagagataatcccggaaccaggtggacagcgaaatatgccaccgccgccagaattcagcgatagattgcgaaaaatagggcgcattgaagttgtcgatgaggtcgatgcccaagatcttggccgtgcccatagccatgaccgagcagccgccgaaatcgccgtagagctgcaggcagaacagcagcgtggccacgatgtagaaccagccctcgtactcgctttctggtgcatagactgccgccacaaacagcgcggcgcggtccgccaccacgattttaaggaagtaaccccagatcagcagcagcacaccgtcccgcagatcgtcaaaggcggggcgcttggccgccgaaagctggggcaaaagcctgttgccccggctgatggggccggagaccatctgtgggaagaaaccgacaaacaacgcaaaatccagcagattatgctcggccttttcgccccggtaggtatccaccaggtagcccacagtttgcagcgtgtaaaaggagatacccatgggcagcaggaagtcgaacgcaggcggagcgatctgcacgcccagatgtgccagcaccgacagcacggatttggtgagaaagcccagatatttgaacccgatcagcggggccagagccagcaggatgcccgccgccagcacacccttgcggggcttgccctccagtaggcggccgccgagatagcccacggcggtgacgaacgccagtaccgggacatgggccgggttccagcagaaatagaagaaatagcaggccagcagcagccagggccgccgggccttttggggcaccgcaaaataccccagcgccgccagcggcagaaacaacaaaaattgtgccgaattgaaaaccatagatactcctcaagtaaccttttttggctccctctgggagggagctggctgcgcgaagcgcagactgaggaagagaccatctgtttagctgctgctaatttctttgcctctcctccacccgcttcgcgggattgcttacgcaaccggttcctctgtcgctgcgcgacatctccccacggtgtggggagttaccctcgcagagggggccatttgcagcggcatgctgcttttttacccgtaaatttccgcaaccggggtcagccaaaggatgcaatcctcgttggaatagcattccagcgtcagggtgtcgccctcggtcaagggcaggctgtggaaaacgaccgtgccgttgaacccgtccccgccgtaataggtcaggtggtacgagccttgtgtatcccagcccaggaagccgctgccctggttccagttcacgtcatacacacccgccgggatctcctgccccacagtgtaggcttgaatgtcatctccccaggcgcacagctcgaaagactcgcccgccgggtttccctggggttcagcctgggtgtccagctgggcgttgccgctttccagcgtcagggtgccgctgccctccacccacagggtgccgcctgccgccagctgcacgttggtcagcaccagttcgggctccccgccttcggggcagctgagcatggtggtctggtaccagcggtcgtgggcttcgtcgtcgtgggtcatcgtcagcgagctgccgtcatcgggggtgatggtgtaaacgccctcggggatctgctggccgatggtgtagtagcccggctccagaatgcagccaaagccgccgcccgcagtgggcaggccccagtccactccctcgtaggggttgacgccggtcatatcctcggcgggggcttcggcatggatgcttgcttcgggcgcttcggtttccgcatagctgctgcgtccgcccaggtccgccaaactgtaaaatactcgctcggacaggttgaacagcataggcagcagcgccagaccaaagatgatgagcgtgaccagccagccgccgcgccgcttgtcccgggccggacggcgcgtctggttcagctgccgggccggggcatgtaggtgggggcgtgcgccttccaggtcgatgcggtcctgctcgtcctcggcatcgcaggtatagacggggtccttgcctgcggcgctgcgcacgcggtgcagcacttcctcgccgttgacgttatgggtgtgggcggtttcactgcgcagggtgtagtgcggtttttccgggtacggcataccgcaatccacgcaccgatggttcacgattttgccgccgcataagctgcacttttccataggggcacctcctagcataaaaatttacattttatattatagtagatgtaaacacagatgtaaacgaaaaaaagccagaagaaacgcgaaatctggcatttcctctggcaaaaaatcgaaatttttcaatatccgttggcggcacgtttggcggcagtcttgcggtgcaaggcgcgggacataatggccatcagcactagcgcggccagcagataccatgggtacaggctgatgctgatatactgcgccagcagcccgaacagcggcgggaacaccacattgcccacataggcggcggccatctgcacgccggtcagggccatgcttaagttgcggccgaaattcaacggagtttcgtggataatgctgggataaataggcgcacagcccaggcccaccgtaaccagcccagtcaccagcgcagcgctgcccagcggcagcagaatgggcaagatgcccagcgccaccagcacaaaccccaggttgatcatctggtggtcgttgagtttcatagcgataaaaccgcttaaaaaccgccccaccgtgatgcccacgtaaaacaggctggcccagctggcggcagtaccagcgtcgataccgcgctgaagcgtgcaatagctggacgcccacatgcctgccgtagtctcgaccaccgagtagcaggcgaacatcgccatgacctcgggcacgccgggcacccgcatcagctggggcagggtgcggtgctcgcgggcgatttcctcgccggtctcctcgcccggttttttccacagcggcaggctgaaaatgatgatggccgtcagcaccacctgcagcacagaaataatgcggtagccgctctgccaaccgctgtgggccagcgcccagcccataatgaccggcccgccgctggcgcccaggccccacatgcagtgcagccagctcatgtggcggctctcgtaatgcagggcaacgtagttgttgagggcggcatctacgctgcccgcgcccaggccgtagggcacggcccacagacaaagctgccagaacgccgtgcaggtggaaaagccaaacagcgctgcggccgtcgtgcccacgctgatggccgtgaccctgccggggccaagccgggcggtaagggcgtcgctggccaggctggacactactgtaccggcggagatgatcatggagatcatgcccgcccaggacaggcccgcgcccaagcccaggtacatgctgggccaggccgcacccagcagggcatccggcaggcccaggctgataaaagctaaataaattacgggtaaaagcagggataccataaaattttctccttgacaggcgtttttacttgccctatgattatatcatcaaagttgacggatgtatcgtattatttcgccgaataggcaggattatttcgccaaaaaaggaggatttgccatggccttgtccgcctgcaataccgagacagattccgctgggcgggaactgaccgtccacggtaccgcggcgtttcccatcgcctgctaccacgacgatctggaagccgcccccgtaccctggcactggcatgaggagctggaactgctgattgccagcgagggcggcgtgctggccgctgcagccggggaaaagtacacgctggccgagggggacggcttgttcatcaatgccggggtgctgcatgccgactggccgctggccgtcgggcgctgccggctgcacagcgtggtattccatccccggctggtgggcggcagcccggacagcgtgttttggcaaaaatatctgcagccgctgctgaccgaccccagccgcccctgcgccgtgctgcgccgcagcgtggattggcagcgggaagccatgggctgcatggagcgggcgttccgtgccgtggtcaacgagataccggggtacgagttcaagacgcgggctgcgctttccgagatgatgtatctgctggttacccgcgcccccgccacgcgcgccgtgcccaaaaaggcgctgcgcagcgccgaccgcattaaaacgatgctgcaatttgtgcagacccactacgccgaggacctgaccgtggagcagatcgctgccagcgcgtccatcagccccagcgagtgcctgcggtgcttccatgatatgatcggcaccacgcccaaccagtacctgcgcggccagcgcctgcagcgcgccgccgagctgctgtgcggcaccaccctgcaggtgaccgccatcgccgcccaatgcggcttcgaggattccagctattttgcccgttccttccggcagttgtatggatgcgggccgacagagtttcggcgcagaacgttgagagcggggcaataaaaaagggataaggcaataccgcataattctaagtgccgatacggcgagcgaggtgcggtagctgctaagccaaaagcgcagataatactttgtgctgcaaaggtgagcgccgccggtggcggatacagcgaaccgaagcaggggcagcggtcgcagagtgcgaggggcttttgtccccgaagcacgatgcgggtaccgcaacccgacattatcgagcattttggcaacgcagatgccgtgccgcagccgccggagcggtgcttaagccgttaggcgggaattgtgcggtgttgccataagcatcctcccgcgcctggcgcattggcaaagcgtcccttacttgctaaagtgcaaaaactatgttatactaacctagcacttcagtaggctaaaggggaaaatgatgaaaacactccgctacgcgtttgcgcgtaccttgcccattatggcgggttacctcgtgctggggctgggttttggcgtgctgctgcaaagcaaggggtatggcgtgggctggtccctggccatgagcaccctgatctacgcgggcagcatgcagtacgttaccatagatctattagcaggcggcgcatcgctcatctcggcggcgctgatgaccctgatggtcaatgcccgccacctgttttacggtatttcgatgctgcagcgctataaaaacaccggcgcagcaaagccgtacctgatttttgccctcaccgacgagacgtattcggtagtatgcagtggcgatgtgcccgagggcgtggaccagaaccgttactatctgtttgcttcgctgttcgaccaaatttattgggtggcgggcagcgtgaccggcacgctgctgggcagcatcatcccctttgataccacaggcatcgacttttcgatgaccgcgctgttccttgtggtcatggtggagcagtggtgcgccggcaaggatcacacccccgcgctggtggggctgggggtttcactgatctgcctggtcattttcggcagcagcaacttcctgatcccgtccatgctgggcatcacggcggcactgacactgctgcgcggccccatggaaaaatgtgcgcaaaaggaggaagccgcccatgtcgattgatcttcacggtatggcgttagtggccgtggtggctgctgtcacgatgctgattcggtttctgccgtttctggcgtttggcggcgggcggcccacgccccggttcatcacctacctggccggggtgctgccctgcgccattatggctatgctggtggtctactgcctgcggggcgtggacttactcggccccacccacggcctgccggaactgatcgccgccgccgcggtggtgggtttgcattgctggaaaaagaataccttattaagtattgccgccgggacggcactgtatatggtgctggtgcaggtggtgtttgttctgtaggggcggatgcttgcatcgacccctacaaacatgcacaataacaataaaaagcgagtacccgaaagaaaacgggtactcgctatttttgtataaattaccgttcttccagcggcaggtaatccagcggctggccgacgtacttgtacgcggggcggatgatgcggttggcgaactccacctcttccacgcggtgggcacaccagccgggtacacgggcaatggcgaacagcggggtgaacagatcctcgctgatgcccagcatgcggtagatcaggccgctgaacaggtccacattggcacagacctttttggggccgtgcttttcctcggcaaatacctggggggccaggcgctcgatgctgcacagcatctcgtactcctcgtcgtagccttttttgtaggccaggctcttggcgtgtgttttcaaaatttgggcacgcgggtcgctcagggtgtacacggcgtggcccatgccgtagatcagaccgctgccgtcgccgcgctctttgcggatgatcttgcgcaggaactcccgcacctcgtcgtcgttggtgggatcctccacattttccaaaatgtagtccagctggtgcatgaccttcaggttggcgccgccgtgcttggggcctttcagcgcgccgatggccgccgagatggccgcgtaggtgtctgtgccggagctggacagcacgcggcaggtaaaggtcgagcagttaccgccgccgtggtccgcatgcaccagcagacacaggtccagcaggcgggcttcctcgtgggtgaacttctggtcggcacggtaggtggacaggatatgttcggccgtgctctgtccctcggtgggcaggtggaagtacatgctgttgcggtcgtagacgcggcgcttgatctggtaagcgttcaccatcatggtgggcagctcggcgatcaggttgatgctctgccgcaggatgttgggcaggctcaggtcctcggcgtgttcatcgtagctgtacatggccagcacgcttcgcgccatcttgttcatcaggttgggcgaaggcgagttcaagatcatatcgtcggcaaagccgcggggtagttcgcggtggttctccagcagtttgcggaacttggcatactggtcccgtgtgggcagagagccgaacagcagcagccagaccacttcctcaaacataaagcggtcgctggcgtcggcctcggcggccagggcatccaaatcgatgccgcggtagatcaggcggccggggatgggcacgatggtgccgtcttcctttttgtcatagccaacaacgttggacacgttggtgataccggccagcacaccggtgccgtccaggttgcgcaggccacgcttgacgcccatctggtccgccaaatgcgggtccagcgtggcattatgctctacatattcatggcagagcagttccagttcttccggctccagtgccggtacgtccgggtaatacatcggcagacccctctctacttgcatatttatacacgcacacaaatttcccgttcctgcaccgcaggcacccaccgcgtgggtgattgctacaataatataacatccttggagtttcgtcaagaaaaacttaaaatattaccacaatagccaaagtacggctttattttattaagctgataggcgttttgacacggtctgtataaaaaaccgcgttgacaaaccggcccaaagcagatatagttgtagtatattgcagcattttcgctgcgtaaggcccccttgtgcagggagcctttcaaaaagcacagggaaggggaacgtatttttatgaaagcagtactgatcccaggcgatggaattggccgcgagattgccgaaagcgtgcgtgccgtctcggccgcactgaacaccgacattgaatggcaggagtgtgaggccggtgccgagtacgccgaagtcagcggcgagttgatcgcccccggcacgctggacgccatcgaggcgtgcggctgggcactgaaaggccctacggctacgcccatcggcaagggcttccgcagcatcaatgtgcagctgcgtcagcgctttgccacctacgccaacctgcgccctgtgcacacgctgtcgggcgtacctacccgttttgagaacgttgacctcgtcatcgtgcgcgagaataccgaggacctgtataagggcatcgagtacatgctcaccgacgacatcgccaacggcgtcaagctcatcacccgcccggcctgcgagaagatctgccgctttgcctttgactacgcccggaaaaacggccgcaaaaaggtcaccgctgtgcacaaagccaacatcatgaagctgaccgacggcctgttcctgcgcaccttccgcgaagtggccgaggattaccccgacatcgaggccaacgactgcatcatcgatgccctgtgcatgaagctggtgcagcgccctgagcagttcgacgtgctggtcgcccccaacctctacggtgacatcatcagcgacctgtgcgccggtctggtgggtggcctgggcttcgcgcccagcgccaacatcggagataaaacgcgcatttatgaggctgtccacggctccgcccccgacattgcaggccaggacaaggccaaccccagcgctatcctgatggcctttgccatgatgctgaatgacctgggtatgaccgacaaggccgacaagctcaacgccgccatccaggcccaggtggccgagggcaaggtcatcaccgcagacatcggcggcacggccggcaccaaggaatttacccaggccgttatcgcccggctgtgattttttaaaatgaaaggcaaggagagaagcctatgaaactgcacgataccggcgtatacctcgtccacggcgtgccacaggccgaagccccggcaggcttcacgcaggagcaggccaagcagggcaccatcgcctacggcatcttaaaagcacataacaccggcgattccatgcaggacctgcgcatgaagttcgactcgatgaccagccacgacatcacctatgtcggcatcatccagacggcccgcgcctccggcatgaaggaattcccgctgccctacgtcatgaccaactgccacaacagcctgtgcgccgtcggcggcaccatcaatgaggacgaccaccagttcgccctctccgccgcccacaaatacggcggcatctacgttccgccgaacatggccgtcatccacagctataaccgggaaatgatgtccggctgcggccgcatgatcttaggctctgattcccacacccgctacggcgccctgggcaccatggctgtgggcgagggcggcggtgagctggccaagcagctggtgggccgcacctacgatatggcctaccccggcgtggtggccatctacctgaccggcaaacccaaccccggcgtcggcccccatgatgtggcgctggcgctggtggctgccacctatgccaacggctacgtgaaaaacaaggtcatggagttcgtcggccccggtatggccaacctctccgctgactaccgcaacggcatcgacgtcatgaccaccgagaccacctgctggtcctccatctggcagaccgacgatgtgacgaaagaatatttcgcgcagcacaatcgccccgaagcctacaaagagctgaaacccgccgacgtggcctactatgacggctgcatcgagctggacctctccaccgtcgagtgcatgatcgcgctgccgatgcaccccagctatgcctaccccatccgcgaactgaaagccaacgctaaagagattctgcaggcggccgaggaccaggccaacaagcagctgggcggcaaggtccacatggacctggtgggcaagatctgccccgatggccgcatctacgtggagcagggcgtcgtcgctggctgttccggcggcacctatgaaaacatctgcgcggtagcggacatcatccgcggcaagagctgcggcaacggtgagttcaaattcagcgtctacccggacagcatgcccacctatctggagctggtcaaaaacggcgcggtagcggatattgtttccgcaggcggcatcttccgcgagtgcttctgcggcccctgcttcggcgcaggcgatacccccgccaacggcgagttctccatccgccacaccacccgcaacttccccaaccgcgagggctccaagcccggcgaggggcagatcagcgcggtggccctgatggacgcccggtccatcgccgccaccgccgccaacggcggctacctgaccgccgccagcgagctgacagacgtggagtacaccactccggactaccactttgaccagggcgtttacgacaagcgcgtctacaatggctggggccgcccggagccggactacgagctgaagttcggccccaacatcaaggattggcccgagcagcccgccctgtccgacgacctgctggtcaagatcgtcagctacatcaccgaccccgtcaccaccaccgacgagttgatcccctcgggcgagacttcgtccttccgctctaacccgctgcgtttggcggagttcaccctctcccgcaaggaccccgcctacgtgcctaacgctaaggccgtgaaggctttggataacgagcgcctggcgggcgaagtgcctgatgaaattacggtggtttacacccaggtcaaggcgcttggctaccacccggacgcagcccacaccaacattggctcggccatcttcgccaacaagcccggcgatggctccgcccgtgagcaggccgccagctgccagcgcgtgctgggcggcgccgccaactttgcctgcgagtacgccaccaagcgctaccgctccaactgcatcaactggggcatgctgcccttcctgctggacacccccaacgtgctggacaacggcgactatgtctacctgcccggcatccgcaaagccctgctggaagccgccgatgagatgacggccatcgccgtcaagcccgacggcggcctggtagagttcagggtccgcctgggcgctatgaccgacgccgagagacagatcttggccgatggctgcctgatcaattattataagaaccactaaaacaaaactccctgcccgaatgggcggtgttcgtaaggcagcgaacagccacagcagcttgcactgctgtggctgttcttgtagtttatccggccatatgataatatggagccgaacagacctgcaaatcgaaatttttatatgtaaaggagaaacgaat

SEQ ID NO: 7769 - DNA, 10035 bp, Unknown
  gut microbiota DNA sequence
cgccgcaggcgggtgggggagagagccttgcgttatacgaagtttcggatgaagatgcgtttctctccctcagtccgctacgcggacagctccctcacagagggagccattcggcatggcgatgaaaacccggtatgtgcttactccgtgtagaacagcatgcggctgtagcacggcagcggccagaagtcctcgtcgaccagttcttcggcctggtcggcggcggcacgcaggcggtccatggcggggatgacctcgtcgtggaaggcgtgggccttggcggcttcgttgtccatgtcgctgaccttgtcggtcacggccttcaggtcgtcggcggcatcggacatctcatcggtgtatttgctaagcgcgaccagcaccttgctctcggccttggtggagatgccctccacagcggcggccttggcggcggcagagctggccagctcgcccatgtaggcggaagcggcggggatcagctgcttgttggcaatcttcagcatggtgcgggcctcgatgttgaggatcttggagtagtgctccatctcaacctcgtagcggctgagcatctcggtcttggtcaggacgccgaattcttccatcagttcgatgttcttctcgtccttcagggcgatcatggcgtccggggtgcacttgcggttgggcaggccgcggcgctcggcctcggcttcccaggcttcgctgtagccgttgccgttgaagatcacacggcggtgggcgttcagcgtcttcttgacccaggcagcagctgcgcactcaaagtcggcagcgccggaagtctcggccacgaactccttcagcgccttggcaacggcggtgttcaggatggtgttggcgtcggacaggttctcggccgagccgggcatacggaactcaaacttgttgccggtgaaggcgaagggggaggtacggttgcggtcggtggtgtccttgctgaacttgggcaggacgtcgacgcccaggtccatcttcatcttgacgggaccggcgtagggagaatcggtgcagacggcgtcgatgacagcctccagctcctcgcccacgaagatggaaataatggccgggggtgcctcgttggcgcccaggcggtggtcgttgcccggggtggcgacggaggtgcgcagcaggtcagcgtactcgtcaaccgccttgacaacggcggacaggaacaccatgaactgcaggttttccatcggggtatcgccgggatccagcaggttctcgctcttggtgctgatggaccagttgttgtgcttgccgctgccgttcacgccctcaaaaggcttctcgtgctgcaggcagaccaggccgtgcttgctggcgatcttcttcatcatctccatcgtcagcaggttgtggtcgatggcgacattggtggtgtcgtagatgggggccagctcatgctggcagggggcgacctcgttgtgcttggtcttggcgggcacgcccagcttccacagctcctggtccaggtccttcatgaactcggaaacgatggggcggatggtaccgaagtagtgctcctccagctcctggcccttggacggggcagagccgaacagcgtgcggccggtcagcaccaggtcaaggcgcttgtcgtagtcctctttcttgatgaggaagtactcctgctcggggccgacggtggtagccacgcggggcacgtccttgccgaacagatgcagcacctggcaggcctggtcggagatggcctgcatcgaacgcagcagcggggtcttcttgtccagtgcctcgccagtgtaggagcagaacgcggtggggatgcacagcgtgtcgtcctttacgaaagcgtagctggtggggtcccaggcggtgtagccgcgggcctcagcggtggcgcgcaggccgccggaggggaaggaggaagcatccggctcgcccttgatgagctccttaccggagaactccatgatggcggttccatccggctgggggctgacaaagccgtcgtgcttctcactggtgatgccggtcaacggctggaaccagtgggtgtaatgggtggcgccctgctcgatcgcccagcgcttcatcacgctagccacgacgttggcgacctccaggtccaggggctggcccttctcaatcgtcgccttcaggcttttgtaggtagagctgggcagacgctcacgcatctcatgctcgttgaaaactttgctgccgtaaagttccataacggttgctgccatacttcttactcctttatgtacctaattacagaaaaaggacgctgcgaaaacacattcgcagcgcccttgctgttatgcctttattatacgttgtgcatcgctaaattgcaactggcgatgtgacgaaaacaggaacgactttaagtggaaaactggatgttttgtgaactgtgcgcggggaacgaattgtggtatactcttactataataaggaggggtccccatggaaatcgaacgcaaatggatggtcacaaactggccggatgagaaaagcttcccgctgaccgagacttatcagatggaccagggctatatcagcgtgcgccccacggtgcgcatccgccgcgaggcattgcagggcggccgcaccgcgctggtgctttgctttaagggggcgggcactttaagccgcgaggaaattgaaaccgaaatcgatgcagacctgttcgccagactggagcacctcatcggcaagccccttattaaaaaggaacgccgcagctatcggttgcccgacggcctgaccctggaagtcaactgcgtggacaagggcctgcccacggcgttctggtatgccgaggtggagtacaagaccgaggcccaggccctcgcctgggaccccgccgccgtcggcctgggggactacctcagcgacgagtgcactggcaagcccggcagcagcatgggcgactactggcagcagacccggctgggcggctgagccttatatttgtaaaatcttgccgcccggctttacaaacggtaacaaaacggatacaataataagtaactacaaaaccgaaaaggggaactgtgaatgaaacgcaagctcttagtcctgacggcgctgctgtcgctgtgcgtgctgctggcggcctgcaaaaaatcggatgacaccatctccacccccgcctccacggcaacatcctctgccgggccggaggctaccccggagccgaccctgccgccctacgaagccaacgtgctgaccggcgagcccaagggtgctgactaccccgaaggccagcgcatcacctccgtgatggtcaacaacatcgtggcagcccgcccccagcgcggcctgtccaaggcggacatcctcttcgagatcaaggtcgagggcggcatcacccgctttatgcctgtgttcaccgactacaagaccatcggtgagatcggccctgtccgctccggccgtgaccagttcttccgcctcatcctgccctggcaggccctgtatatccacgagggccagtccgttgtcatgcagcagtatgccatcgacttcagctacggcaacctgaacaacaacgacggcgccaacggctaccgcgactacggccgcgtcaactgggccggcaagagctacaacaacggcaccctggcgctggagcacacgatgtacaccaactccgacaacatccaggagtacatcgacaacaacaaggtggacatgaacaagacctacaactccaccttcttcaactttgtggactaccgcctgggcaccacccgcgacctgtccaacagcatcgacagcgcttacagcgataagtacggccccgtggtcggtgacggcgagtatgtcgagatcgtccacagccagtcctacaagacccgcttcatctatgattctgcttccaacacctacaagatgcagcagaactactccgacggccagtggcgcgataccgtggatgaagccgccgataacaaggtgctgaccttccccaacgtcatcgtgctgtacaccgacatccacacctaccccggccacgaggccaaggacctgcagtatgcggagtacgcctggggcggcatcggctactactgctacggcggcaagtgcgagaagatctactggcagaagggcaccccgctggaggccctgcgcctgtactacctgaccgaggacggccagtgcagcgacacccctgtggagatcaacaccggcaagagctacgtggccgtgaccgatgtggactttgccggcaacttcgtgcacagcaagctggacggtgttgacctgagcagcgccaccaccgtgacctacgagcgcagctatgtggaggatgacgccaaggccggcgacaccctgggcatgtccaccgacgacctgaccaacaacgccaccggcgccggcgaggccgagaacagcaacaccgaggacaccacctccggcgagagctacaccgaggacaccaccggcagcgaagaaaccaccggggataccaccggcggcgaggagcacgttgagccttccgccgacggcgaagagacccctgccgaataacccacgcactccagggacagcgcagcccgcccaggcggcggggaagcgctgtccctttttgaagtattgtaggcacgctgcgaaaggccccctctgggagggaggctttcgcagcatctacaaactaaaaccatcagagaggaaagtatatgagaaaattccaggcactcagcctgtctgctgccctgctggcatcgctgctgctgggcggctgtgccaataatgccgcatcttccgacgctgcatcgtcggattcagctgcttccgaaccggaagctaccccggagccgacccccgcgcccccggcggccaacccgctcaccggtgcggccgacgctgactataccggcaagcgtccggtggccgtcaccctgcgcaacatgaccggcagcaccccgcagtggggcattgcctccgccgacgtgctggtggagggcgtgaccgagggcaccaccgccagcctgatggcgctgtacgccaacccggacagcatcgccaaggcaggccccgtcggcccggcccgcgacctgctgctgcaggtggccctgcccctcaacgccgtgccagtgcacatcgataaaaacatctacgccagcaacctgctcaacaccctggcctaccaggacctggacggctaccacatcggcaagacggccttcgcctttgaccaggaccgccagaacgccggctacgccgaggaaaactgctggtacaccaccgccgagctcatcaacagcggcctggccagctacggtgtttcgctgaacggcgataacacgccgcttttccagtttggcgagcgcccggcggtggaccctgccgaccgaagcggcatgaacctgaccatcactttctcgccggacgacatcgattgcctgaactatgacaccggcacgggcctgtacgcgctctccaacggcgacggcagcccggtgcaggatgccgacaacggccagcaggtgggattcaccaacgtgttcgtgttctatgcctccagcggcatcaaggacgacggctatacccgccagtacgatatgaccgccggcaccggcctgtacctccacggcggcgcgtgggagcgcatcaactggaccaaggaggatgccaccggtccctttgccatcaccaacgaggcgggcgagaccctggtggtcagccagggcaagagcttcatcgccatctggggcggctactacggccagagcatctccctgaccgccgccgacggctccgcccagaccctgccggacaagccagccctgctggaatccggtatcccggacgacgcagccgcagcggcggaggcagagtacaaggccgcccaggaggccacgaatgcgcaggccgagctggcccgcgcacaggctgagctgccggacgcccagacggccctggaggaagcccaggctgcgctggacgctgacccggaaaacgaggagctgctcacggcccgcgacaatgcccaggccaatgtcgacgccctcaacgccattctggcggcggctgaacaacaggatggacaggctgaataacgggggttcttgttcttcctttacaaagaaagaaccaaagaaattctaaacaaaaatgcgtggtacggtctgcgaccgtaccacgcatttttaattaaaaattcttttggtccttttcttataagaaaaggacgagagctctcgctgcttagccctgctcatcctgctgctcaaacgcatccagatagccgtgggggacgacgtcgtaggcttcagcgaggtggtcgcgcatccacatttcggcatccagacgcacactgtaacctgcgcccgggtcggtcatccactcctccggcttgcggaagggcagggcgtgctgagacagcatgttcatgatgacaccgccgtgggtcacgcaggcggcctcctcggtgtgggtcttgagcatgtactcgaacatcttcatcagcatggccgaggtgcggttaaagaacatctgccggtcctcggcaccctggggcaccgtgcggctggtcgggtccatccactgggcgaactccgggtccttcaccaactgctgcaggggcttgccctcaaacttgccaaaggccatctcccgcaaatcgtgcagctcgatctgccgcacaccggggaataggatctccgccgtctgggtggcgcgcagcatcgggctggtaaacaccagcggcacctgcgggtagccaaaatcctttttcagcgttttcagctgggcgcggccctccgcacacaggggcaggtcgctgccgctgccaatatacaggcctttcaggtttccctccgtcaggccgtgccggattaaatgcagtttgtaatatttcaaagcaatatctcactttctgtatctgtattataaaaggataccgcaaaatagcgcttttgacaacgataaatagttacaattcggttacaaaataggcagaatataacgggctgtattttttcgcccacaatatttatacccggcggggcggggctggcccaaattatggggacataaaaatccagctctgttttcgggccgaaaataccgtcgaaacacgggtttacaaagcgtttttttgcggatataatatacatcacgtagtatgtacaccgagaaatggcggtgtgaaagaggaattatatggcaagcgagttcaaccgtattcttgcgctgctgcgcaaagaacgcggcatcacccaaaagcaggcggcggcggacctgggcatcagccaggcgcagctgtcccattacgagaaaggcatccgggagtgcagcctggcatttgtggtacaggtagctgattattacggcgtcagctgcgattacctgctgggccgcagtgccgaccgcagcggccagaccatcagcgtggccgacctgccggaaaccggcgccagcaccagcggcagcgtctaccgcggcagtgtgctgcccacaatgtacaaaaagctcatcgaaaattcgctggatattttgtacgacaagctgcaggaaagcaaggataagcagctggtcatccagatcagccagtatttgatgctggccgtgtacaaagtgttccgacgcttgtacgatgcatcgccaaaaaatgcggtgggcatgttccgtgtcggcgcggcgcggtggcagggcaatgccgacgccgccatgcacgtggccgaagccgagttggctgccgccctgaccggcgaggacggaggcaaggacagcctggacccggcgacgctctcgttaagtaccgagcgcctgacccaggactacccccgccacgcgacaagcctgttgaacctggtgaaaaacgccgaggaatccatgcgtgcgctgcacccggcggagtgagccatccataagaaacacaaccgggcagaccccaacaccaaaagggcctgcccggtttttgtatgtattatgtcaggaagaaaattgtaggggccgatgctcgtcatcggcccgccggtatggcagcactttgcggggcgatgcaagcagcaccccctacaaaagagtgaatggcttttccttatatcccctttgcgtgtaaaactattgaaagtttctttgcctactttcttttcaaagaaagtaggtcatccctgctccttttcggccaacgctctctggcaggcggggcagacggttttgccgtacagctgtaccgagccgggggatacctggccgcacaggacgcaggcatcggcggggcggtacttgcgcagcaggatggcatcgccctcggtcatgatctccagcggcgtatcggtggtgatctcaaaggtgcggcgcagttccttgggcagcacaacgcgtcccaaactgtcgatactgcgaataattcctgtagaaatcataaagattcctcctctattttcttacattccccaaaaattttgcattatatttggcattgctggtggtctgtgacggctggcccaacaatctgtagttattatacgagacattggtaaaactgtcaatatttgccattttaattttcacggcaatcgctcgacacaggctgacaacttcccaccgttttccgcaaaaagggccagccttgttacaaaactgacacaaccctgtaacatcccccttgtacaatgcacctatacgcaaaaggggggatccggtatggtaaccaaaaccgcacgaaccaggcagcccacgcgggaaatgcagcgccgctgccgccgcaaacgccgggccaaaatggtgcggcggctgctgtatgcggcggctgtgctgctggtggccgtggccgtggcgatagtgctgtacggcggcagccccctgcacgccagcgccgagccacagcccgttgcggcgcccgccgacacgcctgtgcaagcggagccgaccgcccagcccgccgcgccggggcagtatgtggtggccatcgaccccgggcacgggggcatcaaccccaacatcggggccgaagactggggcagtgaggccgacggcgtgcgggagagcgacgtcacactgtgcaccgcccaactgctgtgcgagaaactggcggcggatgaccgctttgcgcccctgttgaccgccgacggcagcacctacctgaagcccagcgagcgtgccgccgcagccaaagcagccggggccgacctgctgttgtccatccatttaaacagcgatgccagcgccgcaaccaacgggctggaatgttacgccgcgccgcctgccctggccgccaacgccgagagcgtgcggttcggccggcttgtgacggcggctttccgggaccagctgggcctgaccctgcggggctgggacggcgtgcggtacttatattttgacgccaacaacgcccgcgtagtcgcggaatcatcggacacgacagtgcgttccgacccgacctttacagttttggaggactgcggctgccccgccgtgctggtggaggagggcttcatcaccaacgcatccgaccgcgccgccctatgcaccgactccgcctgtgaacaggcggcggaactgtattaccagtgtatcattgatttttttgaataaacagcaaaagggtgtcaccaccatgcggcgacaccccttttataatgcccttgcaaatcggcactgtagggagggggcttgacccctcctaagcacttttcattacaacacgttgcgtcttttgttgcaaacataaaatttagatgtaggggacggcgtcctcgacgccccggacgggccttgcgttatcgcccgtggagggatcaagacccttccctacaaaccaacgcaaacaaccgccaaatctcaaacggtcagtcacccatacaaactggaattgttctaaatcttcgcggttgcaccttcttgcccttcggacaaggagtctccctcgttcaaagttcttacaaaatttctgtttaacgatttcttttccctgtattctctgtccctcggatttcctcatgatagaaataatctacgatcaccggatgtccctgcgggactctgccataaggcatttcattatccacaaagggacaatcatacttctta

SEQ ID NO: 7770 - DNA, 1824 bp, Unknown
  gut microbiota DNA sequence
gcccaggggaaatgctggcggtcgagcgacagatattggaaaatttctttctcaaagcggtcgggatactcgccgtcaaacttcttgcacagtgccttgccttcgtccagggtgatttcctcgttgcggatttcctgggcggcatcgtaggtggtgcggccgatgccgtacttgatgtaggtggtgtaatagaagaagtcatcgattttatcatcgatggaattgtacttggagtaggtgccctgggtgcgctccggcgcggggcggaagccgccgtgctcgacgctgtagtagtaggcgccctgcggatgccacttttcgtagtagcccaaataccgcacctggatatggtttttctccaggttggaggtctcgctgggcaggtagatggccaggtcggccttatcgaccttgtaatcctcctccagctggcgcaggctgacgccgcccagatagatatggtcgtagtcattgacggcaaagaaatgctcgtcacgcagggccgagttgttgtcggcaatggggttgccgaactcggcctcgttctcaccgtagaacaccagcgggatgccgaacttggcggccatcttgggggccagctgcttctgccccagaataaacggctggaacggatggaacaggttctcggtagcaaggcgggtcagcaggcggtgggtcatgccgttgggggtgcacaggtagttgtcaaacccggcatgaatccaggcctgcatgttgtcccagccccagggggtatagatatgcggcgcccaggtgacggtcagcgggtgcatgccgtacttgtatttcagcagatgggcggcgtaaaagctgtccttgccgccggaaccgggcaccaggcagtcgtagctgccgtcgtttttgcggtactggtcgcacagttcccgcagttccttctcgcgcagggcccagtcgatctggccgttggccttgttatggcaggcgtggcaggcatcgcagacgccgtcgtcctggatgaccatcgttttcttgatggacttgatggtatgctcaaactcatagcaggagttgggcttctggttgctcatcacgcactctttgcaaaactgcacgtgcttgggcaggccgtagtaggcctcccgctcctccaccgggatatccggcgcgtacttgctgtaatcaatctcaacgtagcgaggcatcttttccatatttctacactcccatcggcaggataaaagaaaaaaggcaccgtccgatagcaatgctaacggacggcacctttgccgttcgtggacattatagcacaggtgcggcggttatgcaagagggctgtttattctgtcagtgttttcttttggagacactgcgcagattcaggcacaatttacgcgcggatcatttctccatcaataaacacagcccgcacctcggtcatgacctcaaaggggctaccgtcggtgatggccacatccgcatctttgcccacttccagcgagccaacacggtcggccacgccgatgtgctcagcagcgttcagcgtgatggcacgcagtgcatcgaacgggtccatgcccgctttgacagccataccggcacacagcggcagatactgctgggggatgaccgagttgtcggtgatgatggagacatggcagcctgccttggccagcacgccgggggtcgcccaggatttattctgcagttcaaacttgctggcaaaggtcaggctggggccgacggccatcggcacgttagcctctttcgccagttcgtccacgatcaagtggccctcggtgacatgctccagcgtcagtcgcaggccgaactcgtgggcgatgc

SEQ ID NO: 7771 - DNA, 269 bp, Unknown
  gut microbiota DNA sequence
ccgcctgcgctccctttacacccagtaattccggacaacgcttgcaccctacgttttaccgcggctgctggcacgtagttagccggtgctttcttgttaggtaccgtcattatcgtccctaacgacaggagtttacaatccgaaaaccttcttcctccacgcggcgtcgctgcatcagggtttcccccattgtgcaatatcccccactgctgcctcccgtaggagtctgggccgtgtctcagtcccaatgtggccgttcaacctctcag

SEQ ID NO: 7772 - DNA, 463 bp, Unknown
  gut microbiota DNA sequence
gccaaaacctggccaatggttatgggggcggggacttccacgtctttcagcgcgcggaccacatcaaaaatcttgcctttggggatgtcactgcgggtcttgcagctgaccatggccagggtgccaccggtcacgcggacggtgctggtcacgatgcgggtgggggccgtgacctccttgcgggcgtaggcatcgccccgggggcaggtgttgccggtgacggaggcgaccgcgccgttctccatcgtaacgatcagcgggcagcccatggggcagccgatgcaggtaagttcgatttttttcgtttccataatcaggcctcctccagcgtaacagtcaggcacgaggcgtcaggatgggcgcgcaggtcggcccctttcaggcggacggtctccatctcgccgggggccagcacgggccgcttgcggctgaaaatgcaggtatcgcccagatatacggcgat

SEQ ID NO: 7773 - DNA, 290 bp, Unknown
  gut microbiota DNA sequence
atctcgccgggggccagcacgggccgcttgcggctgaaaatgcaggtatcgcccagatatacggcgatttttttgttcttgaacacaccgcccacacggaagcggatggtcacggtttcgccggcgcaagccgggcgcaccgtggcgggcacggtgtagcgcacgccgttctcgcaatgtaccggaatggccggggcgtcctgctcgccattttgcaaataagcggcggcctgggcaccggcagcgccggcttcctcggaaacatagtccaccagatcatgcacatgcag

SEQ ID NO: 7774 - DNA, 5790 bp, Unknown
  gut microbiota DNA sequence
tttataacagcatccaccggcaagcctaccttttttgggtcacaaaaaggtgggcctaacgggagaatcccatgataaaaggccctgccgcaaggtaggcagggccgataaaccgcaatgcaatattaagaatcaaatttccggcttcatccaagccccatctttcaaacactccagatgcacatgggaagccaaatccgcctcggcagggatggccgcgaccaccccaatcacatccccggcggccgcatcgccgcccacaacacagctgggtgtaaccccgcaataccgccaggtgcagccgtttgcatcaacgatctccaccacgccgccccaaagcgcatcgtcctccacaacagagacccgcccgcccttcacggcgggcacctcatccccggcagcagcggcagcatccacgccattgtgcgtccgccaatcgccaagggttgcattgtacaccagctcgtcgccgctgtagggggccagcaccttaccctgccagaagtccgaagactttgccgcagcaccggacggcgcggcagaagcggcgggtgtgggcgatgcagcgggcacaccggaagcagcattcgaggacggcgatgccgatgaggcaggcgcaggcgtgcgcaccggctcgggctgggtcgtatcgggtttgtttacggtcgtatcgtcctgccatggggtctcctcctgtgcggtgccggtcagctcaacaacatggttcaagacactgcgcagcgccagcaccccggccgctgtggccgcaaacaccaccgccagacaggccagatacagccccttctgcttaaaaaaatgcttcaaatgctccatcgtccccggtcctttcggcaaaatttgtgtatgccgttagtttggaccggggacgatgggtttattcacacattttgtaggactgtacacaaaaggccccctctgctagggggctgctctgggtcgcgccttatttctcgtgcagcacgtccaaaagttccatcacccgcatggtgcgcatccgggctgccgcctcggcatccgcgtctttttccgcaatgatccgtgcaaactccgcaaattcataggccatacggtggcgttccggcttggggccgtccacacgggtgccgccgccgcgcacgccgcccagtacactgtacaccacgggcagggcgttggtgccgccctccaccaccaggtaaccgcccggcccttgcaaaaccatgccgttgcggccctcgctgtccttagcggccaacgccgctgctgtgaacccgccatagtccagcagcgccagaccggcagtatctatgccgtttggcccgcagctggggcggtactcggcccggccgggcacgcccagcagcccgcacagcaggtgcaggttgtaaacgttcatgtcgttcagcgcaccgcccagacaggccgggtcaaaggtggtgttccagatgcccttcaggtagtcatcgtaccgggcgctgcgggcgcagaagctggccatcgcgccgcgcacctcaccgatcttgggcagctcggcctgcaaaaaggcgtactgcggcaggtaggggatcgtgatagcctccatcagcaccagccccttggcgtccgccagggcaaacagctcccgcgcctcggccgctgtggcggtgaagggcttttccagcagcacatgataccccgcctgcagcgcccgcttggccgccgcataatgcaggtggttggccgtgccgatgtacacggcatcgaacccgcccaccgcataggctgcggcctcgtcggtatacacggccggcacgccgtactccgccgcccaggcatgggccttctcggcgctctgcggccggcagacgatcgccgtcacctcgacctccggccagtttccgatctcccgcattacctccgccacgatccggctggtagacaacactgcaatttgtaaagccattttcagcacctcgcacatcttcatttgtgggtattatagcatgattttcttattcccgcctgacggcttaagcaccgctccggcatgcacctcggccagatgccggtattcctccccatttgccgcaatagaagctttctgtttctccgaaaccgtcctaaccacctttcccggcacccccacaacaaggctccccgccgggataacggcattttccgtcaccagggcccccgctgccaccagcgagccggccccaatcaccgcaccgttcaaaatcgtggcgtgcatgccgatcagacaatcatcccccacggtacacccatgcaccacggcactgtggccaatggacacattccgtccaaccaccacatccagtcccgggccggtgtgcagcacggcgttgtcctgcacgttgctgcccgcatcaacggtgatgcgcccggtatcggcccgcagcaccgcgccgtaccagacgctgctctcctcggccagggtcacatcccccgccagcgtggcgttgtccgccacaaacgccgccgcacccacctgcggcacacggccatccactttataaatcgccataatagcccctcctaattgcttttctccatcatacacctccgcccttaaaattgcaaagcctgcgcccctgtgctacaatatccctatggcaacaccgcacaattcccgcctgacggcttaagcaccgctccggcggcttcggcacttagaattatgcggtattgccctatcatacccctcacaccgcaaggagacccattatgcccatcacccccaccaacatcaaactcatctgcagcgacatcgacggcacgctgctgcaatacggcaaaaagacgctggaagcggaaatcctctcccagatcaaagccctctccgcccggggcatcctgttctgcccggcgtcggggcggcagtacaccagcctgcgcaaactgtttgagccggtagccgactgctgtgttttcctgtgcgaaaacggcggcgtgctgtacaaaaacgagcagtgcatcggcaagacccccatgccccgcgccctggccgaggagattgcctgggacatgtggaaccgctgcgacggtcagggcgaggtcatgctctccggccagtgctgcggctatctgatgtcccgcggcttagggatggcggaccgcgtaaaattcatcggcaacaagtacaaattcattcacgaccctgccgagatccccgaggacatcgtcaaggtcagcgtctatctgcacgagggcgtggaaaagtacgttgaccgcttcatcccccgctggcagcaggccaatgccgccgtggccgggccgtactggatcgacaccaccctggccaacaagggcaccggcgtggcgctgctttgcaaaacgctgggcatcacccccgccgaggtcatggcctttggcgacaacttcaacgacaccgccatgctggacctggtgggcacgccctacatcatggacagcgccgcccccgccctgcgcgcccgctacccgctgcacacgccccggcccgaggacgtgctgcgtacccttttggcatatatgtgactcaaacagcatatatacagccagcgccccacccgtatcccttgttgtacccacatggagaatccgcccatcctcaaccacatattttacgcacaaatcgccaaaatgtacgacgataaatgctctgttttcggttgacgctcacgccgcagtgtgttattattataacgacttaatggagaagctccgcccggatttcgcggagaattaggaggaaaccaaaatgaaagaattcgtctatacgatcaaagagcccgttggcatccacgcccgtcccgccggcatgctggccaaagaggccaaggcctgccagagcaccgttaccatcgtggacaagaacggcaagtccgttgacgccacccgcctgatggccctgatgggcatgggcatcaagtgcggcgataccgttaccgtccgcatcgagggcgctgacgaggacaccgctgcccccgccatggagaagttcttctccgagcatctgtaaaccttattgcaccacccggccgcggcagccccaaccaaacggaggccgcggcttttttcgcatcctacatgaaaagggaggattttgcacgatgatcaccattcagggcaagggcgtttccgccggcgtaggcgtaggcccgctgtactactatcgccgcgccaccgccgagatcaagcgctataccgtagaagataccgatgccgagtggcatcgtttcaagggtgcccagaccggcgccgtggagcagctgggccagctggccgagcaggcccgcgccgaggccggcgacgaagccgccatgctgtttgagacccaccagatgatggccgaggatctggactacgaggaagccatcgaggaccgcatcaccaaccagaagatgaacgccgaggccgccgtctccgacaccgccgagcagtttgccgagatgttcgcttccatggacgatgcctacatgcaggcccgcgccgccgacgtcaaggacgtcagccagcgcatcctcagcatcctgtgcggtgtggtgcagggcggcatcgcctccgacgtgccggtcctgctggccgccgacgacctggctccctccgagaccatccagctggacaagtccaagattttgggcttcatcacggcaggcggttccggctccagccacaccgccatcctggcccgcaccatgggcatccccgccatcgtcggcgtgggcgacgccctcaagcctgagtacgaaggccgccaggccatcgccgacggcagcaccggcgcactggtcatcgaccccgatgacgacacccgcgaccgcctgctgaagaagcgtgaggagcagcagcgcctgcagcgcctgctggagaccctgaagggccagcccaacgtgaccaaggacggcaagaccgtccgcatctactgcaacatcggctcgcccgaggacgtccacgccgtgcaggtcaacgacggcggcggcatcggcctgttccgcagcgagttcctctatctgaactcctccaccttccccaccgaggacgagcagttcgaggcctacaagcatgtcttgtccgacatggatggcaaagaggtcatcatccgcacgctggacatcggcgccgacaagcagatcggctactttgacctgcccaaagaggacaaccccgccatgggcatgcgcgccctgcgcatctgcctgacccgcccggagatcttccgcacccagctgcgcgccctgttccgcgcctctgcctacggcaagctgggcatcatgttccccatggtcaccagcgtgtgggaagtgcgggaagccaagaagctgtgcgaggaagtcaagcgcgacctcaagcatgagggcatcccctacagcgaggacgtgcagatcggcatcatgatcgagaccccggccgccgccatcaacagcgaccgtctggccaaggaagtcgacttcttcagcatcggcaccaacgacctgacccagtacaccctggcctgcgaccgccagaacaacgacctgggccgcttctacgacccgcaccatcccgccgtgctgcgcctgatcaagctggtcaccgagaacgcccacaagaacggcatctgggtcggcatctgcggcgagctgggcgctgacctggccctgaccgagactttcctggccatgggcctggacgagctctccgtcaccccccgcgccgtgctgccgctgcgcaacgctgtccgcatgaccgacacccgcgaaagcgccgaacgcctcatggctgaactggacgctgactatacggctagataaattttaatagcatacctac

SEQ ID NO: 7775 - DNA, 1030 bp, Unknown
  gut microbiota DNA sequence
gaggtattctggaaagtagacctgtaaggagaatttgcaatggataccaacaagaccccaatttatccctttgagccttggaatgtaacggaggatcaccttgatcttgcgatgaactaccgcaacgaaacgacgtttgcgctttccaacggctatatcggcacccgcggcacccatgaggaagcctacgattttgacgagcagcacggcttggagggcaatttcctcaatggcctgtacgagcaggagcacgtccgctacggcgagtggaacttcggcttcccgaccgagagccagacgatcctgaatgtgccgaactgcaagacgattcgtcttgcggttgacggtgagcctatggacatccgtaccggcacactgcaaaattaccgccgcacactggatatgaagcacggtcaggtcgtgcgcagttttgaatggacctcccccaacggtaaaactgtccgggtggagaatacccgctttgtcagccttgcacacaaaaaccgcatggcacagcgctacagcgttacccccgtgaacttcagcggtacgctgacgctgcacagcgcactggacgccgatgtggaaaaccatactcgtaccacaaatccgctggtggactacggtccgtttgaacgtcatctgctgcccgatgcactaaccgccgatgacaaaactatgacctgccaaagcactgcggtcaacagcaagctggcgatggcctgcggctcggtgcatctgctctcggaggcagcagctgcgacccgccatcaggcaaacgatgtcaatgcatggatcgaatacgattttgctgccgagcagggtcacacgattacactggaaaagctgaccgtctacaccgactccctcgatatggacaagagcgccatgcttccgtttgtagaggaggaactggcagtatttgctgcggacggatatgataaggagtttgccgcccacgctgccctgatggagcatttctgggagactgccgatattcgcgtggacggcgatgtgcctctgcagcagg

SEQ ID NO: 7776 - DNA, 26797 bp, Unknown
  gut microbiota DNA sequence
gaaattcctggacatcaagtgccgcgcggccgggctgcatcccgccgctgtggtgctggttgctaccgtccgtgcgctgaaatcccacggcggcgttgccaagcccgacctgagcaaacccaacgccgaggccgtgaaggccggcgctgtgaatctggcacgtcacatcgagaatttgcagggcttcggcctgccggtctgcgtgggcatcaacgccttccccaccgacaccgaggaggagatggccgtcatctacgacgtctgcgccaaggccggtgtgccctgcgcgttgagcgaggtgttcgccaagggcggcgagggcggcaaagccctggccgagaccgtgctgtccattctggacgataccgcccaggtaaaatacacctatgaactggacgcgccgcttaccgacaagattgatgctgtagcgaagaaaatctaccgcgcaggcagtgtcagctacagtgccgccgccaaaaagacgctggacgagctgaccgccctgggctacggcaacctgccggtctgcatcgctaagacgcagtattccttcagcgacaatgccaagctgaccggtgcgccggatggcttcaccctcaacgtccgcgaggtgcggctctccgccggtgcgggctttgtggtcgtcgtctgcggcagcatcatgacgatgcccggcctgcccaagcaccccgccgccatggatattgacgtggacgtgaacggcaagatcaccggcctgttctgatttatacaatataaataggtacagcaaaggctccccttgtgataaggggagcctatttttattctcttatctcagcccgtggaggcaatacaggctccgtcatactcgcaggtcgtttcctggcccggcacaatggttgccatatagccatcctttgcaaagttgatggctacgatctgcccttccttcgtatggaagatctggatcataacgtccgttttcttaggcttacttttaaagtaggcgctcggcttgacagcgctgctgatcaggctgccgttgccaaaggtatagcgcggatttttgccgtcgctctccagatacttcagcacctgggcggccgctctccggctggagctgcccgcctctgtcttatcattcgggtttttctgtatcgcgtacagtgcgccgtttgtgatgcggcccacatttttgtaggtcttgccgtttacggtaatggtaaatctgcaggaattgcttttgtcgttaaagctttccgggtacagggcgtaacattcggtcagcgcagcctgcgaagccgtccacacatcccgcgcttcggtgatgaccgcctgcttttttgccttggtcacataccctgtcagcgccgggatcagcaaggacgccaaaattgccaggatcaccagcaccacgatcaattctaccagcgtgaatccccgtctattttttctgttcataatcaccttttccattataagttgccgccgttggcgtcaatcgtttccctataccatgccgcgctgtccttgggggtgcgggtgccggtggggtagtctacatacaccaggccaaaccgctcgttgtatccctcgctccactcaaagttatccagcagcgaccagtggaagtaaccctgcacatcggccccggcctctatcccctgccgcagggcaagcaggtagcggtgggtaaagtcgatgcgctccgggtcgtgcaccttgccgtccaggtggatgcggtcggtgcaggaaaggccgttctccgtgataaagatgggcaggccgtaccgctcatggaggaaccgcgggccccactccatggcttcgggggtgatgggccagccgatggccgtgcgcggatgaccggcggcgcgggggcagaattccggctcgccgtcggctccggcccgcaccgcgacggagttgtagatgttcatgccgataaagtccaaccgccccagcggcagagcgtccagctgctcctgcgggatggcatccaccacccgctgggcctgcccgcccgcaattttgggccagccgcggccgcacaccgggtccagcgccggggtgtaggtgaaggtccaatcgccgtccgccagggcgaaggtagcttcgcgggcggcggcaatatcggcggggctgtcagtggctggggtgcagatgcgcccggtgggagccatgcccaccttggcatcggggtcggctttgcggatggcatccgccgccaggcagtgtgcatagatcgtgttatgccaggcagtaaacaccgctgcatcgtccagtttatagcccggcgcatgcacacccgcgctgtagcccagccccacgctgcactgcggctcgttgagggtaaagtaatattttacacgtcccttaaagtgcgccgccaccgtggcagcgtacacggcaaaggccctggcggtgtcggcgttcagccagccgcccttatcctgcaatgcctggggcaggtcccagtggtagagcgtcacatacggctcgatgcccgccgccagcagcgcgtccacaaaccggtcgtaccaggcaaggccagcagggttcaccgcgccggtgcctgccgggaaaatgcgcggccaggcgatggaaaaccggtaggcctgcaggtgcagggctttcatcagctccatatcctcggcccagcggtggtagctgtcgcaggcgacgtcgccggtgtcgccgcccttggtcttgcccggcgtatggctgaaggtatcccagatggacgccccacgcccgtcctcaaacgcgccgccctctatctgataggatgcggtagccgcaccccaaacaaattcctttggaaatggcatattcttctccctctggttgctgataaaaacgaggatgtaggggcggatgcgagcaacgacccctgcaagggtgcgcgatgtaccccacacgtatttgtacaatcaaaaaggtgcagcgcgttgccactgcacctctgcttagtattagtttaccccttaacgctgcccaatgcaacccctcgcacgatatatttcgagagaagcaggtagacgatcataaccggcaagatcgcaatggtgatcatcatgtacaccttgcccatatcgaacttgaggaagtccgcgctgcgcagctgtgcaaccaggatgggcaccgtcttccacttggcgtcgttgatgatcagcgccgggataaagtagttgttccacgcgcccacaaagctgaagatggcctgcaccgccatggcaggtttgaggatcggcaggatgaccgcgttgaaggtgtggaactcaccgctgccgtcaatgcgcgctgcatcgataatatcccgcggcaggctggaatccatgtactgcttcatgaagaagaacacggtgggcgcggcaatgctgggcaggatcagcggccacagggtgttggtcagcttcatcttgtccatcaaattcaggaagcccagcgccgacacctgcgtcggcatcgtcatgataagcaggatgacggtgaacgccagcttgcgcagcttgaagtcgtaggcgtagatggcgtaggccgtcagggcactgaagtaaaccgacagcgccgcacaggccgccgaaacgatgaggctgttgcgcaggccgctcagaatcggtacgttggcatcgtgggtggtgttgtagaagttggtgccgaagctggtgcggggcagcgggtcaaagccctgctggatggtaaaattgttgtgggtggcgttgacgatgagcacatagaagaagaacaggcagacaaagcacagtacaaacagcacaatgtaagcaactgcacgctgcagcgtaagcatagggtcgtgaattttcgttgccttggtcttggtggctgcggttttggtctcgtttggcatactctttcacgctccttccttaatgatgctttgcagccgccttggctgctttgatacgagctttttcggccttgcgctgctcacgggtcaggccgtcatcctcctgggtaagggtaaagtagatgatgacgcaaagcaccgcgcaaagcaggaacatcagcaccgaaatagcgccggccgtgccgtagtttttgctgtaaaggtgctggttcagatacatgatgatggtgttggtactgccgttggggtcgcccttgccgttggtcaaaacctgcggtacatcgaacatctgcaagccgccgatcaggctggtgatgagggtatacaccagcagcgggcggatgagcgggatggtgattttccagaacatctgggtcgaggaggcaccgtccagctcggcggcctcgtacaggccggggtcaacgcccatgatggccgccatcaaaatgatggtggtgttgccgaaccacatcaggaagttcatcagccccaccagcccgcgggcggtccatacgttggatagccagcgcaccggctcgctcacgatgccgagtttgagcaggatggagttgatgggcgcggtttcggcgttggaaaacagcgtaaagaacagcatggcaaacgccgaagccataatcaggttgggcatgtagatgaccgttttgaagaacccctggaactttagtttcagccgcaggtcggtgaaccaggccgccagcagcagcgagaccacgatctgcgggataaagcccatcagccacatgatcatcgtgttgccaaagtacttgggcacttctttgatcatggcagcgtagtttttcaagccaacaaagttagggccgatgatctttaggccgctgcggaaatactcaaagaaggaatagtagatggtggtagccagcggccagaactggaaaatgaaaaaggtgatgaagaacggcgccaggaagatgtaaccccatttggcgtagttcatgccttttttcttggttttcataagtctcgccctccttagctgtacgggcattgccctgctgggggcagagccttttgcatgttacaggccaacggccttacggttaaaataaaaccaggggcgggcgtctctcccccgcccctggtatggcgtttacggtttcgtgttcaggtgtaagacccaacttatgcgggccattccacgctggtcagctcaggatacttgaccttgatctgatcctcaaagttctgctttgcggtgtcgatgtcgacggtgccgtcgaagtaatccttgaagcagctctggaaggtctcgttgcagccctggtcataggggccggcgttagacatatcgatggtaggtgcaacctctgcgaacagagcaatgtggttctggccgcccaggaagtcggagccgaagtcgggatcggcggcgatggcgtccatagcgctcttgcagttggtgtagtcctgggtatccttggtgatctgggtcatgatgtcggagtcgcaggtcagagagtacataacgtccttgatggtggggatgttatcggtgccggcagcagcgcagatccaggtgccgccccagtaataaggctgaggaccctggcagactgcgtagtcgccgtagatgccgttgccaacttcttccttgccgccctcagaggtcggggtttcaagagagttgcccagcagggtgaagttgatgccccaagtggagtagaagaagccgaagaccttaccggaaggaccctggtcagcggcccactggtcgctccacaggctggtcttgttgttgtagccgttatcggtgtaatccttggtctggtcaacccagctcatgatgttggggtcaaccttgacggtggtgccgtccacccaaccggcggacacgttgttggagaaggtacggtaggaatcatcgtagccggagagcatcttgtagcccttggcagcagcctgcttggccacatcgttgaacttatcccaatcgctcagcgcagcctggacttcggtgggatcatcggtgcccagcacattcttggcgatgctgcggcggtaggcaaacaggcccggggtcgcctgccaggtggtgcccttctggacgccatcgacggtgacgatgtccttggtgtactggtactggtccttcaggtcgtcatcggtcaggccgatgtcgcccttgacgtccagcgtgtactcggagtcgacgtacttcagcgcgtagtcagcctcgatcaggaagatgtcgatcttgtcatcatcggcggcgctgtcctgcttcagcagggcttcgtccagcttgttctggtagttgttgttatcgttggggttgatggtccatttcacggtcacgccgttgtccagttcggtggtggacttatcgtcggccacagagacaacgccggggtagtaatcgttgaagcgggactggaactcgtcgttccagcaccagatattcaggaccttgccctcctcggcggtaccatcggcggcgggttctgcggcggtgctgctggtatcggtagaggtggagtcagcggcaggtgctgcggacgagctggcggcgcctgagccgcatccggcgagcagggtggctgccatagcagtcgcggtcagtaaactgagtgcctttttcataatgatgttttcctccttttaaagaaacttgatcatgaaattacattttttaataagcccgctgcgcatgcaggcttgtttacagtggaatgggtcagcggtgcggggtgtcgatggattctccgcgggcgaagctgccggcgatgagccgctgctccggcaaagcggtgcggggggattcgatctcctcgatcagcagctcggcggcggccttgcccatggcctcggtgtcctggcggtaggtggtcagctgcggcgacatgacctgcgagatgaggttgccgtcgtaaccggctaccgagatgtcccgcgggatcagcagcccttcctcccggatggcctgcacaccgccgatggcggagaagtcgtccgggaacaggattgccgtgggccgctggggtaagctgagcagctggcgggtggccttggcgcagccgatggcgtcgcggtaggtgccggcgatgacgtattcatccggcaccgtgatgccgtgggcggcgcaggcgcggtagaaaccgaccagacgcttttgggtaacggcgctgtgctgttcgccgtggatgtaggcgatgcgctcatgccccaaggcagtgagctgatccaccagctggcggatgccgtccacgttatcggagagcacagcagcccggttgttgaacacatggtcgaccgtgaccagcggcagattgctgtaagccagctccacgacctcggggtcgtcaaactgtacgcaggcggcaatcacaccgtcaacgccgcggtagcggcaatgctctaagtaactggaatggctgtggccaatgttgtggttgataaaggtgatgtcgtagcccctgccctcggcgtggcgcttgaagctgtccagcacggcggcgaagaactcatgggtcaggccgctctgggcttcgtctacaaaaaggacgcccaggttgtaggtgcggttggtctttaaggcgcgggcggcgctgttgggcatgtaccccagctggcgggcagcctcgcggaccttctctttggtggcctggctgatgtcgttatggccgttcagtgccttgctcacagtagctaccgagaccccgcaggcttttgcgatgtccttgatggatgccatgagtaccacctcccggtcatgtgtttggtttggatcgctttgtttggggtttgcgtcccttaatcgttttcgcatcttcactatacaacaggtcaaccacaaaatcaagcgtttttcacgattttttgtgcacatcgatacgatttggcgttttgcaaaaatcagaagtccgtcttttggcagtttcgtttgctgttttcgtgaatttctgtcgaaatccggggtgattttgcagggaagcgctgcttatggtttcgctggcagggtgaaacaggcggtttttgggtgccaggctggcgttgtatgggtgttttgcggggattttgcaggcggttcatgaaagttccctggccccgctctcccacggcccctattataaataaggtatagatgggctttcgtgccagatttcagccggcaaaattgtgaaacttgccaaatcatcgttatttttacgcataagtcttgcaattgccgaagaaatgcgctattgtagaggtaataacttaatcgttttcgacttgaacttttcaaaaaacaggtatcccatttgtaaggagaggatctctatgaagttcggtcactttgatgacgacgcacgggaatacgtcatcaccaccccgcgcacaccgctgccgtggatcaactacctgggcagtgaggctttctttagccttgtctcccacacggcgggcggctacagtttttacaaggacgccaagctgcgccgcatcacccgctaccggtataataacgtacctgcggattctaacggccgctattactatattaaagagggcagcaccatctggaaccccggctggcagcccacccagaccgagctggatttttacgagtgccgccacggtctgggttacagcatcatcaccggcaaaaagaacgggctggccgcgcggctggagctgttcgtgcccgtgggcgacaactgcgagattgaccgtctggtactgaccaacgaaagcgacgcgccgaaatcgtttactgtattcagctatgtagagttctgtctgtggaacgccgtggacgattccaccaacttccagcgcaacttctccaccggtgaggtcgaggtggagggcagcacgatctaccacaagaccgaataccgcgagcgtcgcgaccactacgcgttgtacaccgtcaacgcgccggtagacggctttgacaccagccgggatgcctttttgggtgcctggcgcagcaatgccaaccccgaagtggtagaaaaaggtgcctgcaccaactcccacgcccacggctgggcaccggtcggcgtacaccaaatcaacgtaacgctaaaccccggcgagagccgcagcttaatttatatactgggctacatcgagaacccacaggaggaaaagtggaccgcccccggcgtcatcaacaagacccgcgcccatgagctgatggcccgctatgccaccgacgcgcaggtggatgaagccctggccaagctgcacgcccactggaacaacctgttgtccacctacatggtcaggagcagcgacgaaaagctcgaccgtatggtgaatatctggaaccagtaccagtgcatggtcaccttcaacatgagccgttccgccagctactacgagagcggcaccggccgcggcatgggtttccgggacagttgccaggacttgctgggctttgtgcacctcatccccgcccgcgcccgcgagcgtattctggacatcgccgccacacagttcccagacggcagcgcctaccaccagtaccagccgctgaccaaaaagggcaacatggacgttggctccggctttaacgatgacccgctgtggctgattgccgccgtctacgcctacctgggcgagaccggcgacatgagcatcttggacgagcaggtggacttcgacaacgaccacaccctcgcccagccgctgctggaacacctgcgccgcagctttggctacctgacgacccacaaaggcccccacggcctgccgctgattggccgcgccgactggaacgactgcctgaacctgaactgcttcagcgacacgcctggcgagagtttccagaccaccggccccagcgaaggcccggtggccgagagcgtttttatcgcaggtatgtatgttaaatacggcaacgagtttgccgagattctggaagccaccggccatgccgatgaagccgccgctgtgcgtaaagaagttgccggcatggaacatgccgccctcaccgccgggtgggacggcaaatggttccgccgcgcctacgatgcctacggccatgtggtcggcgggcaggagtgcgaggaaggccagatcttcatcgagccccagggcatgtgtgtcatggcgggcatcggcgtggacaccggcgaggccgtgaccgcgctgcagagcgtacagacccggctggacaccaagtacggtattgttttgctgcagcctgcttataccaaatatcatctggagctgggcgaaatttccagctaccccccgggctacaaggagaacgcaggcatcttctgccacaacaacccctgggtcagctgtgccgagaccgtcgtcggccacggcgaccgggcgtttgagatttacaaaaagacctgccctgcctacatcgaggacatcagcgagatccaccgcaccgagccttacgtctacagccagatggtggcaggctgtgacgccgccacctttggcgaagcgaaaaacagctggctgaccggcaccgccgcctggacctttgtggatgtgagccagtacatccttggcatccagcccacgctggcggggctgaagattgacccctgtctcccccacgagatggacggcttcaccctgcgccgcgtctggcgcggggcaacgtatgaaattacggtagacaacaccgcccacgccgaaaaaggcgttgcgtctatgacggtaaacggccagcccgtccccaccaacaccctctcccccgcccccgccgggaccaccgtgcaggtcaaggtcgtgatggggtaaccctttagcagacaataaaaaggcttcctctgtgagacagacttccccgatacgggggagacggcgcgaagcgccagaaggggagcgctgtcgcactcttaaaacaattgcaggggcgcacactgtgcgcccctgcaatatgctctacacttttttattcttcctctttttccttttccttaatatccggcgctaaatccccgccgggcattttgtggccgaaggaagggacgaagaagaacttgcggataataaagatcagcgcaatcgcccccacgctgacaaggttctgcacggcatcctcgtggccaacgatcatgtggcgggcgatggcatacagcagcacttccagcacgctgccggggctgtgcttggccagcatcttgataaactcaatgccgatgacaatatccagcgcccgttccaaaaactcccgcacttccacactgttgccgtgggtcagcaggcccggcagtaattgcagcaggggcgccacgctcagcagcagcgccaccagcacaatggccgaaagcaccacttccagcagcccggccgcctcggccacctggtcgcgaaagacctgcttgacgtgttcttccttgcggtgcagcgcacttttggcaatgcgaggctcgtaatccttcaaagacatggggaaattcctcatttcataaaaattctgcttgtattgtagcatacaacgcccatccacggcaacagaaagtttcctgtgcggcgttcccctgcccgtgctgtatacgcccgccgtacattataatgcctgtgccatagcctgtgccgtgtccggtgcatcgtccggttaaagtcatacctttgtcctgcaaaccccatcaaaaacgacaaaaagcgccggtcaaaactcaccctcgtggttttttggctgaaaaagacaaacccatcttgcaatttgttctcctacgctttacactactcttacagggttttcctgacttatcagtaaagggggagcttacgtgcagtacacgatgcagcatcgcagtcatcacgcgggttccctgtaccctgccggtatcgcagtagaagtatagcgcagtgtacccatacgggccgcactgcgctttttgctttttggggaaaggagtttaccatgaaaaaagttgccatcatcatggggtcggacagtgattggccggtcgtaaaatctgcctgcacggtgcttaaggatttcggcatcccgtttgaggcacacatcctctcggcccaccgcacgcccgaagccgccgctgactttgccaagtccgcccgtgccaatggttacggcgttatcctgtgcgcggccggcatggccgcccatctggccggtgcctttgccgccaacaccaccctgccggtggtaggcatcccgatgaagggcggtgccctggacggcctggacgcattgcttgccaccgtgcagatgcccagcggtttcccggtggccaccgtggcgctgaacggcgccaagaacgccgcttacctggccgcggccatccttgccgtggctgatgacgacctggccgccaagctggacaagttccgtgcggacaccgccgccgctatcgccaaaaaggacgccgccatcgccgccgaggccgccgcgctgtaaggcacaaaaaggcgtcaaagccccaacaattttcttgcacattgtccaaaaacagggtacaatgaaagtacccgctacttattataataacccataataaaaggagcgttttacgatgaattacgaagttaaagagcagatgtacgaaggcaaggccaagcaggttttcgctaccagcgaccccgagatcgtaatggtccactacaaggacgatgccaccgccggtgacggcgagaagaagggcaccatccgcgacaagggcatcgtgaacaacaagctgtccaatgccctgatgcagaagttggagaaagagggcatccccacccattatgtgcaggagatcaacgaccgcgacacctttgtaaagaaggtcgagatcgtgcccctggaggtcatcatccgcaacgtcgccgccggccacttcaccctgcgcatgggcgtgcccgagggtaccgagttcaagacccccatcctggagttcagctacaagaacgacgacctgcatgatccgttcatcaaccactactatgctctggctctcggcctggccacccaggaagagatcgataccatcaccaagtacgccttcaagatcaatgaagtcctaaagaagatcctgctggatgccaacatccgcctgatcgacttcaaggtcgagttcggccgcctgtccgacggcaccattatcctggccgacgagatcagccccgacacctgccgtttctgggatgccaccaccggcgcacatctggacaaggacctgttccgccgcaacctgggcggcgaggctgatgcctaccaggaagttatgaagcgcctgctgggctaaatttccgcaaacggaacggagcatagaatgagcgaaatttcccaattcagccagggcctgcacgaggagtgcggtgtctttggcatgtacgataagaccggcgcgaccgatatggtcagtgccgtatacagtgcgctgtacgccctgcagcatcgcgggcaggaaagctgcggcatcgccctgaacgtggacggtgtgctttccggccaccgcgacttggggctggtgagcgaggtgttcaccaagcgcgtgctggaggacctgccccgcggcgccaagatggccaccggccacgtgcgttacgccaccgcaggccagcgcagccgttccaacgcgcagccgatgattttgcatcactgcaagggtgccatggccgtatgccacaacggcaacctggtcaacgcccccaagctgcgccgcaagctggagatgagcggttccatcttccacggcacctcggataccgaggtcatcgcctacctgctgacccagaaccgcctgctgacccccaacattgagatggccgtcagccgcacgatggacgacatcgagggcgcgtattctctggtcatcatgacccataccaagctgatcgccgcccgtgaccccaacggcttccgcccgctgtgcatcggcgagctgcccgatggttccggctgggcctttgccagcgagagctgcgccctggacgccgtcggcgccaaattcgtgcgggacgtcaagcccggtgagatcgtcatcgctgaccgcaacggtctgcgcagcatcgaggatcactgcggcaccgctccccacacgatgtgcgtgttcgagtacatctactttgcccgcccggattccatcatcgagggcacctgcgtccatgaggcccgcctgcaggccggccgtttcctggcgcaggagcatcccgtcgaggccgacgtcgtcatcggcgcgccggattccggcctggacgccgccctgggttacgcccaggagagcggcatcccctacggcataggctttatcaagaacaaatatgtcggccgcaccttcattcagggcagccaggcccagcgcgagagcagcgtccgcatcaagctgaacgccatctcctccacggtcaagggcaagcgcgtcgtgctggtggatgactccatcgtgcgcggcaccaccagtgcccgcaccatccgcctgctgcgcgaggccggcgccgccgaggtacactaccgcatcagcgccccgccgttcgcccacccctgctatttcggcaccgacatccccgacgaaaaagacctgatcgccaccggccatacggtggaggagatcaacaagctggtgggttccgacacgctggggtacctgagcatcgagcatgtgcagcagctggccatccacagcaagtgcgggttctgcaccggctgctttaccggcaagtaccccgtggccccgcccaccgagacgatggacatcgtctacgataagccgctgagccaatccaacagcaataaaaaattgtaaattaacgttggcaatggattttcccacacgtttgtaggggtcgatgctcgcatccgcccctacacaacaggaagtcaatgcccgcggacacatgttaccgcaaactctactttgataggagtacaccatggaaaaaagctattctgccagttacgccgctgcaggcgtggatattacggccgggtatcgttcggtcgaactgatgaaacagtatgtcgcccgcaccatgaccgagaactgcatcggcgggctgggcggcttcggcggcctgtttgagctggattgctctggtatggagcatcccgtcctgatctccggcaccgacggcgtgggtaccaagctgcgcatcgccatgctgctggacaagcacgacaccatcggcatcgactgcgtggccatgtgcgtcaacgacgtgatctgcgccggtgccaagccgctggttttcctggattacatcgcctgcggcaagaacatccctgagaaaattgccgagatcgtcaagggcgtggccgagggctgcgtgcaggctggctgttccctggtgggcggcgaaactgccgagcatcccggcatgatgcccgaggatgagtacgacctggccggtttcaccgtcggtgtggtcgacaagaccaagatcctggacaactccaccatgcaggcgggcgatgtcatcatcgccctgccctctaccggcgtacactccaacggtttctcgctggtacgcaagatttttgatattgacaacaaccccgatgtgctgaaaaagacctttgacggcatggacaagcccctgggcgaggccctgctggcccccacccgcatctacgtcaagcccgtgctggctgtgatggacgaggtcaaggtcaagggcgtttcccacatcaccggcggcggcttctacgagaacatcccccgcagcctgaagaagggctgcgccgcccgcattgccaaggccgatgtgcgcatccccgccctgtttgatgtaatgcagcgcgagggcggcatcagtgagcatgacatgttcaacacctttaatatgggcgttggcatggtgctgaccgtggcccccgaggacgccgacaaggctatcgccatcctgcaggcccacggcgaggacgcctaccgcctgggcaccatcgtcgagggcgacggggtggaactggtatgaagcgtgtagcagttctggtctccggcggcggcaccaacctgcaggctttgctggaaagtgagcgccgcggcgagaaccccaacggccggatcgtgctggtggtcgccagcaagcccggcgtctacgcgctggaacgcgccgccagctttggcgtggaatccgccgtggtcagccgcaaagactatgccgacagcgccgcctttgacgccgccctgctggacaccctgcaaagccataatattgacgtggtggtgctggccgggttcctgagcgtgctgggcgagaaggtcattgccgcttaccgcaacaagatcatcaacgtgcatcccagcctgatccccagcttttgcggcccaggcttctacgggctgaaagtccacgaagccgccctggcccggggcgtaaagctgaccggtgccaccgtgcatctggtcaacgaggagtgcgacggcgggcctatccttttgcagaaagccgtggccgtccagcccggcgacacccccgaggtgctgcagaagcgcgtgatggtcgaagccgaatggaagctgctgccccaggccctggccatggtgtgcagcgatgaggtataaacaatgaagaaaaatctgtacaaatatctggccggtaacgagtatcccggccgcggcattgtgctgggcctgacccccgacagcaaaaaggccgtggtggcctactggatcatgggccgcagcgccaacagccgcaaccgcgtgtttgagcctatcgagggcggcatccgcacggtggccgctgaccccgccaagctggaagacccgcacctcatcatctataacgccgtgctgaccctgcgggagaccaccgtggtcaccaacggcgaccagaccgatacgattgcccgattcatgaacggcaacctcttccccggttacagctttgaggctgcgctgtccacccgtacttacgaggacgacgcccccaacttcaccccccgcatttccggcgtggtggatatgcgccgcggcggctacaagctgtctatcgtcaaatccaacgagggcaacgccgccagcgtgcagcgctataccttcgattacccccagcccgttgccggtgagggccacttcatcagcacctaccagaagaacggtgcgcccatccccagctttgccggggaaccgctgcacgtcgccatcgatgagaacgaccccgataagtttgccgacaagctctggaagaacctgaacgaggataacaaggtcagcctgtttgtgcgcagcatcgagctggagaccggcacctacgaggacgttatcctgaacaaatacaccgctgtggagggttaatatgaacgaatttcagctgaaatacggcaccaaccccaaccagaagcccgcccgcatctacatggccgacggctccgacctgccggtgcagatcctgaacggccgcccgggctacatcaactttctggatgcgttcaactcctggcagctggtgcgcgacctgaaaaaggccctgggccagcccgccgccgccagcttcaagcatgtgtcccccgccggtgcggccatcggcctgccgctggatgacaccctgcgcgccatgtaccacatcgcccccgagaccgagctgtctcccctggcctgcgcctacgcccgcgcccgcggcgccgaccgcatgtccagctttggcgactggatcgcgctgtccgatgtctgcgacctctccaccgccaagctcattcagcacgaagtttccgacggcatcatcgcccccggttacgatgctgacgcgctggaagtgctgaaaagcaaaaagaagggcaactacgccatcgtgcagatcgacgccgcctacgagccgaaaccgctggagacccgcaccgtctttggcgtgaccttcgagcagggccgccaggacctggacatcagcgacgccacgatgctgcagaacatcgtgaccgagaaccagttcatcagcgaggagcagcgccgcgacctcatcatcagcctcatcgtgctgaagtacacccagtccaacagcgtttgctacgtgcaggacggccagaccatcggcgtaggtgccggccagcagagccgcgtgcactgcacccgcctggcaggccagaaggctgacaactggcagctgcgccacatgcccaaggtgctgaacctgcccttccgccccgacattgccaagcccaaccgcgacaacgccatcgacgtctacatcggtgatacgccgcaggatgtcatcggcgatgacgtctgggctgaaacctttaccgagcagcccgccccgctgacgctggacgaaaagcgcgcctggctggatgccgtgaccggtgttgccttaggcagtgatgctttcttccccttcggcgataatatcgagcgtgcccgccgcagcggcgtaacggccattgtgcagccgggcggctccatccgggaccagcaggtcattgatacctgcaacaagtacggcattgcgatggcgttctgcggcatccggctgttccatcattaaacgcaaaaaacaactcgcctgcggcgatttttcgtcgcgggctgttgtgctgtcaaggaggacgcttatgaaaattctggttgtaggcggcggcgggcgcgagcacgccattatccgcgcactgaaaaaaagccccctctgcaccgagatctggtgcgcacccggcaacggcggcatcagctatgatgcccactgcaaggccatccccgccaccgacgtggacgccatggtcgcctttgccaaagaggaagcctttgactatgtagtcgttgcccaggatgaccccctggccctgggcatggtcgacgccctggcggcggtcggcatcccggcctttggccccgacaaagccgcggcccgcatcgaggccagcaaggtattcagtaaggacctgatgaagaaatacggcatccccactgccaagtacgagaccttcgacgaccccgctaaggtcatggcgtacatccgtgccgagggcaagtatcccgtggtcattaaggccgacggcctggccctgggcaagggcgtgctgatctgccagaacgagcaggaagccgccgacggcgtgaaagagatcatgctggataaaaagttcggtgcatcgggcaatcatgtggtggtcgaggagtttctcaccggtcccgaggtcagcgtgctgtccttctgcgatggaaagaccgtcaagccgatggtctccagcatggaccacaagcgtgcgctggaccatgacgaaggcctgaacaccggcggcatgggcaccgtggcccccaacccctactacacccccgccgtggccgaccgctgcatgaaggagatcttcctgcctaccgtggccgccatgcaggccgaggactgcccctttaagggctgcctttactttggcctgatgctgacccccgatggccccaaggtcatcgagtacaactgccgctttggcgacccggagacccaggtggtgctgcccctgctggaaagcgacctgctgaccgtgatgcaggctaccaccaacggcacgctggataagaccgaggtcaagttcagcgacggcgctgccgcctgtgttattctggccagcggcggctatcccctcgcctacgagaagggcaaggagatcaccggcctgaccgagggccagttggatgccgccgacgtgaccgtctaccatgcgggcaccgccatcaaggagggcaagctggtcaccaacggcggccgtgtgctgggcgtgacggccaccgccgccaccctgcccgaggcactgaaaaaagcctacgctgccagcgagagcatccactttgacaagctgcacaagcgcagcgacatcggcgcaagagcgctggctgcgatgcagtaacggaggaatatacaatggtatatcgcatttatgttgagaaaaagcccggttttgacggcgaggctcagggcctttgccacgagctggtcgacctgctgggtattaaggccctgaaaggtctgcggctcatcaaccgttatgatgtcgagggtatcgacaacgtcctgttccagcaggccatccctactgtcttcagcgagccgccggtagacaccacctacaccaccctgcccgaggcccagcacgtttttgctgttgagtacctgcccggccagtttgaccagcgtgctgactctgccagtcagtgcatccagctgctcagccagggcgagcgtcccaccgtgcgcagcgcccgcgtctacctgctggagggcgatttgaccgaggacgacattgccgccattaaaaagtacgtcatcaaccccgtcgaggcacgcgaagccagccttgaggagcgcagcaccctcaagatggagtttgccatccccaccgaggtggagaccctgactggctttaccgccctggacgacgatgccctggaagccttccgcaacgagaagggcctggccatggaccacgccgacatcaagttctgccaggactacttcaagtccgagcaccgcgaccccaccatcaccgagatccgcctgatcgacacctactggtccgaccactgccgccacactaccttcggcaccattctggacgacgtgcagatcgatgacgagctggtgcaggctgcctttgaccgctacatggccctgcgcgaggagaccggccgcgacaagaagaaccgcaccctgatggactgcgccaccatcgccgccaaggccctgaagcagcgcggcatcctgaagaacctggacgagagcgaggagatcaacgcctgcaccgttaagatcaagtgcgatgtcgacggcgagctgcaggactggctgtttctctttaagaatgagacccacaaccaccccaccgagattgagcctttcggcggtgctgccacctgcatcggcggtgccatccgcgatcccctgtccggccgcagctacgtctaccaggccatgcgcgtgaccggcgcagccgacccgctgaagcctgtctccgagacgatgcccggcaagctgccccagcgcaagctggtcaccaccgccgctgccggttactccagctacggcaaccagattggccttgccaccggccaggtctctgaactgtatcaccccggctacgctgccaagcgcatggagatcggcgcagtcgtgggcgcaacgcctgccagccatgtccgccgcgaggaacccgcccccggcgatgtggtcatcctgctgggcggccgcaccggccgtgacggcatcggcggcgccaccggctcctccaaggcccacaagctgaccagcctggagacctgcggtgccgaggtgcagaagggcaacgcccccatcgagcgtaagctgcagcgtctgttccgccgcgaggatgcctgccgcctcatcaagcgctgcaacgactttggcgcaggcggtgtctctgttgccatcggtgagctggccgacggcctgaagatcgacctgaacaaggtcactaagaaatatgagggtctggacggcaccgaactggccatctccgagagccaggagcgtatggctgtggccgtcgctgccgaggatgccgagacctttatgcagtacgccgccgaggaaaacctcgaagctacgatcgttgccaccgttaccgaggaaaagcgcatgcgcgaattctggaacggcaaggccatcgtcgacctctcccgcgagttcctgaactccaacggtgccgagcgtcacgccaacgtacacatcctcaagggtcatgtctggcagccccagtttgccggtgctacctttgagcagaagatggagcacctggtctccgacctgaacgtctgcagccagaagggtctgggcgagcgcttcgactccaccatcggcgcagccactgtgctgatgccctacggcggcaagtaccagctgacccccaccatggccatggctgccaagctgcccgtggacggcgagaccaccacctgctccggcatggcctggggcttcaacccctacctgaccgaggccgacccctaccgcggcgcttatctggccgtggtcgagagcatcaccaagctggtgtgcgccggtttccaccacgagaatatgtacctgaccttccaggaatactttgagcacatgaacgacaagcccgagcgctggggcaaaccgctggccgccctgctgggtgccctggatgcccagatgggcctgggcatcgcctccatcggcggcaaggactccatgtccggcagctttgaaggcctggatgttccccccacgctggtcagctttgccaccgccatcggcaatacccgcgatgtgcagagccccgagttcaagaaagccaacagcgccgttgttatgctgcgtccccagtataaggacggcctgcccgagattggcagcctgattgccatttacaagaccgtcgagcagatgatcgaagaaggcaaggtgctgtctgccgctacccccggttacggcggcgtggccgaggccctgttcaagatgtgcgtgggcaaccatgtgggcctgcagctctccaacgacctgaacttcaacgacctgttcaagcccgcttacggcagcgtgatcttggagctgctggacccgtccgccggcgagttcctgggctttaccaccgtggactacacgctggaagccggcaaagagatgatcgacctggccaagctgcaggagaagtgggaagccaagctggagccggtcttcccctaccgcaaggccggcccgactgtgcccgcgctggagcatgactgccccgccaacaagcgcgtggcccccgccgtgcgcctggctaccccgcgggtcattatccccgtcttccccggcaccaactgtgagtatgataccgcccgcgccttccgccaggccggcggcgacccgcacattctggtgctgaagaacctgacccccgccgatgttgccgagagctgtgaagccctggtcaaggagctggacgaggcccagatcctgatgctgccgggcggcttctccggcggtgacgagccggacggctccgccaagttcatcgcggcgttcttccgctcccccgctgtggccgatgccgtcaaccgcctgctgaaccagcgcgacggcctggccctgggcatctgcaacggcttccaggctctcatcaagctgggcctggtcccctacggcgagatccgccccatcacggccgatgacccgaccctgaccttcaacaccatccatcgccaccagagcatgctggtgcgcacccgcgttgccagcaataagagcccctggctgagccgctgcgacatcaacgatgagcacctgattgccatcagccacggcgagggccgctttgtctgcagccagacgctgctgaaccagctgatcgacaacggccagatcgccacccagtacgtcgacctgacctgccagcccaccatggacctgcgctacaaccccaacggctccgtaatggctatcgagggcatcaccagcccggatggccgcgtctttggcaagatgggccacagcgaacgctacggcgaacgcctgtacaagaacgttaccggcgacaagtaccagcctatctttgagggcggcgtgaactattttaagctgtaagaaagtagaggacttttcccatggcacaacatgaccgttatatttccccgttctcgacccgctatgcctccgacgagatgcagtacatcttctcggacaacaacaagttccgcacctggcgcaagctgtggatcgcgctggccaaggccgagcagaagcagggccttgccatcaccgatgagcagattgccgagctggaagcccacaaggacgacgtgaactacgaggatgccatcgcccgcgaaaagctggtgcgccatgacgtcatgagccacgtctacgcctacggtttgcagtgccccaaggccaagggtatcatccatctgggtgctaccagctgctatgtgggcgataataccgacgtcatcatcatgcgcgaggctttgcagctggtgcgcaagaagatcatcggcgtactggcgaacctggccaagtttgccgacgagtacaaggatatgccctgcctcgcctacacccactgccagcccgcccagctgaccaccgtcggcaagcgtgccaccctgtggatgaacgagctgtacatggatttggaggaggttgaccaccagatcggccagctggcgctgcgcggcgtcaagggtaccaccggcacccaggccagctttatggagctgttcggcggcgattccgccaagatcaaggccgtcgaggctgacgtctgcgcccagatgggctttaccaaggtcgtgcctgtctgcggccagacctacagccgcaaggtggactacaatgtgctgtccgccgtggcaggcctgggccagagcgctatgaagatggccaccgacatccgcctgctggccaactttaaagagatggaagagccgtttgagaagaaccagatcggttcctcggccatgccctacaagcgcaaccccatgcggtgtgagcgcatctgcgccctgagccgctacctgatggtggacgtgctgaaccccgccatgaccgccggcacccagtggttcgagcgtacgctggacgactctgccaacaagcgcattgcgatggccgagggcttcctggccgctgacgctatcctgaacatcctgctgaatgtttcggacggtctggtggtttaccccaaggtcgtgcgtgcccgggtgatggccgagctgccgtttatggccagcgagaacatcatgatgaaggccgtcaagaagggcggcgaccgtcaggagctgcacgagcgcctgcgtgagcatgccgtggccgcagccgctgtggtcaagcaggagggcaagcccaatgacatgattgcccgcgtggaggctgaccccgccttcggcctgagccgcgaggagatcgaggccgagctgagccccgaagccttcaccggccgcagcgctgagcaggtcaccgagttcctgcgtgacgtcatccagcccgtgctggacgccaacaaagaggacctgggccagcatgtggagctgaacgtctgatttattgcatcgtaaattgtaggggcgcatgcttgcatccgcccgcaggtcgatgacaagcatcgacccctacagaacagcaaaatacccgtactgtcttactaaaggcaatacgggtattttttatgcaattgtatcggcggacgtcaggccggattccaacacatccgccataaacgcgctgtggtcagcgtaatcgccggtgggcacaagggtgatgtcgtaataggtgatcggcatgtcgttgctttccagcacctgcttgagggtgtgcaggacggtttgcatgtccgcctcggtaggcttgccatcgcacagtacttgtgcgcacaggcggctgggcaccttttgcagcagggctttgtcaaaggcggcatccagcggcagatcatccacatagtcagccggggtcataccgtcctgctcggtatagcaaaggtcgatctctaccgtgttgccctttgcgccgtagacagatgcaaagtttaattcgggggcctgcacggtcagatacgcggctgcctgctgggcagcttcatcccccaggcggtaagcggtgttccagcggtggtctacacagaacacatggtctggctcaagctccttaccccggatttcatcatcagtcagcagccagaaccgcgtctgcactgcaaagtttgtgtcactgctctggtcagactgaacgtataccacatagtggaagaactgtccatcagcggcggtgcgctggtcccagtgaaatgtttcctccggatatagcttttccgcatagcgaatagcccggtatatggcccactgttggctgagcgggtcgccgttgatggcatcaaaggccagcagcagcgccaaaatcagcagcagggccgccgccagcgccaggcggcgcatggttttcgtctttttattctttgttttcatgggtactctcctttgcatagtgcagcagccagccgatcagccagcctatgccgcccaaaacagcgtacaagatacagccggacgccagattccataagaaattgctaagcgagaatgattccaaaaaagccgtctgctttatgatagcatccagcacggccagccccagcgtaaacagcagcagcggcttgcccatgccggtatcccggcaggtcagaacggcccagacacacggcaggaacaggatgacccagttggcgctgcctgtataccccagggccacgcccgccgcaatgcccacaaaggccagcagcagcaaatgggtgctgtatcggcggcgcagtttttgcaggatcttaccgtcatccggggcgggcagttccggcacggcgggggcgtctgccccctgccgcaaagcgcggcaggccgggcaggcggccaggtgggcttttaccagcgcttcactttccgggctggctacgccgtcctgcaccagaggcatcaggtcgcggcagaccgcgcaggggatttttttgatttcggcagcttctttcacaggtcgtagccctcctttgcaagttgttgttttagccaggtgcgggtgcggtgctcgatgacgcgagccgaactttcgctgatgcccagccgcgcggcgatctcggcgtagctgtagccttgtgcccgcagctgcaccacgcggcgggcacggtcatctttttgctgtaatagtgcctgtacccgctgccattgcaggcgggtgtcggtgtggtccggcagggtgtcgtcggtcaggtaggtctctaacaggtcgtcggcgctgacggtagggcggcgcttgcgcaggctttccagccagacgttgtgggcaatgccgaacagccaggtcttgactgcacaatctccgcggtaggtgtgcagccgtcgcagcgcccgcagaaaggtctcgctcaacaggtcctcagcttcggcggggtcgtgggtcaggtggcagaggtagcggtacaggtcggtgcggtaggtgttatacagttcttccagttctgggtacggcatccgcggccctcctttctgttggcgttcatcctattagtgcgggtttttgcgcccgcgttacaggcagatataaaaattgccccggcacaaggct

SEQ ID NO: 7777 - DNA, 20040 bp, Unknown
  gut microbiota DNA sequence
agcaacaacagctcttcctccagctcttcctcttccagcaacaagaccaccactgcctccagcaaggctgagcagaaggtcgtcaaggctgccgctgccccggctaacaccaccaaggttctgcccaagaccggtgcttccaatgttgctccgctgctcggcggcagcctggcagttgttgccctgctgatgggctacggcgtttacggcctcgttctgcgcaagaaggactaagataaacctttgaccccccgcgccctttgggcgtaacggatattggtttacctaaaattgtgtggtttccccatagggtagcggtacccaatgctgccgctcctgggtgggcgcgctagcatccaccaaacccgatgcgattcaacacaaaaacacccccgcacggattcataccgtgcgggggtgttgtcgttataaaggctcccctcaaggggagccatttgcatcatccaaaattcagccccaaacttgccctaatatcccggctggtgtggcccagacgcagcatgtagcggccgggggcggcgtaccaggcatggcgggcggggtcatagtgggccaggtcccgcgccgtcagcacaaattccacgtcccgctcctcgccggggtccagccaaaccttgctgaaaccccgcaaaacctgcggcacccggccgcccgcaatgggggcgccggtctcgtcactaatataaagctgcaccacctcggccccgtgcacggcgccgctgtttttcacggtgacacatacttttacctcgccgccctcggccagcgtgttagcgcttaaccgggcattgcgatacacaaacccggtgtagctcatgccgtggccaaagggccagcgcaccggcatacggcgggcatcgtaccagcggtaacccacgtacacgccctcgcggtagtcggccgtgcggccgtcgccggggtagtccaggtagcagggcgtatcctccagccgcaggggccaggtctcgggcaggcggccgctggggttggcgtccccccacagcagggcgtcggtggcttcgcccacgccctcgcccgccaaatacatacatagcaccgccgaaacatcccccgcccacgggcactccacaggtgcgccggcgtgcagcaccaccacggtgtttttctgcaccgccgcaatgcgggcaatcaggttgttctggcagtccggcaggcgcagggtgcggcggtcggcatcggggctgacgaaactttccggcaggcccgcaaacactacggctacatcggcgtgcaccgccgccgataccgcccgcaggaattcgccctcgtcccgctcgtccctgttggcgggaaagcccttcacataccccacgcggcggcctttcagcagcgcggcgtccagcgcaccgatggccgcaggggtgggctgaccctcgccataatagcgcggggtctcggcaaacgcgccgatgtacgccacccgctgcccggccctgagcggcagtgcgcccaaattctgcaccagcacgccgcactgtgcggccagctgcaccgccagcgcgtgggtgggtgcggtggacggtgaatcggtggttttggcggcgggctgcggcaaaagcgcggcggcggcctcggccaggggtacgccgttcagcgtgccgctgccgtaccgcaccccctgcggcccggcctgcagggccgctgcggcgggcggcaggtagatctcctgcagtgtgcgctcatctacgcggcggtccggggcgtcggtgacctggctgcagcacagcagcggccccaccacggcattttgcgcgccgcccacaaccgctgccgccagcgcggcggtcaggtgcgggtcctcactgaacatggcaaaattgcggccgcacagcgggctgcgcttgatgttggggtcgacctccgcctgcccctgcgccgcgcccacgctgcgcgccagggcagggtcaaagctggccgccacggcacacgccgccggcagcaccacacccgccttttgctgaacggacatagaaataacgctcctttttttggaatattgttcattatagcacacaaaacatggtaaaataaagggaaaaagccgaattgtaacaagtcgtacacaactgcccgctacactgggggtggaaaggggataaacatgacaaaagtgctgatcgctgaggacgagcggcccatcgcccgcctgctggaaatgaacctgacccgcgccgggtacatatgcaccctggcgcccgacggcctgaccgccgctgatctgatcgagaaaaacgactacgacctggccctgctggacatcatgctgcccggcctggacggctacgccctgctggattacctgcgcccccagggtgtgcccgtgatatttttgaccgccaaggccgccgtgaaggaccgcgtgctgggcctgcggctgggtgcggatgattacattgtaaaaccctttgccatggacgagctgatggcccgcatggagatggtgctgcgccgcgccggcaagggcggccaccagctgcaggcctttgatgtgacgctggacagcgccgcccacatggttttgcagcgcggccagcccgtggagctgaccccgcgggagtttgccctgctggagcagctgatgcgcaaccgcggggcggccatttaccgcgataccctgatggagcgcgcctggggcggcgacgccgagaccacccgcgcggtggatacctatattaccagattacgcaaaaagctgaactggggcgataagatcgagaccgtttaccagatcggctaccggttaaagcaagaatgaggcccgacgaccgccccactgcggggccgggaggtacatgatgaaatttgcccacaagatgatctgcctgctggtgctggtgcttagtgcatcctttgggctgggcgggtgctggctgctgtacagcgattttgccgtgcagcgccgtaccgttctgaccgctgacgccgccctgcacagccagatctgcaccgacgtgcagaccgacctgctggaccgccagcgccgcgggctggagatgggcggcgccgtggcggccgcgcggctggccctgcaccagcaacccgccgccctgtggcagggggaggagctggtcagcagcaatatcccggtagacgtaaacgccccgctggcggacggcaccatgacgacggtgcggtccggcgggggtacctacgccctgtttgccagcgagctgcagggcggctaccgcattgtgacggcctacgacctgaccgcgctgtatacatcccgcaacgcggcggtgcggcgctttttggggctggagactgtggtgctggcggcggctgccctggtcacagcactgctggcccgccagatgacccgcccgctgcaaattttgcggaccgccagcgcggagatcgcaggcggcgactacgaccgccgcaccgccctgcataccggcgacgagctggaaaacgtcagccagagctttgacaaaatggccgatgctgtgcaggaaaagatcgcggatctgcaggtggatgtccagcggcgggaggactttatgggcgcgttcgcccacgagctgaagacgccgatgacctcgatcatcggctacgccgatatgctgcgcaccttgcagatcgaccccgccgagcagcacgaggccgccggggccatctaccacgagagccgccgcctggaggcgctgagctacaagctgctgtcgctgctttcgttgagcgatgaacggctggagcttgcccctgtggacctgaccgacctgtggccgcggctgcggatggcctgcccccaggtgccgctgctgacgccccagggcggggctgtggtacacggcgatgcggacttgctgctggacctgctgtgcaacctggtgcaaaatgccgccaaggccagcccggcaggaatgcccgtcacggtgctgctggccgatgcaggggacaccgtggcgctgaccgtgcaggaccacggctgcggcatcccggcggataagctggcccgcgtgaccgagccattttacatggtggataaatcccgcgcccgcaagcagggcggcagcggcatgggcctggccctttgccagcgcattgccgccgtgcatggcgggacgctgcaaatcagcagccaggtgggcgtgggcaccgccgttaccgttaccctgcccaaggaggtgcagccatgaaactgtggaagaaaccccgccttgcggcggccctctgcgcggtggtggtgctggtctgcgccgccgccccggcggtgttcctctcggtagtggatgccgccagcctggggcacagccaggccgtggccgacccctacacggcacccacccccacggcggacgactactacctgctgcggcagctcagcgcccggcagctgacccaaagcaaatacaccttccagcccggcgataccgggcaggagcgcaagccgttgatctactacaacaatcaggccaacgacctgaccgatatgacaaacggctgggactatgtggataccgtgaacaccgccctgcaaagcctggccgatgccggggcgatctctcaggcgtgggccgactatgccgccgattggtacagcaccgaggagaccaccctgacgacctacgatgagaggcaatacagcctgaccgtgccctattacagcgtcgacagcctgggccttgtgacctttaagcggtttgctgtgcaaaacggcgtgcccaccaccctgatggccctgaaaatggacagccgcaccgggcaggtgtattctttttggctgtccaccccggcggattctgccgccgcccacgacccggagtctctgcccaaggaagccgccttgcgcgcctttgccgaccaggccgggctgaccagcctgggggattggacctggcgggaggacctgacctacccccgggccatctacagcctgaacggacaggcgctggtggccgctgcgtcgggcgcctacaccgtcaatgattactttacctacagcggcgctacgtcggaccgctggtatgtcagcattgaactttcgctgtgcgccgaggcgaacctgccgctgcgcatgcaggatgacacaacgaacttggaaaaggaggcaaaccccgatgcgtaaaatgtggagctttttgctggccgccctggccctgaccggctgtgccgccgccccggcggatgcactgcctgccgccgagaccgccgagatgactgcgacggagaccgaagaaactgctgcccagccggtcggatttactgtgggcaacctgagcgaggtccccaacacctgcggcggctactggggctggaacaccggcgacgcctattatgagattgcacggctggatgatgaaaatgaccaggaaagcatgcacgccctgctgctgaagaccgactacgccaccgcccagcaaaccgtgctgtgcaatgtgcccggctgcacccatgacaatgccgcctgtcccgcctggctggaggattgggcacgcaccgacgtgctggtgatgccaagcggcatctacctgtcttacgcggggctggatgatacttccccctgggagcaggtggaaaaagcgtgccgggatgatttcgagcagggcaatgtgaaaaattttgccgatgaggaagcctacatcgactactgccgccataactatgagctgagcagccgcccctccagcatcgaaaagctgaacgacgatctgaccgcccgcgaaacggtgctgacctttgacccgtccctgctgggcagcggttactttgcttactgtgatgagaatgcgctgtacgcaaaagaatattctgacgcaaacaacagccgcatcctccggctggacctgaccaccggcgaatggagcaccctcccactgaatctgggtgaacaggtgcggggcgtgaacggacaccgctttttgacctcgcgcctgctgacagatgccccgctgccggactataacgaccgcgaagcctataatgccgccctgcagaacgctcggagcgagcttgtctggctggaccccgcgaccatgcagcgggaaaagatctgcgagacggaacgccttgacggtagtacgatctatgtaaaaatatacaacgaccgcgtctatgtgcaggataacccccaggaacgcagcgagtacggcaccagctacagcctgagctactacagcaaagaccaccagcacacggtgctgatcgatacgctgcccatgaacctgtatctgccctccacagacaatggctttatgccgatgtttggcagcgaggagcgcggctggatctgggcccaggattataccggcaatggcgagatcaattatttaattgacctggataccggcgaaatgcacaccatgacccagacccagtaccgggacggcatgtacatgggcgtaagcctgatggcccagaccaacgacggccgttggatggtagggtataaaccccacagcaatacgcataacgaccgctgcgattacggcttcatcgacccgcaggaattttggaacggcggcgaaaattatactcctgtgcagatgtgggattaagaaaataaagtctgtcgttctgtggtaaacacacgggcacctgctgcaaacaaaatttttaaaaatcctgcaaaaaccttgcaaaattatgcacatggtgctactataaactcggtgaaagaattatataaaggagtgttaccactatggcatttaccaatccgtatctccagcgcgtctatgacgacctggctaagcgtaaccccgaacagaaagaattcctgcaggctgttgaggaagtcctcgagagcctggagcccgttgtggctgcccaccccgagtacgagaaggccggcctgatcgagcgccttgtcgagcctgagcgcatcatcatgttccgtgtgccctgggtcgatgacgctggcaaggtccaggtcaaccgcggctaccgtgtgcagttcaactctgccatcggtccctacaaaggcggcctgcgtttccatccctctgtcaacctgtctatcctgaagttcctgggctttgagcagtgcttcaagaacagcctgaccagcctgcccatgggcggcggcaaaggcggcgctgactttgacccccacggcaagtctgatgccgaggtcatgcgtttctgccagagctttatgaccgagctgtaccgtcacatcggccccgacaccgacgtgcccgccggtgatattggcgttggcggccgtgaggtcggctacctgtttggccagtataagcgcctgaagaacgagtacaccggcgtgctgaccggtaagggcatccccttcggcggttctctcgcccgtaccgaggctaccggctacggcctgtgctactttgccaaggaaatgctggctgacgccggcaagagcttcgagggccagcgcgtggtcatctccggctccggcaacgtggccatctacgccaaccagaaggctacccagctgggcggcaaggtcattgccatgtctgactccaacggttacatcgtggacgagaatggcatcgactacaaggtcatgaaggaaatcaaggaggtcaagcgcgcccgcatcaagacctacctggactatgtccccaccgctaagtacgtcgagggcagccagggtatctggaccgtcccctgcgacatcgccctgccctgcgccacccagaacgaactgcccctggccggtgccgaggctctggttgccaacggctgctatgcagtagccgagggtgccaacatgccttctacccccgaggcaattgcttacctgcagagccacggcatcctgtttgcccccgccaaggcttccaacgccggtggtgttgctacctccggcctggagatgagccagaacagcctgcgcctgtcctggaccttcgaggaagtggatgagcgcctgcacaacatcatggtcaacatctatcacagtgctgccgccactgccgaaaagtacggcatgaagggcaacttggtcgccggtgccaacatcgccggtttcgagaagatcgcctccgctatgatgagccagggtattgtctgataacctgtaaaaccgcataattcaaaggcccgccgtggaaacacgacgggcctttttgtatctgctttattcttttactcttagacaaagggattgagaaaagccgacatcataacacttcgattggtggcggtgcaggcgtccacgagagtgaccagattactggacgaataattgcgctggccgccgccgatgtcagtccattcaccgggaactgtcagcttcaattggtcgcagaagcggtcctgcagggtctcgaggtcaacggtgctttcgggcaggtcatcgtaggagatcgtcatgctcaggatggggccattgttgggcaggtaactgataaagatggtggcgtccagtgtaagagcgttctccggtgaggcaacttcctccggcgtggcactgcaataggtcagttgcagttgctctacaccggccgcatcagagtaaaaaatacaggtatgcagaccagtataatgatagtcgcctcgttcagcagtttcagcggcttccgtgacatcgactaaggcgagaagcgcgttcagctgttcatcgctcagcagaccacggcggttcgcctgccgcagcttgccagacattcgtgaatacttttggaaattttcctcaccaaccagaaaattattggatgcactcaaaatcttctgactatagagggcacttatggtggggtccagccgctcttcatcggtcattacaccggctacggcagggcgggtgagggccgtggtgtcggcctgccggtcccgcgcctgggtcagcagcggcggcgcagccaacagggcggcgcaaaaggcggccgtcagccaaaaacgggggtcaatcgtcagcttcttcatgggcgtacacctccttgggcagggtcagggcgacggtggtgccttcgcccacggtgctggtaaattccagcttggcgccaaaggcggcggcaatgtcggcgcaaagggccagccccacgccgctgccgccgttggcccgggcccgggccttgtccacccggtagaacggctcggtcaggtggggcagggcctcaggcgggatgccgcagccggtgtcggctacctccagccgccagcggtcctcggcgggcaggcaacgcagcgtaaccgtgctgcccggtgcgctggcgtgggcggcgttcaacacaaggttacgcagcaggtccgccagcagtacccggtcggcccgcacggcggcgtcctctgggcaggtcttttcgaggttcacggggcaatcgggcaggctgcgggccacatcctcaaaggcggcggccaccggcacggcggtcagggtcagggcttcctgccgcaggtcctgcaggctgagcagctgttggctcaggctttccagccgggtggattcatggtaaatggcatcggcggcgcggcgctggttttcgggcggcagttcgccgccgcgcagtaagtcggcgtagccgatcatgctggtcaggggcgttttcagctcatgggtcaggtcggccacaaaacggctttggcggtcgttcagctgctgcagggcagtggtgtggtggaccatcaacagtgccgccagcgtcagcacggcctgcaataagaaccactggcgcagcgtggcggtgcgggcggcgtaggctgaaccggcatccagcgctgtgaccatccagacccagacgcgctgactgctggccccggcgacttgatcgcagagcagcaatgtttgcccgcaaaggcgcatcgtggttgtgtcggcgtctttcagtgcggccaattcactttcggggatggtgtcgggcagcttggagtagatgacccggccggtctggtccagcagggcaaaggtgcaggggaccgaacccacgatcagccgctgacggtcaaaatacagctgcccggcaaaggctttatcgctggcgttgatatagcgggtaccgctgtcgtccgccaggatcatgtggggcgagtcgtcggccttgacttcctgcagggtgtcggcatagccgaacagattgcgctggtgctgcagtacagcctgatcggccagggtatccagcgcggcggtgaactggcggtccgccagccacccgcccaccagtgccagcaccagcgaaaagccgcagacagcaagggcgagggagcgtttcatgggggcctcctttctaaggtggcagagggttttgacggccccctctgggagggggctcccgcgaagcgggtgggggagagagctttgaatttagtagcggcctatttatttgtctctccctcagtccgcttcgcggacagctccctcgcagagggggccttttagaggttacggcaataacttgtaccctactttgggtacggtcacgatcttatgatcccagtgcagttttttgcgcaggcggtggatgtggatgtctaccgtgcgcggcccggcattgctgtccaggccccagactcgctcatacagggcctcgcggtagagcagctgcccccgggcacggacaagggccagcagcagatcaaactcccggggcgtcagctctacgcgggtgccgttttgggtgacgatgtggttgtccgggtcgatgacggcatcgaaagcttgcagtgtggcggcccggcggccggtgtggcgcagcaggccttccacccgggccagcagctccggcggggcaaagggcttgacgatgtagtcatacgcgcccagccgcagcccgcgcacccggtcctccaccgtggctttggccgttaaaaagatgaccggcgtgcccgtaggggcaatgtagtccatcagggtaaagccgtccacgccgggcagcatcacgtccagaagaataaggtcgaacagcgtggactccagcaggttggcggcttcgttgccggtgtgtgccttgatgagcggctggcccaggggttccagcgtcatttcaattaagtcggcaatggcgggctcgtcctcgacaattaagataggccgcatggcgggcatctcctttctttggatttgacaccagtatagcacaggcgtttttcaaaatcatttctaaatgagaaatagtgcaaacaaaaagacccccttgtgtaaggggggctgcctgcgcgcaagcgcagactgggggattgtgaccttgtggggcaaaccgacttgccaggtaaacggaacgatccctcagtcaccgtcggtgacatatccctttgcaaaagggagcctttaagaggtgcctcaattctgcaaaaactctcgtatttccttttctactgcggctacttcctcggcgaaagcgcgggcggagacgcgcagggcaccgttgcccagcacgatgatctgctcggcaccgtcgctgctcaccacgcgggtgcggtgatccttggccagctcgtgggtggtgcgctcgatgtacatgtcggcggtctcggcctcctgggtgtagactacgtacaggttgtggtgcttttctacttcccgcgtgccaccgcgtactttgtaagcgtcaaataccaagatgggcacgcagcgcttgtacccggcgtagttgcacaaaatgtccatcaggcggcggcgggcggcatccaggttcgtctcggccattttgcgcaattcatcccaggcaaaaatcacgttgtagccgtccaccagcaggtagtccggcccggtgggctggggcttggcaggggcggaagaagtcaccaccggggccgggtgggtgtgcatggcggtgcgggcggctttgccgtcgttatccgccccggcgggctggccacgacgcttgatcttgccataggtgcgctcaaaaatcgccagcagttccttgtcctgctccagcgtgccccggtaggcggccgcgcggcggcgggcgttgttggcctgtacttcctcgtcctcatcggcggcatcggtgttcaccccggcggggctgtccaggcggcgggcaagcccgctgtccacatgggccttggcaggcacctcgtcccagcggacgagataccccgcgccgtggctgcaaaagaccgagtcggccgggttctccacgtcggcgtccgggtcgtagccaaagtcagccagcacttcgtcggcgttgtggcaggcatcgtacccggcgggcagcacagaccagcggcccaggccgtgggtgtaggcggcaatttcccgggcatagccccgggcagtggctaccggcaggcggccggtcagggtcacggtgtcgctctgggcgaggggaggctcaaagctgccgcacatccgctgcacatcggccatggcgcggcccaggcaatcggcgggcagctccagcgtgaactcataccacggctccaacaattgcacggcgtttttggcttcggccatccgcaggccctggcgcacggcgcggtaggtggcctggcggaagtccccgccctcggtgtgtttttggtgggcgcggcctgcagcgagcgtgatcttcacatcggtcagcggcgcaccgatcagcacgccgggatgggtgcgctcggccagatgggtcagcaccaggcgctgccagttttcggccagactatccggcgggcagtccgctgccagctgcacgccgctgccccggaggccgggctccagcagcaggtgcacctcggcataatggcgcagaggctcgtagtggccgatgccctcgacggcagcggtgagggtctctttgtacaaaatgccgccctcgctgaaggtgacggtcagcttgaaccgctcctgcaggatgttctgcaaaatttccagctgcacttcgcccatcagctgcacatgcacctcggccagatcggcgcgccaggccacatgcagctgcgggtcctcgtcctccagggtttgcagcgctcttaacacggtgtgtgggtcggcgtcggggcaatccacccggtagttcagcaccggctccagcagtggggcgctggcgtcggcctcggcccccaggccttggccggggcgggtgttggcggggccggtcacggccaccacggtgccgggcaggcactcgctgaccagccggaacttgccgccgctgtacaggcgaagggtgtcggccttttcgccgcccggcagcgtatcttttacgtgcagcacgccgccggttactttcagccagctcaggcgggtgccggcatcctcgctgactttgaacacccgtgcgccgaattcgccccaggcggggggcatccgtgtcagggattgcagaccatgcagcaggccatccaggccgtccagccgtaaggctgcgccaaaaaagcaggggaacacctgccgccgcgcaatagccatcagcagagtgtcgtgcttaggctggccgtccgccagcacttcctccatcagtggttcgctgcacagggccagggcctcggggtccggcgcggtggtgaaatccacacagccatccccgaaccgcccacgcagctcccgtaggcgcacggcggcatccgccccgggcaggtccatcttgttgacgaagataaaggtaggtacgcggtaacgtgccagcagcttccacagcgtttcggtgtgggcctgcacgccgtcggtgccgctgatgaccagcaccgcgtaatccagcacttgcaaagcgcgctcggcctcggcggaaaaatccacgtggccgggggtgtccagcagggtcagggtggtctcctcggcgtccggcagggcaggcagcgtcaacatggcctgcttggagaaaatggtaatgccccgggcgcgctcctgggcgtcggtgtccagaaaggcatccttatggtccacccggcccagcttgcgcagcacaccggcacggtagagcaggccttcggccagggtggttttgccgctgtccacgtgggccagcagaccgatgacgagtcgtttcatttatacaaactccttagagaaaaactttctgcaatcctgaatgagagctttatcgaaggttctctccctccgtctgcgctgtcgcgcagtcaccgctccccttctgacgcttcgcgccacctcccccgtatcgggggaggctgtctcgcagagggcggcttttgtgtgggacaaaaaacgccaccgcggtgtgcgatggcgatagggtcattgtttccaggtccaccacaggtatttgatgttggtggtcaggtagcgcttaaacaggcgcttggggtcctgcatcaggcggtacagccattccaggttgtggcgctgcatccacatgggggcgcggcggatgttgccggcttcgtagtcgaaagcggcacccacacccaccatcacggcctgtaccttgtcctcgtgggcggccatccagcgctcctgcttgggggcacccaggccgacccagacgaaatccggcttggtctcgttgatgcggcggatgacggcggcgtcctcctcaggcgtgaggggacggaacggcggagagtacatgccggcaatcaccgcgccggggtaattcttctcaatagttgcttttaaaatatccagcgtttcctgcgtagaaccgtagaaatagtggcggtagtgcttgtccgcgctctctttcagcatctctttcatcaggtcggggccggtcacgcgggcggcgtccacatagccctgctcgcggctgaatttggacagcgggccgccgtccggcagggccatcacagcgccgttctgcacggcctggtaggtggggtcgtcgtgggcggtcacagtggtgtggacgttggccacgcagatgtatttgccgcgccaatcctccagcttttcctccagtagacggacggtcttttccatgtcggtgacaacaatatttacgcccatgatctcgcaggtgttcagcaggcgcaggtccacgaaccgcatgccgcccagggtgctgatctcggtgcgggagctgacgtaatcattgtacaccggcactgcggctacccgcaggtggaagttgtcggccagcatcataatgcgctgggtagtagctacatcctgcacatcctgggccagtacgatcatatcgaccttgtgggtctgcagcagttcatacaggctgtccacggtacccagataagcgggcagaccctcgcggggggcggcgtccaggtagcccacatactgcatggcggtgcttccgcggccctcgatcacatcgcggaagaagcggtgggccagctgcccgccgccgatgagcagcgcccggggcacgatgtcgtgcttacgcacgtaagcatccgccagcctgtcaaacaccagccgcttgaggtagatcataatgaccgacagcaggtaataatataccagcagcagacgggaaagctggctgacgcggaacacgtaaaacgcagtagccatcagcgccaggcccatcaggctggtcagcgcgataagaaaaagctgcttgatgctgttgcgcaggtgcagtgtgcggtagctgcccagcacggcgttacagcctacgatcaccagcgcatacagggccgaaatgggcaggaacgtccagatgtcccacataaagaactggctgcccatgggtgtgtagctgcgcagccagccggcaaagatgaaagtaaggatcagcagcagaaactcgaaagcggcgtttgcaaaccgcagaaatttggatttgtgataatgcatgcaggacctccgttgtccaggctgtcggttacagggatacaaccattcattttataataacattataaggctgctttttcaatagaaaaatggctgctcctggcaaaaggggcagccatggggtgtgcattattcgtcctcgtcgtcgtcccgcgcccagttgtaggcgcagcgcacggccttgtgccagccgcgcagccgcttgcggcgctcttcctcggagatgtcaggcacaaacattttgtcgatagcgtgttttttcgccagttcctccggcccggaccagaagccgacggccagacctgccaggtacgccgcacccagggcggtggtctccaccgaggaaggccgctccaccggcgcgttgctgatgtcggcctgagtctgcagcaggtagttgttggccgccgcgccgccgtccactttcagcgtggacaggcggatgccggagtcagcactcatggcgtccagcacgtcgttgacctgatagcacaggctgtccagcgtggcgcggatgatatggtttttgttgcagccgcgggtcaggcctacgatggtgccgcgggcgtactggtcccagtggggggcgcccagaccggtgaaggcgggcaccacgtagcagccgttggtgtccggcaccttgcgggccatgtactcggagtcgcggctgtcctccaaaatcttcagctcgtcccgaagccattgaatggctgcaccggcgacgaaaatggaaccttccagcgcatagttcacctggccgttcagcccccaggcgatggtagtcagcaggccgtttttgctgcgcacggggtggtcgccggtgttcatcagcaaaaagccgccggtgccgtaggtgtttttggcctcgcccttgttaaagcaggtctggccgaacagcgcggcctgctggtcgcctgctgcaccggcgatttcgatggcgccgcagaagtgcatcgggtcggcatactcgtaaaattcgctgttggaaacgggcttgggcagcacgctgcgggggatgtccagcagcttcaggatgtcgtcgtcccaatccagcgtgtggatgttgaacagcatcgtccggctggcgttggagtagtcggtcacatgcaccttgccgcaggtcagcttccagatcagccaggtctccacggtgccgaacatcagctgcccggcctcggccttttcccgcgcaccctctacgttgtccaggatccactttaatttggtggcggaaaagtaagcatcaatgatcagaccggtcttttcccggatcatctcggtgtagccttcggctttcagcttatcgcagtattcgctggtgcggcggcactgccatacaatggcatggtagatcggctcgccggtgtcgcggtcccacacgatggtggtctcgcgctggttggcaatgccgatggcggcgatatcctcggcggtggcaccgatcttgttcatggcagagagggccacgcccagttgggtggtccagatctcgttggcatcatgctcgacccagcccggttttgggaaatactgggtgaattctttctgggccacgctgcaaattttgccgtcgtggtcaaacaggatgcagcggttcgaggtcgttccggcgtcaagcgccataatgtactttttcataaggcacttcctttggcgggtatttgcgatgattaaaattattgtagcataaccaccaaaaactgcaagcaaaaagcagggtatagtagctgaatctgcaaaacgcccaaaaccgattccgcagttttgggcgttttgctaaatgctgtttgcttattggttggcggcaaagatccaccattcgccgtcgatctgcacctccagtgtgccgttctcactgccgtagcggtaggcgtagccggtgccgaagttggattgcccatcttcggtgggaaaagagtcactgtccacggtggaggtaatggtgccgtcgggggcggtcttggcgtcggtgccgctgaccgtgcaggtgtcgtagtagataacaccttccagcatcacggcgtgcgccggggcgatggcaatgctggattcggcactgtcctcggctttgtaggtaccgtcggtgctgttctccacgggggaactgccctcgtccgcgtaagggctggcggcgctcatcagcggttcatcaggggcggctgatgcttcgggggcggtctcggcggcagcagcggcgctttccataaagtcgttcttgctgcttccggcgcgccaaccggccacgccgaccatcagcagcccggcgcaggcggccaccgagagcgcgggcatccagtatacaggtttcttgcggcggcgcacggcggggcggtcggccgccaggatcaggtcatcgtccgcccggccgatggcctcaaataactgacgttcgttcatacggccacccctttcttttgtaagtatgcggccagcttgccgcgggtgcggtgcagcgtcacgcggaccttgctctcggtcaagccgtaacgcgccgcaatgtcggcggtggcatcgcagtaccagtaccgccgcagaaaaatattgcgggttccctcgggcagggtgcgcaaaaactcgctgatgagccgcccggtctcggcggcgtcgaaggtatcctccacactgccgggggcggccacgcactcggccagttcgtccagcggtgcaaaggtctgcccgctgccgcgcttttgggccgtggctttgtccaggcggtccagcgccaggttgcgggtgatgcgccccaggtagggggccagccgtgcgggccggttatccggcatactgttccaggcggccagccaggtatcgttttcacattcttccacgtcgtgggcgctgtgcaggatattgtcggcaattttgcggcagtacgcgccgaacttagcggcggtctcggccagtgcctgctcgtcccgggcccagtacagggccacgatggcagcatcctccatgcttaaacctcctttatacctttatataaggaaagcgggcggaaatgttacagcaaaagcctgcttttttgggcaggctttggttttacaacatgtgttttttgtgcagcacccaggccgacaggatgcacagtgccagcgtcagccccagcacgatggcgaaaccggcggtggagttggcaaaaggcatgccgtccgcccgcacgttcatgccgtacaggccgctgatgacggttggcacggccatcagcagggtgatgctggtcagatatttcatggcgttgttcaggcggttgtccaaaatcgagctgaacagctcccgcgtaccttttatatcgtcgcggtagatgctggtcatctcgatggcctggcggatctcaacgataacgtcgtccagcagttcgcggtcgtcggggtactgctccagccgtttgtagcgggtcaggcggtccagaaccgtggcattggcccgtaagctggtggcaaagtagaccaacgtggactctaagccgtgcaattccatcaggtcgctgtccttcaagtcgccggacaggtttttctcaatggcctggcggcggcggtcaatgagccgcagctcctgctggtacatcgaggccgcacggtagagcagctggtagacgaaccgtatctttttgcgggtggaaaagcccttgacccggcaggcggtgaagtcgccgataacaggtgtgtccaccgagcagaccgtgacgatcagctcctgcgtcaggatgatgcccaacgggatggtggtgtagatgccctcgccggagtcaggcaccttgatgggaatgtccacgatgatgagggtgtagccatcctccaggctgatacgggccgactcttccgggtcggtagcggccatcaggtcggcaggctctatatctaaggtagaggccaccaggcgggcctcgttttcatccgggctgttcaggcagacccagcacccctcgccgatctcatcaacgcgggtaagctgcttgtcctgggtacggtaaatcttcatcatggcagttgaccatccatacattataataataccagtataaagcctgcaagataaaagcgcaagtatctttctatatgctgtccctcttacaccaccaattctgtaggggctgatgctagcatcggcccgcttggcgcgaacttcatttatggtatgtaggaggcggcgtccccggcgtccccggcgttccgtggcgcccctagaggggagctgtccgcgcagcggactgaggagtggctactttatcaacaaagtttccggtatagccccctaaaggccccctctgcgaagggctcccgcgaagcgagtgggggagaaaacttgcggtataaccctttacccctacacttggtgccgcatttgcacaacaccacaatatacaccttacccaaaagtacaataaaaactttgtcaaaaaaaccgaaaaaagtgcttgacaaaggtcatactccttg

SEQ ID NO: 7778 - DNA, 10988 bp, Unknown
  gut microbiota DNA sequence
catccgtgcggcaggcacactttaacaacgccattctccttttcctatttcttacaccagctcgaaaggcccgccccaacccggtgggcctttcgagtatgtccgcctctaattggctccccttgaggggagcctttatccaaggaggtcccccatgaaacgtaccgcacaagacatcctcaattttgtcgaggataacgacgtcaagttcgtcaagctgacgttctgcgacatcttcggcaaccagaaaaacgtctcgctgtttgccagcgagctgccccgcgcgttcgagcagggcatcagcttcgacggctcgtccatcgccgggttcatgaacatcgaggagagcgacctcatcctctggcccgacccggacaccgccaccgtgctgccctggcgccccgccgagggccgcgtcatgcgcatgtactgcgacatcaccctgcccaacggcaagccctttgagggcaactgccgcggctacctgcaaagcgtggtcaagcgcgcccgcgccatgggcctgaccgtcaacgtgggctgcgagtgcgagttttatctgttcgagacggacgaaaacggcaatcctacgcatattccgctggaccacggcggctattttgacatcccgccgctggacaagggcgagaacctgcgccgcgacatctgcctgtccatcgaggagatgggcctgcagcccgagcacagccaccacgaaagcggcccgggccagaacgaggtctgcttccgctatgccccggcgctgaaatccgccgataatttaaacacttttaaaagtgctgtcaaagctattgccgcccgcaacggcctgtatgccagctttatgcccaagcccctgcacgaccagagcggcaacggcctgcatgtaaatatgtctcttgtccgggacggcaaaaacctgtttgaaggcgacctgacccccgacagcgaggccgggtatttcgtggcgggcatcctggcccacgcccgggagctgacggctttctgcaatccggtgcccaattcctacgcccggctgggcgccaacgaagccccgctgtatgtcagctggagccgccagaaccgcagccagctggtgcgcctgcccagcgccagcggcgacctgtgccgtgtggagctgcgcggccctgaccctgccggcaacccctatctcgttatagggttgattttggctgccgggttggacggcattgcgaacaaactgcccctgccggagccggtgaaccgcaacctgttccaccccagcgcagccgttggtttggagagcctgccccacagtttgcgggaggccatcaccgtggcggcccagagcgactttatcgccgccgagctgccgctggccctgcagaacaaatattttgagtaccagacccagctttgccacggctacgagaacgcccccgaccccgccgtttgggaacgcacccatggatttttggtgatttgacacctatttacacggaaagggggcgtacccatgccacgagctctgatcgtatcagcgggcaacaatgctaacgaatacctggcccggcacatggctgatttgggctacacccgccccgcgatggctgccagcggcggcgaggcgcgccgccagatggacgccaaggactttgaggtcatcgtcatcaacacgccattgccggatgagttcggccacgagctgggcaccgatgccgtgaccaagaccgacgcgggcgtcctcctgctgaccaagaccgccaccgccgaccagattgccgacaaattgcaggagttcggcgtgctggtgctgggcaaaccgttcaccggggcgcagttccggcaggccgtgcagctggccgccagcaactacaagcgcctggctgtgctgcgggccgaaaacgccaagctgctggataagatcgcgcagctgcgcctggtggaccgtgccaagtgctacctgattgagaaaaagcactacaccgagaccgaggcccatcgtctgatcgaaaaaatggccatggacacccgccgcccccgcggcgagatcgcccaggaaattttggaagaggacgacgaggaataatttcaaataaaaaggctcccctggaggggagctgtcaccgataggtgactgaggggtggcccttgtgcggagtaattgcatccacacagcgttggccaaagtagccacccctcacccgctggcgcgggagctcccctcaagggggagcctttatttgctgctattttttatgtcactgttccagcctcagcaccgtcacgctcaccggcggcagctccatggcatcgcgatagatcgggccaaaggggttcgtaccggcgtgcacgccgtcggccagcttgcgccagctgccgatgggcaggctgacccactggtgggtgcgctcggggttgtagtagacgaccaccacatccttggggtcggggctttcggggatgaacccgatgagccacccctgcagtgccagcacaaagggctgcggctcgccgtaggccccggcaatacgggcacaggtgcggcggatggccagcataccgcgataaaatgccgttaatgcggcaaattccgggcggtgcgcccgcgtccagtccagcttgttggtttccagcgggcctttgtagctgttgtggtcgccgtgcttggtgcggccccactcctcgcccgcctgcataaagggcaggccctggcaggtcaggtagatgcccgccgccagacggttctgcgccagcagctcggcatcgggggcgtcgtagtccccgcggcggcccaccgccgccagcttgtcccacagggtcaggttgtcgtgggcggagatgtactgcaccacctgcccggcctggcggggccagtagccgtgctggccgccgcgccacgcgccgatgctgtgcagcacctcgtaaccgtgctggagtgcgccgttcacgtagccggcgttgcccgcgtcaaagacgttgcccttgatggaatcccgcgtgtcatcgcagaaaaaaccgatgcggtcgctcagcacgtccagggcgcgcttgtccgccgggcgggcgccgccctcaaagttggtactgccgccctgccacggctcgccgtaaagcaagatgtcctgcccgccgggcaaagcgtccagcgcggcgcggatggcgttcatcgtgtcggcgtcttccagcgccatcagatcaaagcggaagccgtcgatgtggtaggtctgcgcccaataaagtatcgaatccacgatgtatttccgcaccatgggccgctcgctggccaggtcgcagccgcagccggaaccgttggtcatctggtcattgggccagcggcggttccagtagccgggcacggtgcgctccaggttgctgtcgctgtggtaggtgtggttgtacaccacgtccatcaccacgcccagcccggcgcggtgcagcgcggccaccatggcgcggcactcccgcacgcgcacctcgccgtggaacgggtcggtggcaaagctgccctcgggcacattgtagttttgggggtcgtagccccagttgtagccgccgttggggcgggattcgtccacggtctcgtagtcgaaaatgggctgcagctgcacgtggctgacacccagatctttcaggtagttcaggcaggtggggtgcacgccgtcgccgtccagcgtggtgtccccgggtacgaagcccatgaatttgccgcggtattcggcgggcacaccgctgtgttcgtcggcggaaaagtccgccacgtgtacctcccacacgctgcgggcgtggggcgggatgaccgggcgcttgtcctcggcccagccctcgggggccgcggcgtccaggtccagcaccatggcgcgctgcccgttggccccggccgtgcgggcgtaggggtcaacggcatcggcggtgcggccgtcgtggaattgcaggtggtagaggtagtaggtgtttttccagtcgccggaaagcgtcaggctccacacgccgtcccgctcccactgcaaatgatgtgcgcccaggtggtgggcgtttggctcggcgtcggtgccggtggcaaacagctccaccgtgacggccgccgccgtaggggcccacagtttaaaggtggtagccgcaggcgtgtagttggcacccaggtcggtgccgttatagtaaggcagttcgcaggcttgctgccaattcatgtgcaatcgctccttaagcttgtgcaagatgctttcattatacctgattccccgcccgtgcgcaaccgtttccgagcgaaagcgcttactttttgccgtgttttgggtggcctggcggtggaaagcggaaagcacttttgcagttacaaggtatagggtaataccttgtaactgcaaaagtgccttccggcctgcccttatatgtatcatttcgtattgctggatagagtaagaaatgagacatgagaattatacgtatctatgtatttattatgtctcaactaaaataaagtgagacatattgccaatagagaaacgaccgtatctgctattttttacatagctgcaggggcgcacaaagcgcccgccaagtgtgcggccacgcaaacgcccctgcaaaataagtctcatcttataagccatgagacttatttatttgtaataaacatcataccaacgtattatatcaatatgtctcatgtctcagctttcccctgcaccgggggttgagacatttgagacgcatcggacaggctccaatatttttccctgccgctgcgttcttcctgtatcggcaggcccttgcgcgcacggtagaccgttgcgcggctgataccctgtttctcacaggccgccagcacatcgctgctttgcatcgttttgttctccatcagcatccggcgcatcaccgcctgggcccgctcactggggctggcggcgtggcggcgcttttcgtcgctgtaagtcaaaatctgcgcggcggtcagctcacattcctcgtcgctccaatgcaccgcgccgtcctcaccgatggtaaaggccaggctggcccccggcagccccagcgagttcttctcctgagccaccacgcagacgtccggccgggcggggtcgcgccccaaaaagcagacgctgcgggccgcgttgacgaaatcgctggagccgttgatcagctcgcagggccgtccgttaaagcctatcggggcttttttggtgtggcaaatcagcaccacggcggcgttggtggcgtgcagcagcttgttcaggttgtccatcatgaagcgcacatcgtcggtacggttcatgtccagctttttgcccacgtagctttgcacagggtcaaatacgatgaggtccggcttgccatcaaaaattttgtgcatctcaaacagccgcgggtcggtcagggtcagctggcgggcatcggaccgcatgaccatgaccctgtccagccgggcgtccatggcttccaggcgggggcgcagcacgatgctttcgtcgttttcggtagtgaaatagtagacgttgccgggcttgccgccgggcatcaggtcgccgttggacacgtgactggccagccagagtgccagcgtggttttgccctggcccgcgtgcccggccaggatggtgatcatgccgcggggcagatagggttccgcgagatactcggcctcgcggggctgcacgctggcgatggtttgcagcgggctgccctgcagtgccacccagcgggccttgctgcgcaccgagtcgcggttgagcatccactcgacgtccagctcgcggtctcgcagcatgcgccagtcctccatctgcgccggggtcgcgccgcgccggcgggccgtgacttccaggcgctccaggcgtttcatgcggaggtcggcgtcctggccctcggcgcaataggcataccccagcggcgacaacagcgtttccaccttctccccctccagaaacgccgcaaaatccccctcgggaatcattgccgggacagtttggttttcttccatgtgatttctcctttcgctgtagttttggtgtgtacaacttatagtggtattatagcgcagcgcaaccgaaaaatcaaggtgtatttacaactttatatagttgtttggcggttgttaagataaaaaggagaggggcaagcggtgacaaccgccgggcggcgcacgattcatattatctcccgcggtactcccggggtgtcaacccaaacttcctcttaaacattctattaaaataggaaaggttttcaaacccgcagctttccgcaatcgccaacacggtatcatcccccgcgcgtaaggccgccgccgccgcattgagccggtgctcattcaaaaacgcggtaaagctctgggccgtcatggccttgaaccaccgcataaagtggctggcactgcacccacaggcggcggccgcgcggtcgatggaaatatcttccatgtagtgctcctccaccagctgcaaagccgcctttaaccgccgggtgtcggcgttgtcgacggggggcaggtcgccttcgcggcccactaaagccgccaaaaacaacagcagttcgccctttatgcacagctcgtagccaatgtcctttatcttattaaattcctcggctgcgcgcagacagtttgccgcccagtcataactccaatcatcgggcgtcaaacgcatgggcagggccaggcggccgctttgcaggggcagcaggtatttttccgccgccacgtcgccgctgccgcccagcagctccaaatcgaaaatgatattttcgtactccatccgctcattgtccagctggcgcagggcatgcagtacgccgggggcaaacacatagatgtcccccgccgcggcggtgtagctggtcagccccgcctgcacgatgccgcgtcctttttttacgaacaccagctccatgctgtcctgccagtgcagggccacctgggtaaaatcctgcgggatggcgcagggatagatgttgaacgggaaccacgctgcgccgtgctttttggtctcccgcaaagttggttgattttccatatttccgccctccatgataggattgtaccataagttgcagggataacgcaagaatccgcccctaaaaatgtggtataccttaagcatagcaaacaaacataaagccaaacgcaaaccacatggagggatacgttatgaatatgaccgctgccatcgaagccctgaccggcaaagccctggccgaaagcaccgaccaggagatctacctcgccctgctggacatcgtccgcgagcagagcgccgaaaaggtccggcccgtcaccggccgcaagctctactacatcagcgctgagttcctgatcggcaagctgctgtccaacaacctgatcaacttagggctgtacgatgacgtccgcgacgctttggccgctgcgggcaagaacctgtccgacattgaggaagttgagccggagccgagccttggcaacggcggtctgggccgcctggccgcctgcttcctggattcgctggccaccctcaacctgcccggcgacggcgtgggcctgcgttaccacttcggcctgttccaccagtccttcgcgaagggcgtgcagaacgagctgcccgacccctggctgaccaaccacagctgggccgaaaagaccgacgttacctacccggtcgagctggccggcaaggagtacaccgcccgcctgtacaagctggccgtcaccggctaccagggccgcaccaacaccctgaacctgtttgacctggacaccatcgatgagacgatcgtccatgacggcatccagtttgacaagaccgacatcgacaagaacctgacgctgttcctgtaccccgatgacagcgacgaggccggccgccgcctgcgcgtttaccagcaatacctgatggtcagtgccggtgcccagctcatcctggccgagtgcgccgcccgcggctgcaactaccacgacctggccgactacgccgccatccagatcaacgacacccatcccagcatggtcatccccgagctgatccgcctgctgggcgagaagggcattgaatttgacgaagctgtggaaattgtcaccaagacctgcgcctacaccaaccacaccatcctggccgaagccctggagaagtggccccgcgcctacctggatgccgtggtcccgcagctaatgcccatcatcgagaagctggacgagctggcccgcacccgcaccgaggacgagagcctggccatcatcgacaaggacgaccgcgtccacatggcccatatggacatccacttcacccactccaccaacggcgtggcctacctgcacaccgagatcctgaagaactccgagctgcacggtttctacgagctgtaccccgagaaattcaacaataagacaaacggcatcaccttccgccgctggctgctggagtgcgaccccgccctgaccagcctgatcgaggagctcatcggctccggcttccgcaaggatgccactgagctggaaaagctgctggcctacaaggacgacgtggacatgctgcagcgcttctccaaggtgaaggctgacaacaagaaggcgctggccgactggctgcagcgcacccagggcgtgaccgtcaacaccgacgccatgttcgacatccagtccaagcgcctgcatgagtacaagcgccagcagctcaacctgctctacctcatccaccagtattacgagatcaaggccggccacaccccggctaccccgctggtcagcatcttcggcgccaaggccgccccggcgtacatcatcgccaaggacatcatccacgccctgctgaccctgtccaaggtcatcgccgctgaccccgaggtcagcccctggctgcaggtggtgtttgtggagaactacaacgtcaccgccgccgagaagctcatccccgcctgcgacttgtccgagcagatctccctggcctccaaagaggcttccggcaccggcaacatgaagttcatgctgaacggcgccctgaccctgggcaccatggacggcgccaacgtcgagatcagccagcaggtgggcaacgacaatatctacatcttcggccagacctccgaccaggtcatccaccgttacgaggccgccgattactgcgccgcccagtggtacgagggcgaccccaacatccgccgcgccattgacttcctgaccggccccgaaatgctggccgccggcaatgccgagaacctgcagcgcctgcacgacgagctgatccacaaggattggttccagaccctgccggacttcaacgcctacgtggtgcgcaagggccaggccctggccgactacgcctacgacccgctgggctggcgccgcaagtgcctgatcaacatcgccaaggcgggcatgttcagcagcgaccgtaccattgccgagtacgatgccgacatctggcacctgggcaagtaacttaaccaatctcctcctacttttttccttattcggggcaccctgccgggaacggcggggtgtttctttttttgcttccttttgcgggctgcatcccaaaataaaaaaccctgcccacagggtaggcagggtcagtaagttgccctataacactcaagttttatccttatctttcgccgcgccaagcgctttcggcttctctgcgtcgtccatcaaaagcttagcccgggtcaccacggcgccgccaaattttttccgcagggcatcggcggtgcggtccagcttttcctgtttgtccagccgggcggtgtcggtaaatagatccatctgctcaaagttgtcggtgctggttttttcggcgctgacgcccaccagccgcaccggccgggcgggccacatctggcgcatcagctcgacggccacgtggtacagccggtcggtggagttggtcggattgggcagcgtggtctggtggctggtgcggcggaacgcgttgtccaccagctgcaccgtcaccacgcgggcggtcttgccgtcccgccgcagccgccgccctaccgagtcacacaacgccagcatcgtggcgtcggcctgttcgggcttctccagatctttcggcatcgtcacgctgttgccgtagctgttgtccctggcgcgctgcttggtcagcgggtcggcctcacggccgttggcgtagttccacagcgtgtcgccccgggtgccaaacagccgcaccgccgtgtcgcggtccatggccgccagctcaccgatggtatacacgccccaggcgttcagccgccgcgctgcgctgggtcccacgccgaacaaatcccccaccggcagcggccacatcttggcgggcacttcctcggggaagagcgtatgcaccttgtcgggcttttcaaagtctgaggccatcttggccagcaggcggttgggcgctacgcccacattgacggtgaaccccagctccctataaatgcgctggcggatggcgtgggccacagtcagcggcgggccgaagagctgctcggtgccggtcatgtccaggaaggcttcgtcgatgctgtactgctccacatcgggcgtataatcttgcaaaatcgcgatcatcgccttgctcttctgcacgtaaaagtcgaagtccggcggcaccaccttgatgcccgggtacttggtgcgggcggcaaacaggctttcgccggttttgatgccgtatttcttggcggggccgctcttggccagcacgacgccatggcgctgggcttcgtcgccgcccaccaccgccgggatggtgcgcaggtccacgtcctcgccgtcccgcagatgcttgatggccgaccaagacaaaaacgccgagttgacatccacatggaaaaagattttggacatgggcgcctcctttcccggttataaaaggctccccttgaggggtaactccccgcagtgcggggagatgtcgcgcagcgacagaggggcccggccgcgtaagcggtggcggcgcagccgactgaggggtggcccacgtgccgctcgttgctaaagtagcccccctcacccgcttcgcgggagcgctccccttctggcacttcgtgccacctcc

SEQ ID NO: 7779 - DNA, 6734 bp, Unknown
  gut microbiota DNA sequence
gcctttgcgcgaaccgaagtatcagaaccgccgcagccagccaacaacagggccgccgccaaaattagtacacaaagtaatgttttgttaaatctaaatgcttttttactcaaaacttccgtatctccactagtaaaatctatcccagcgaacattttgctacgatagtttctataatagtacaccaaattaaaaattttttcaagagttgcgcacattttgttcgccgtaaaaatgcacaattattccgccaactttgcggcaatttgtgaatgacttgtggtaatagtagagcttagcgcatcgcaccacaatttgtagggtttagtaaaattttagtgggatacgcaaaaaggcccccggtcgagggccgggggcggggataaggctcccctcgaaggggagccttttgcctaaattattattttctctcctttctcccgtacttattataatatagacccattagcccaccggcagagagcacggccagcgtggccagcagggtcaccggcatggggtcggcggtttggggcagggcggacttgggcagggcggacttgggcgcggggtgcgcggggaccggggtagtttttgccggggcaggcgtgggcgtcggcacggcgggcgggtcgtaccggttctggaacagcagcaggccggtcttttcgctgctgccgcccgtggcccagatctcggcccccaggccgccgttcggctggttggtcacccgcaccgtcaccgtgtataccgtggcatcgtaggtcatgtgcgccgtgccgcccgcgcactgacgcaccgtgtagcggtagtcgccgggggcggtgtaggtcaggcccgtaaagccggccgtgccgctgcctttgacctgcaccgtatccgccgcgggggcgggggcgccgtcctcgggcgtaagggtgatagtgaaccgctcggccgtggccgcgcccgaggtgcgaacctcgacgggcagctcggctgtgcatttgtactccgccgcgcgggcttgcagcggcagcagcaaaagcagcagtgcagcctctattattatgcggcgcaatgtgcgtttttgggcgttattcatccttatttcctccttttacgtttggggcagcagctggccgaacagcagcacccggccgttggtggcggcctcggtgcaggtggaaaaggccaccaccggcccgctgtccggcgtgcggtactgcaccgcgtgcgccttgatgtaggccagcagtgcgtccgggctttgggcggggtcgtagagcacggggtcgtaggcgtcgccccgcacgcaggcgaacagcgcgatattatacgctgtatcgtctgttatcagtgtgcccgtggtgtgcgcggcaaagtaatcgctttgggtgaactgcacgatgtcaccgaacatgccgccgtcctcgatatggtgaccgtagacgatgctgtagggcgcggtgaagtccgccgggcagcgcgagtccaaaaatatcgcgccagaaagcgaaaaatctccgtacacgtcggtgttgacgtagaccatgttgtccgcaccctgcacgacgggaaagtcgatgcgggtgccgtccagcgtgagccagccgcagacgtccgggttgagggcgcgcagctcggcaaagccggggctgtccgcgggcgcggcggccagcggcttgaatcgcagcgtctgctccggcagggccgcgcggcgtgtggcggcgatgtcccacagcgaccacgccccaaacagcgccagcgcccccagcagcagtgccgccgccagcgtaagcagccggtcaccccaccgcgccagttttgccgccagcagcattattcatcgctgctacgacgtttacacagcagcaacacgctgcccgtgcccgccgccagcagcatggtgccgtagggcgcagcgtccagcagcaggcccgtgggcgtgggcgcggtgcggctgttggtgaccgtgatggtcttgtccgcggcggccatcgtctgggcgtccgaggttttgtcgtcgctgctggttttggtgatgccgtcccaggtggtggtgtaacctgacgctgtatcgccggattccgtgatggtgtagcccgtgttagcgggcaggccggtgacctcgatcttttcgccgccggtgatgccggctttgacttcagcggtgccgtctgcgttgaaggcgacggtgtcgccggtgatggtggagaaatctgccgattcgccgccggtttttaccgtgaccgagctggcgtggggcgtttcatccgggtcgtccagcgcgatggtaaaggtgaactcgtcgccggcattggcaaagttgccgctgaggtgcttgaccaccgagaggccgtaggcggcgtaggtgttggtgatctcgcccgccttggccgtgccgtccgcgttgacgatgttgatgtctgagatgcgcagggcgccggtgggcgctgcggggtcggtgttgaccactcgcaccacgatgtagcgggcggcggtgtcctgcgtcaggccggtgatgccggcagcggcctctgtgagggagaagatgtagtcgcccggggcggtgaagtcgtcgctgtcaaaggtgaaagggactgtgacggtgttgaccgtgccgcccgtaaaggcggcggtaagctcggtggatttgatctgcgcggctgtgcctttgatggcagtgccggccgcccaggagggcaggttcgcgaccgtgccgaccgtgaaggtgatgctaccgtggggtacgcccgcgccgggggcggcggtcatgtcgatggttttggtcagctgggcggtgtaatccgcggccagcacgccgggcgctgcggtacctgccagcagggcagccgcagcgatggcagcggtaaatttgccgaatttggcgcgggaaatgtaggtggtcttcataggtggttcctctcttccaatatggatttatgttgctttcactggggttgcagcagggtttacagcccgctgcggcgcagggcggccagggccgtgcccagcactttccgctgtgggatggggccgtagaggcggctgtccgtccccgtggtgcgggcatcgcacagcaggaaaagctcgtcctccgcgagggtgacggggtagtccgggccgccctcgaccggctgggtgggagtggtgatgtccggctcggccaccgtactgccgttgatgatgagcgcgccggtgtcggtcacagtgacggtatcgccgccacgcgccgcgatgcgcccaaggcggagcgtgccgtcctgccggtagagcacgacctgcccggccgcggtgccgcgctcgaaccggctgaacaggacgaggtcgccgccgcacaggcggggcgccatagcgctgcccggcaccaccgccagcccgaacacgaccccgaacagcacccagcacagcgcggcgaacaccgccaggcgggtgaggaaacggtgaatttccgctttggcacgtgttttttccttgtcagtaatcagaaggtcctcccgtggcatgggtcacacctccctgcggcgcagcagccgccagcccagccagcacaggccgaccagtgccaggtagggcgccgcgccggtgtgcaggccggtggggatgcccacgttgcgggtgttgatgcaggtgatttcggcgggctgggcccggggcacttgcagcgtgcaggttacgccggtggggccgtcgtcgccgttgagctgccagctgaccgtgtggtcgccggggtcggtctcagtcagggtgagggtctggtccgcgcgcaggtgggtgagggtgacgctgccgccgctgcgcagggtgaagccggtgtcggtcagcgccgcgccgtcacccgccgtggtgtaggcgctgccctggcggatctgggtggtgtccagcgtggcggtgaaggagaagtttttcgtagtatcgcccatatcgcccaccacttttttggtgatcgtgacggacaggtagggttcgtaggtgttggtaaagtgcgcctcggccgtgccgcctgctgtgacatccatcgattgggttcggtcggcggtgggagtggtcaggtaatagttggtcaggttcggcgcggcggattcggtcacggtgtagccggcgggggccaggcccggcagggtcacgctgcctgcgcctttgatggagagtgtcaggcggccgtttgaatccgggctgacggcagccggggcatccgccgggcgggcgcccgcgctatactgcggcgtgtagctgcctgcggcaacggatgcgatcgtaaaggtgttgactgtttcggcgaagtcggcttgcagggcatcgtcggcatcgtcgggcaattgcttggtgatggtcaggctgccggtggcgcgggcgtaggtgttttcaaactggatatttgttgccgcctgggcggtcagtgcaatgccgctgtgtatcggtgtatcggtcacgtctgtccacacgccgccgtcttttacggtgcgtaccagcgtgcaatcgtaaccggtgggttcaccgcgggcggtctcggtcacagcgtagttgtaggtgttgccgctgctgtccgtcaggggcagctccagcgtgtattgcagcacgttggggtttatgctatccgcttgcatcgcgctgccgctgaagtcccccacgatctggcggtccgagttgaccacggtaaagtgcagattttctttagcctgtatcagctcggcatcggtcagggcggtaccgtcggttttcagcagcgttttggtaacgcgcaggatgccgctgcccacagccgggggcacagggtcggtgctgaaccagacgcggtcgatgaggttgccgcgcttgaggccctcctcgctgtcgccgctggcgctggccaccgccacaaagaagaaccggctgacgtactgccccgccgggaccgtgtaggtaccgttgtgtacgccccatgcggtgcagccatccgagatattgccgtccacaatgtagttgcggatgggcacattcacgccgttcaccgtgatgctgccgttcagagcttcctggatggcggcgcgggtggtcttatttttcagcgcgtcggtgatgtcctgggccacatccatcggagcgatcagcagggccatcgtgtcagtgccgtcgcgacccgcgtgggccagactccagtttaaggttgcgccgggcacggtcagcacgtcctggtacagggcgccgtaagcctggcagttcagttcggcaaactggccgccatcgtaggccttgccgatggcgtaggcctgagtcacgtcgttggggtctgtgtaagtttcttttatcgcattacccttgcggtcccatcctgtaataacagtgtccgtataaacggtcgtggtcgcgtcggcaatctcgataaattttcccttgacaccatcgccccagcgattgcactcggtagttgtataccagtaaatgctgctggtcgtttccgcatcccgcgtctgcaaaaagtgggcgcgctgatggtcgttcgggtaacaaaaacggtcacttgcaaaattaccgtcgctgaccaccgggtactcaaagctgccgttttgcagctgcacataatagtttacctgagcctcggcctgcagggtactgctgccggaggcgacatccaccttataatggtagcggtcggtgtcggcggcgctggggtcgctttggcgggccagcagcgtatccagcgcggcgttcagcgcgtgggggtgttcggcggtcaggttcttgtctgaaccattgacggcctggcccgtgacctgctgccagctgccatccgcgccggtcttgctgcgataccaggtgtaggtcacgccgtccaccgggtcactttgtccgttgacgaccgctaccagctcgcccgtagatttgatgttatcctgtatcttcacactgcgcagcgtcaccgcctgcactgccggttcatcctcgtcatccggcgggtcggcgctttcaggcgtggcggtggttgccggtgtcgtgcttggcgtgggtgtgtacagctcgtccccggtcgcgttctcccctgccgggtcctcctcggccgggccgggcggcacaggtgtcggctctgccggggcggcggtctcgctggtggcgatctcggtatgtagcggtcccgataatggcgggtcctcagcaaaagcggcattggcggccccagccgcaaggcaaaaggccataagccctgccaacagacgtttgttcatggcggttcctcccccgtttgatccgggcggcctgtgggacaagccgtccgctgatttcaaggctgagtatacctccgccaacggggaaaaaacgtcgcacgcaggttcacacaaaaaaagacagcccgcactgttttctgcagtacgggctgtccgtctttagctattcttttacttatgcggttttctgtttttaagaaccgctgtgcctgccagcgcaaaaccgctgaggacaaacaggctgatatgcagctctttgttccaattatctcccgtttgcgggatgacagaacttaccgccgcagtttccttcacagcttccgcctgtgcagacacagttacaggtttggccgttgctgtcggggtggacttggcaggttttctctccagcgccgcgatggcatcctcaatgacttttgccattgcatccacttccgcctgctcggtgatattcttgccgcgcactactgcgtttacagcttcttccaccttggtaaaatctttgtactcattcttgttcagcgcttcggccttagcaatggctgcatc

SEQ ID NO: 7780 - DNA, 600 bp, Unknown
  gut microbiota DNA sequence
ttcttcagcagcagatagtccgccgtgaagccgcccacgtccagaatcagcgcacgcggcaccgttgccagctcgcccaacatcatggccgccgctgcaaacgcctgcggatagcactgcacatcgcggatcaggatgctgtacagcttgtcacggtaggagaagtagatgggttccttgcgcttgaagtagcgcacgaacgctttattctgcgcgccgaaatgtgcgggcggcaggccgatggcaaggtcaatgggcatcagcccggaggtataagctccctgtgcttcgatttcctccgcgatggcaaacagcgacagaatgaagaagcgctcgtctgtggttttgtccttctggtacgggatacgctgcgctgacagcgtatagtaactgccgccgtatttcagtacatccctgccgtaaggtctggttttacttttctgtacaccggaaacgatggcgttcccgtgaacggttttgacctgtttgttgccgtggtcgatagcaataagcataacatcaactcccttcgatgcttatatttaccttatacgttttgaatacgtcatttcccaacaaatttacacattattttttctt

SEQ ID NO: 7781 - DNA, 15959 bp, Unknown
  gut microbiota DNA sequence
gaggacaagccccgcccaaggggcgcaggccggcggtacgtcccgccggacaaaaacagtccagtggactgtttttagagcgcaggagagtccccgatgcctaaaaaaagcctgctgttaagtgcaatcttttttgattgcctggggaaggctgcagttttctgtgtgcataaattaaaagaaaaagtgagagaccctctccctacggtatggcggaaccgcttacgcggccggtcccctttgtcgctgtgcgacatctccctatgttgcgggaaggcaccccgccaggggaggcgcttggtcgggcggatatagaatctagccctacggaaatgcggcgaattggagcacagggggattttatgcctcgcctagaatctgcttgatctctgccaaatcggcggcaaagtagatgccctcctggcgggcgggggtggagaggccggtttcgatcatgtggtccaacagggcttttaggctgtcgtaatagttgttgaggttgtagaggatgcagggagcatccaggtgcttgagggacactttcgacatgacctcagtgatctcctccagcgtgccggtgccgcctgggaacgcgataaaagcatcgcccagctcgatcattttggctttgcgctcggtcatgtcctgtgtgacgatcaactgcgtcaggccgtccagctcgtagccttcatcaatgaaaaactgcggttctacgccgatcacgggaccgccggcggccattacgctgcgggccagcacacccatcaggccgctggcagagccgccgtagaccagcgtgtggccgtttttgccgatccattgccccagctcggccacggtagtttgcagggtggggtctgtgccataattggcgcctaaatatacagtaacattcatagcaggtgctcccttttactttgttatacagccagcataacgcgaaccacgccattttgcaagagcgaatcgtccaaagcggggcggcagcagccgtaaaacactgcgcaatcatgtcgaaaattgtcttgcaatctaataataaactctctataataaaaatattgacaattttagcaaaatgctgcggtatgacgatgcgcattttgtgcgggagttgagcgcgtgtgaagaaaatacggatcgaacgggtcagcattgggagcattgcggtgaccattctgctgggcatcctgcttgcgtttgtttcgtctgagtgcacgcagcagtttgcggcgttgcagaccgccacggatgaatatattgagtgcgaaaaccaggcaagtgagctgcaggcggcatcggattatctggccgagcaggtgcggctgtttgtggtgaccgggcagcgagagtacatggacctttactttgaggaaaaggacgtgacccggcgccaggagaaggcgttcacctatttggaacaggaatttgacggaacaacgtcgttggaatcactgaaaactgcgctgaacagcaccaaaaatctgagctatgccgaccgttatgccatgcggctggcggccgaggcctacattgcggacgaggaaagctggccggaggccatccgggcggtgacgctgcacgagagcgaccagcggatgaccgacagcgagaagatccgcaaggcacagcagctggtttgcaacgaccagtaccagacgctgcgggagaacatcaacgacaatgttgcggcctgcacccaaagcctgatcgaacagacaaagaaccgccaaaacaacgcagcaacggtgttcagtgacatttatttgaggtttgagatcagcgtagtggcgttgattttgatggtgctgatgatgtgcgccatcgtgcagcatttaatcgtaaagccgctgctgctgtacggaaaaagcatccagaacggggagatctttccggtggtgggcgcggcggagctgcaaaacatggccgtgacctacaacaaagtctacctggaaaaccaggagacgcagaagctcatccgtcatgaggccgagcatgacgcactgaccgatgcgctgaatcgagggtcgtttgagaagattttgtccatttacgagaaggggcagtcagactttgccatgatcatctgcgatgtggacagcttcaagaccgttaacgacacctacggccatgcggtaggcgatgaaattttgaaaaaggtggcatccctgctgcagaaagcgttccgcagcatcgactatgtctgccgcatcggcggcgacgagttcgcggtcattatggtggatatgaccaccgacctgaccaacactgttaaagaaaaaatcgatatagtcaacgacctgctgagcaacccggccgacgggttgccgcctgtctcgctgagcgttggcgtggcgttttctgaccggcaggacccgggggagagcatctttaaggatgccgaccacgcgctgtaccatgtaaagcagcacggcaagcatggctgcggcttttatggcgcagagcaggagccttgcgcggagccggatgccgcagtacccatgagcgaaactgaatagcgttaaagggaaggactgaggcctttcccttttttgtggtgcttgcgcggtgcggcaaattgtggtagtatggcaggagaaatgagggggatgaaagtatgtcgatcagtatcctgctggcggaaaaaatcgcgcagttgtttctgattttgctgatggggtatctggtggtccgggtcgggctgttgaagcctgaggacagccgggtgctgtcggtcatcatggtgtatctggtcatgccgtgcatgatcctgaacgcgttccagatcgacaacacgccggaggtgcgcaccggcattgcgtattcgtttgtggtggcaggcatcatgcacctgctgtttttggcgctgacggcgctgctgaaaaagccgctgaaactggatgtgattgagcggtgtgctgtgatttattccaacgcatcggcactggtcattccgctgctggaggctacgctgggcagtgagtatgtggtgtattcctgcgggttcatcattgtgcagctggtgctgctgtggacccattgctgcacggtgctgcggggcgacaagggcattgacctgaaaaaaatcgtgaccaacctgaacctgatcgccattgtggcggcggcgctgctgtttgcgctgcacatcacgctgccggcggggctggtgacgaccatctccagcgtgggcaatatgatcggcccgctgggcatgctgctggcgggtatggcaatcgcgtccagcccgctgaaaaagctggtgcttacgccgcggtattatttgaccgtgtttttgcgtttgattttgtacccgatggtgacgctggggttgttatggctgctgaaagcgcagacctggatcccagacggcaaggcgattttgatgacggtgtttttgtccggcattacgccggtatgttcggcgctgaactcgatggtgcagttgtatgaccgcgatatggaggaatcgggggcgttgtatgtgttgacgacgttgttgtcgattgtaacgatgccgatggtgattgcggtgtttgaacgagttatgtgattatatttgtgcggttatccggccctgcctaccttgaggcagggccttttttagtgggtggcaccttttaggaacaaatcaagaagtttccacaggtttatattgcaaaaccttctcagagaacgcgccattgaagaattgaatgaaagggcccaggccgaaggcgcagaccagggtgccgatgccgaccaggccgcccagcaggaaggtgatggccgcacagagtgcatcggtaaagacgcggcagccgaagtaaggcttgtgcaggtggtcctgcagggccagagccagcgaatcgtaaggtgcaacgcccaggtcggccgtctggtacagcgagcagccaaacgctgtgacaggcacggcgatcacgacccacagcagctggatgggcagctgctcggccgggccgaaccagcccgcaatgatgtcgtagaaaaaagtgatgatgaacccacagcccaggccgttgaccagggtgcccaggccaatgtacttgcggccccagatgaactccaccaccaagaacaacagattggtgcagatgttctgcacgcccagcgagatgcccagcagctcggacaggcggatgttcagggccgtgatggaatcattgcccaggtgggattgcttgaagatggcaatgcccagcgagatgatgacgatgccgatcaccatacccaggacacggcgcacagtaggacgttccgttttcatggttttttccaactttccttattagactataaatgtaaagggttgtatccagtgtaacacgtcgtgcagcgcgggtcaaccgttgcggcggctgtaggcgcgcatgccattgacgcccgcgcccaggaacatcacgttgatgctgacattcagccacaggatgaccaggatgatcgaggtcagggagccgtaaatataggacagcttccaggatgtgcgaatataataggtgaagatcgaggagaaaacgaaccagacaacagccgtaaacagcgccccgggcagttggtcccgcatacggcggcggccgcccggcacgaaggtgtagatcagcacaaaagtcaggatggacagcccgaaggccgccagcgcactgaagctgaccaaactgtgcagcctgagaaacagatggctctgggacagccagggcagcaggctcaacgcccaatgcagcagggggctgaggttctggcagaacagcacgatcagcagcagccacaaaaacgcgaaggtgtacaccaccgcccacagccggtcaagcatcgtgcggcgggagccgggggtcaacttttgcaggcccttctggatggctgccatgccgctggacgccgacaccagtgtggtaataacggccagcgatgccacaaaggtgttggagttctcgttcatgctggtgataaggctggcgatggtatcacgaatgaccggaatatccggcagaaaacggaaaaacagctcgactacgctgtccaccgtaaagcccggcagggtgttgaccaccaccagcagccacatcagcagcggaaaaaatgccgtgagcaggaaaagcgtagcgtgcccggcgtagaccgtcatgtcctgggccatgtactgctgcagcagggtgatggcgggctgcagttttttcttcattcttccacccccgggcacaggccgcgcatggcgttgtggatcagccgataggtgcgctgggccatcacctcgggcggggcgggttcctcggcttggagccagtttttgataagccccacgcagccagacaggcaaaaggaatacccgctgtccagatcggcccggcgatccgggtaggcatcggccagtacctgcaggctgtagcgggagaggatggcttcgatctgcagcaaaaacgccatgtcgccgtggggacccagcagcgcggcgcagatctcgcggttttcggccatcagggcaaacagatcccccaccagcgggaagatctgcgcctggtgcgggtcgatggggtgtgcctgcacggacgcctcaatgcgttccagcagttctgcctcgacggaagccagcatctggtcaatgtcggtgtagtgcaggtaaaaggtggaacggttcacgttggcgtgggcgaccagctcttttacggtgatgtcgcctgcgtttttctcctgcatcagctcggccaggccctggcgcagcagggcacgggtacgcaggatgcggcggtcggttttgggtgccgtcataagcggaaaatcctttccggtgcgttacaatttctataatagacattatacgccgaaccggggagaaaagcaacacggtgttgcatatcggacgccttttgccgaaaatgcagggcagcggcccgtcaaccagataacgcttgccatgccgcagaaattggcgtatattgatggtatagacgtatccggggaggaaacagaacgatggaaacgagggataagattgtagtgcggggcgagctggcgctggtgctggccgtgctcatcaacagctttgcagtggccgtgacggtgtatgcggggctgggcatttcgccggtgtccagcttcccgtatgcggtgtcgctggtgttcccgtttttgacgctgggcacctggacatacctgttccagggcgtgctggtcattacgttgatggtgctgcgcaagcggtttgtgccgtcgtacctgttcagctttgtggcgggctttttcttcggcaagctgctggatgtgtttggtgcgtggctgccctgcctaccctacagcttgggctggcgcatcttctactttgtggccagctgcccggtcatcgcgctgggcattgcgctgtccaaccggtgcaagctgccgatcatcccgacggatctgtttgcccgggacctttcggagattatccgcaagccttacgccaaggtcaagacgaccatggacctgacttgcgttgcggtatccattgtgctgaccgtagtgggtaccggtacgctgaagggagtaggcatcggcactgtggtggctgccctgacctatggacggaccgctggtttgattggcaatttgattgataagaagttttattttgtatcagtgctggagaaataaatgaattgcctccgcagggtggcgcggaatggaagccactccataagacaaaaggagtcagccaaggtaaaaagcatttatctgatgagccacggcgagacattatttaaggcaacaccgcacaattcccgcctgacggcttaagcacctcgctcgccgtgtcggcacttagaattatgcggtattgccttaatacatggtaacttcgtgatagaaaaaattatcaacccagatgggcaaaaatcaccccagtgccacgtccagcaccatcatcacgctgaatcccagcgcaaagcagatagtgccgacgttggagtgctcgccctgggacatttcggggatcagctcctcgaccacgacgtagatcatggccccggcggcaaagctgagcaggtagggcagggcaggcaccaccagcccggcggcccagatggtaaacagtgcgcccaccggctccacggcaccggacagcgtacccgcccagaacgcccggccgcggctcatgcccgcggctttcagaggcatcgaaatgatagcgccctcgggaaagttctggatggcaatgcccagggacagcgccagcgcacccatcgccgtgatagacgcactgcccgttaagtaacccgcgtacaccacgccgacggccatgccctcggggatgttgtgcagcgtgacggccagcaccagcatcgtggtgcgggaaaagccgctgtgggggccttcgggcgtgtcggcaccctggtgcagatgaggcaccgccatatccagcagcagcaaaaagccgatgcccagccagaagcccacggtggcggggatgaacgccagccgccccaggcccttggactgctccatggcggggatgagcaaactccagatcgacgccgctaccatgaccccggcggcaaagccggttaaagcgcgctgcacaccttcgtgcagcgtttttttcatgaaaaatacgcaggcggaccccagcgtagtaccggcaaaggggataaggataccgggtaaacattgcgttagcataaactaaccctccctgtaaaaaaatgacccgcccggcccaaaacggcagtaacagcggggaaaagttgacgaaaaacgaaaacacgatatttgcccttatcctaccacacccggcccgtgccgtcaatagccgggaagatgtgaaccattggttaaaaatatatcaaaaacacttgcgcaaattcctttttatgcgtataatatgggtattgggcgcaaaacgtccccataacaatgtgtaataccgagaggagcttttactatgggtttgggtaaaaagaccattgacgatgaaaactacgctggcaagcgcgtgctggttcgctgcgacttcaacgtcccgatgaaggacggcgtgatcaccaatgacaaccgtatcaacgcggctctgccgaccatcaaaaagctgatcaatgatggcgccaaggtcatcctgtgcagccacctgggcaagccgaagaacggccccgaggccaagttcagcctggcccctgttgctgtccgcctgagcgagaagctgggccagcccgtcacctttgctgacgatgacaccgttgtcggcgagaacgccaaggctgctgttgccaccatgggcaacggcgatgttgtcctgctgcagaacacccgtttccgcaaggaagagaccaagaatgagcccgctttcagcgaggagctggccagcctggccgatgcttacgtggatgacgctttcggctcctgccatcgtgcccactgctccaccgccggtgttaccgactacattaaggataccgctgtcggctacctgatggaaaaggagatcaagtacctgggcaacgcagtgaacgatcccgagcgtcccttcaccgctattctgggcggcgctaaggtcgctgataagctgaacgttatctccaacctgctggaaaaggtcgacaccctgatcatcggcggcggcatggcctacaccttcctgaaggcccagggctacgagatcggcaagagcctgtgcgatgactccaagctggattactgcaaggaaatgatggctaaggcccaggagaagggcgttaagctgctgctgcccgttgatgctgcctgcatcaaagacttccctgatcccattgatgcccctgtcgagaccgccattgttcctgtcaacgctatccccgctgaccaggaaggctgtgacatcggccccgagaccatgaagctgttcgctgatgccgtcaaggccagcaagaccgttgtctggaacggccccatgggcgtcttcgagaacccgaccctggctgccggcaccctggctgttgccaaggctatggctgagagcgacgctaccaccgtgatcggcggcggcgacagcgctgcagctgtccagcagatgggcctgggcgacaagatgacccacatctccaccggtggcggtgcttctctggagtacctggagggcaaggaactgcccggcatcgccgttatccagaaagcttaatttgtaacccgcagggcgcggcggcagagccgctgcgcccctttttgtttgaaaaatatatgaaataaaggagcaactatcatggataagcagaaccgcaaggcaatcattgccggcaactggaaaatgaataaaaccgctaccgaggccgccgagctgatcgacgccctgatccccgctgtgaaggacgctggctgcgaggtcgttatctgtgtgcctttcaccgacctggtcaccgctgttgccaagaccaagggcaccaacatccacgttggcgctgagaatgtccacttcgagaagtccggcgcttacaccggcgagatcagcgccgacatgctgaccgacctgggcgttgagtacgtcgttgtcggccacagcgagcgccgccagtactttgccgagaccgatgagactgtcaacaagcgcgccaaggcagccttggccggcggcctgaagcccatcatctgcgtcggcgagagcctggcccagcgtgagcagggtgtcaccgaggagctggtccgcatgcaggtcaagatcgccctgaacggcgtgaccgctgacgagctgaagaacgtcgttatcgcctacgagcccatctgggctatcggcaccggcaagaccgctaccgctgaccaggcacaggaagtctgcgccgctatccgcaaggtcgtcggcgagttgtacggcgaagatgccgccaaggccctgaccgtccagtacggcggcagcatgaatgccaagaacgccgaggaactgctgggcaagcccgatgttgacggcggcctgatcggcggtgcttccctgaaggccgaccagtttgccatcattgttgacgctgccaccaagggctgatacaatagtagagtaaaatgcctccctctgtgagggaggtggcgcgaagcgccggagggagagaccttcaagtaagcaacggtttactttatgtctctcccccaccgcctacggcggagcccttcgggcccggacccctctgtcgctacgagacatctccccacactgcggggagtcaccctcccagagggggccttttgcgctacctgtacaaaaggagtttcaatttatgtctaaaaaacctgtaatgctttgcatcatggacggtttcggctggacgccggatcagacctacggcaacgccgtggccgccgccaataagcccaacctggacaagatctttgccaactatcccatgactaccatccaggccagcggcatggccgtcggcctgcccgagggccagatgggcaactcggaagtcggccacaccaacatgggcgctggccgcatcgtctaccagcaactgaccctcatcaccaagtccatcaaggacggtgagatgctcaagaaccccgtgctggtcaagaacatgaaagctgccatcgatgccggcaaggccatccacctgatgggcctggtcggtaccggcggcgtccacagccatgccgaccactggtacggcgtgctggagatggccaagcacctgggtgccaaggacgtttacctgcactgcatcatggacggccgtgacaccgacccccacagcggcaagggcttcctggctgacctgcaggccaagctggacgaactgggcatcggcaagatcgcctctgtttccggccgttactacgccatggaccgtgacaataactgggaccgcgaggagaaagcctacgctgcctttgtttacggcgagggcaaccacgccgccaacgctgccgaggctatcgaggccagctatgctgccgatgtgaccgacgagttcgtcgtgcccgttgtcacctgcgagggcggccgtgtgcaggatggcgataccgttatcttcatgaacttccgccccgaccgtgcccgccagatgacccgcatcttctgcgatgatgctttcaccggctttgagcgccgcggcggccgcaagcaggtcaactatgtctgcatggccgagtacgatgccaccatgcccaactgtgaagtggcttacccgccggtcgagctgaagaacaccctgggtgagtacctggctgcccacggcaagacccagctgcgcattgccgaaaccgagaagtacgcccatgtgacgttcttcttcaacggcggtgtcgagcagccctgcgagggcgaggaccgcaaggtcatccccagcccgaaggttgccacctacgacctgaagcccgagatgagcgcctacgaggttgccgacgagtgcaaggcccgcatcgagagcggcaagtacgacgtcatcatcctgaactttgccaactgcgacatggtcggccacaccggcgtgtttgacgccgctgtcaaggctgtcgaggctgttgacaagtgcgtgggcgaggtcaccgacgctgtgctgaacgctggcggcgtggtcttcctgaccgccgaccacggcaacgccgagaagatgaagaaccccgatggttctcccttcaccgcccacaccaccaacgtggtgcccttcgccgtcattggcgctggcaatgtgaagctgcgtgagggcggctgtctggcagacatcgcccccaccatgctgccctatatcggcctgcccgtcccggctgagatgaccggcaagagcattatcgtcgactaagacgagggattttcggccttttttgaaaaaaggcctggcgaaaaacttttaatatttcgacccataaagcgggagcctgcggtaagcgggttcccgcttttgtttgtacgggctgatgtatgtgttttgctgtaggggccgatgcttgcatcggcccgtcaacttgccgtgttttacgctgttttataggttgagaaaatgcacgaaaaatggtatagtagaaactacaaaagtatgcctgtaaggggaatttaccgtatgaaagaaaaactgcgcttactgctgcgtaaaccggctgtaatcgccttgctgatagccgagctgctggtaataggctttgccttggcagcggccctgcgcccggcggctgtgtatacgttcacggcggaccagtgggaaaacatcgcccaggagtcagaaattggttatgacgaggacggccgcatcggcgttaccgaaatgaccgacggcgaggacatcctccaaaccccagccatgaccctgcccaaggggcactataaggtgacgctggattaccgctatgtgcccagcgtgtgggagggcggtgtcgagcgccgctcctgcgtgtattttacttcgtatgatgcggttccgccggacgttcagcaaggcagtgttcttcacatggctgaaggctgctggcggatggggtaagcatggcgacggtggttgtgctgctttgtgctatgagaaggaaaaagagtaagcgcagaaaagaggcctgaaaggattccgctcttttacttgcggacagcttgcgctttgcgtggaaatggggtatagttaaagttagaaaaatcgcaatgggagaattggatggataagcaaatgaaaggcagcagccttaaaaaaataggagccttgctgccgtggttgtggttggcggctgggtatgtgctggacatgtggttccagctggtgccgggtaagtggatcgttgattctgacctggcatcagaaatgatgctgaccaagatcctgaaccaggaaggctcgatcttaagccacagctggtattattcaaccgaactccgcgttgtaaatatgcagtggttttatcgcctggggctgctgctgttcccggatgattggcatctggcaagtacctttggcatggcgattgccttgttggtctttattgcggcggcgctgctactggcaaaggaaatcgggttgggaagcctgagcccctggatggcaggtgcactgatctggccctttggtatgcgctatctcgtctatgcgatgtacggtggctattatctgatccacatgcttttgcctatgctgacgttggcgctggtcttttgcagtatccatgcgcaaaaccgaaggcctaaagtgctgtgtgctgtattggcttgcctggcggctttgggggcaggcttaaacggcgtaaaggtcctgatggtatttcaggcaccgttcctgctggcgacgatgctcctggcggttatggctctgaacagctgtgggaaaactaactggaaagatgcttgccggacctgcgggacggagatgcagctgttagcaggtgcgctgtataccacagtggcggcgatggctggctatgtcatcaacgcaaagatcctggcaaaaagctatagctttaaatcctttggcggcgttacctggagccgcccgcgggatggcttatttgaactgcagcggatcattgtggattatttccatgaatttgggtatacagacggagtgggcgttttccacttcagcggcattgcgtctggcctgggacttttgatcggcatctggctggccttttgcattgtgcggctgctgttccgttaccgcagcctggcagtagcagagcgctttatggtgttgctgctttgcagcatgattgcagtctgtggtatctcgttctcctatttccaggagtacagccaatatttctggttccccagtatgccggcggcttttgccgttatggctattgaaatcaaaacggaaaagctgcatttgccgggagaacggcgcacactggcgtttttgctggcaggagcactttccatttgcggcataaacacggtgcgccaacagatcgagcaccccgcattggggcgcgttggaattgacaaagtcgcatattggctggtagataatggctattctgaaggatatgcgactttctggaatggcggctgcatgacagaaattaccagcggaaagttagacatctggtacacgaatctccgtgatgattataatgagggatggctgcagccggattatcacctgacccgcgacccggaaaaaccgtttattctgatcgatacagaaacagatggcccggtagacgaagtaccgcttgttcagcacggcggatgtacagaagtgtacaatgacggccgttatgtggtatatacgtatgattccgccgaagcaatgcatgcagcatccgacgcggaacatgcgaaaaccaatgagaaccaaaactctgaccaataaaaaaggagaaacttatgcgttactgcaaaaaatgtacgatgccggatacacggcccggtattacctttgatgccgagggcgtgtgcagcgcctgccgccattacgagaaccgcaaaaatgtggattgggacgcccgcttcaaggagtttgaggcatactgcaacaagtaccgcggcatgaacggccccggcggttacgactgcgccgttgccgtttccggcggcaaggacagccactttcaggtctggatgctgaaagaggtcatgcacatgaaccccatcctgttcagcgtggaggataacttccccatgacccaggccggtatccacaacctgaaaaacatcagcgaggaattcggctgcaccatcatctcctgcaagcccaacatcaaggtgcagaaggtcctgatgcgcaaattctttgaaaagtacggcaagccgacctggtacgtcgaccgcctgatctacaccttcccgctgcatatggcggccaagttcaacactcctatgctctgctatggcgagaacgtcagctttgagtacggcggcaacgccgacaaggagacctactccgccatggaccagattgaaaacggcgtggccgttggcatgcccatggaagaactgctgggcgacggcgtgaccgagaaggacctctccctgacgctggctcccagcgccgaagagcgcgccaagctcgacccgttctatatgagctactttgtgccttggaacagctacaaaaactaccagatcgccaaggcccacggcttccacgacctgacccacgaatgggaccgcacccaccatgccgaaaacttcgaccagatcgactcccgcgcctacctggtgcacagctggctgaagtaccccaagttcggccacgccgccgctaccgactacaccgcccgctacatccgctacggcatgatgacccgcgaggaggctatccccatcatcaaggcccgcgacggcaagctggacccgctgtgcgtgcgtgacttctgcgatttctgcggctacaccgagagtgagttctgggccatcctggacaagttctacaaccgcgacctgttcgagaagaacgagtacggcgagtggcagctcaagcacccgatttgggaggagaacaaataatggtacgtcacgttattttgtggaagctgaaagacatgcccgaggccgaaaagaccgctgttaagtcgggcatcaaggccgggctggaagggctggccgggcagatcccggggctgctggaagtgcacgtttacaccgatgcgctgcccagctctgccaatgcggacctgatgctggacaccacctttaccgatgaggcggccctgaaaggctatgccgtccacccggcccatgtggccgtggccgacggcaaagtgcgtccctacaccgcggtgcgcacctgcctggattttactgtgtaagagataaaatttgaccataggggcggattccatatccgcccgtggagtgggcaaagctctgcgggcgtatatagaatacgcccctgcggtgtaacggaggcaaattatgcaaacaaaaaccatcctgatccgcggcggtctggtgcaggacgcggtacaccgagaaccccgcaaggtcgatctgctgctggcgggcggcaaaattgccgccattggcgaaaatctggacgccaccgctgacgccgaggtgttcgacgcggcgggcctgcaggtatttcccgggtttgtggacgcccacacccaca

SEQ ID NO: 7782 - DNA, 13521 bp, Unknown
  gut microbiota DNA sequence
accttgataccgaacgtgacacccttgccacagcaagaacatttggccataattgcttgcacctccttttcaatagcttaaatattatagcgtggatttttgcaaattgcaagggttttgtgcaaaaaagtttgaaaaatattatattttcttatcgttgtgcaaaatcgaagcgaaaatccgccatccatcccggtgcagggcttgttttgggggcatttgtacggtataataagatgagattttaatggggtggtgtttgcctttgaacggtctgctgtcagcaacacagatcatgatgtacatttgccgggcgctggtcgtcctgcttaccatcccatttcatgagtctgcccacgccctggtcagccattggctgggggatgataccgccgtgcgggcgggccgcctttcgctgaaccctatgcgccactttgacccgctgggtgcgctgtgcatgctggtaggcggcgttggctgggccaagccggtcagcatcaatccgtacaattataaaaatccgaaagtcggcatggcagtctctgccgcggccggtcctatcagcaacctgctgctagcctgggtgtctatgatcttgtacaagatctgctactacagcggcgcgggggacgcggtgccctttattgagatgttcctctattatatgatcacgatgaacctgagcctggctgtgttcaacctgataccggtgccaccctttgacggcagccgcatctttcttttgtttttgccggaaaagctgtattttaaactgatgaagtacgagcgctatatcatgctggccgtgctggcactcacgttcctggggctgttgaatcggccgctgtctgcgattgtcaatcagttgtggtctttccttattaaagggacaagctttgtagagttactgtgggggtattgattttttgccggaagttcttacttttaaaatagaagattttgaaggcccgcttgatttgctgctgtacctggtgggcaaaaataagatgaacctctatgatatcaacatcatggaactcatcgaccagtacacggccaccatccgcaatctgcaggataaccgcatggaggttgccagcgagttcattgacatggccgcccatctggtgcagatgaaaagtgccctgctgctgccccgcagccccgaggccgagcgtatgaaggccgaactgaccggccgcctgattgagtacagcgcttgcaaggaggtggccgccaagctgggcagccgcgcccgcgacctgtacaccgccgtgcgccagcccatgccgctggtgggcgcagccgagtacacccgccgccacgaccccaacctgctggtcaccgcctggttcaacctgatgggccgcaacctgcgcaagcgcaaacccacacaggagcgttttgagccgctggtcaccgcgccgtttgtctcggtatccagccgcgtttcccacatgctgcgcgggctgctgaaaggcaccctgcaaaagatgaaccagcttttcaacccggaggacagccgcagcactcatgtagccacctttctggcgctgctggagcttatccgcgccgggcgcatcaaggtagaagacgagggccagctgaacctggaccgcacccaccgcagaaacaaggaggcttccgcccatgaatgaacaacagaagattggcgcgttggaagccatgttgtttgcccatgccgaccccgtcgaggccgcgcgcctggccgacgccctgcgtgttgagccggaggaagttgtgcgccttttgaaaaagctgcaaagaaagctggacgaagaggaaagcggcatggcgattctttacttcgaccccgaccgctggcagatggccacccgcccgtattacggcgagatggtcaagcgcatcctggacacccgccgcaatgcaccgctttcgcccgccgcgctggaggtgttgtcagtcattgcctacaaccagcctgtctcccgcagctttattgagcaggtccgcggcgtggattcctcgtccatcgtagccaagctgctggaaaaaggactgatcgaggaagccgggcgtctggacctgcccggcaagcccatcgcgttccaggtcaccgacagtttcctgcgtgtgttcggcctgggctcgctggctgacctgccgccgctgcatggcgaagcaggggacaacgaactctcggaagctgaatctgatcctgccatcgataccgccgaggacggcgaacagctggaatggaagtgattgcctatgaccattgtgctcaccgtcctgctggcggtgctcgaattcgtaggctggctgcttctttttctgttggcgctgctggtagccctgctgattttgccggtggagctgcggtttgcctatcaggccggcaaaccatcgctgaccgcctggtacggcccgctgcattttacgctttggccacgggccgctgccaaagatacggctgcacagcatcccgccgcgccgcagccagcgcccgcagcacaaccaagcgctgaaccagcactgtctaaaacgcagcctgcaccagccgtagcccctgctgcgcaatctccgcaagcttccgttgcggcaaaggccgctcctacgccagcccccgctactgaatttaccggagagcatccaaaatccagcgctctgccgttccatatttcggagcgtatcgagaccgccctcaacctgctcgctcatgatcctgccgcctttgtccgctgtatgttcgggcacctgcgctgggtcgggcggtttctggcacggcacatcaaagtgcagcaccttaccgtattctggaccgtcaccggtgaggatgcggcccagaccgccgaactttatggcgctgccatggccgccgccaacaatctgctggcgtttttgcagcaggtcgtctgcctgcaatgcgaccatttgcagctggagtcggatttcaccggccaacgcaggggagagcgttacatttccggcaggctgcacacccacccgtttctgcttctctggctgctgatccggcttttgttccgcctgggcaaagacccgcagctgcagcctgcacataccaactgaaccaaattgcattttgcttttataaaaggaggagtttcccatggcagagcatccgatccaaggtctgatgggcgtcaccattgaaaagatccgcgatatggtggataccagcaccatcatcggtgatcccatccacgtagatgacactaccaccatcatcccggtttcccgcgttaccttcggttttgcatcgggcggttccgatgtagcgccccagtcgtccaagcagatgttcggcggcggcaccggtgccggtgtgtcggtcacgcccgttgcgttcctggtggtttccggcggcaacgtccgcacggtacaactggtggaaaaagtcaccgccgtggataacgccattgccgctttgccggaactggtggacaaaatcaccgcaatgattaaaaaagacaagcccgctgaaacgggcaacgcataagcataagaaataaggagtaagcatggcagaacagcgcgttcaaaaagtgctggccgatcagggtatctgctcccgccgtgaggcggagcgcctgattgccgccggcaaagtaaaagttaacggtcacccggtaggcctgggtgacaagatggaccctgattacgataaggtcgctatcgacggccagaccgtccgcatcgtgcgcaagcggcagtatacctatatcatgctgcacaaaccacgtggctttttgaccacccggtccgacgaccgcggccgcaagaccgttatggaccttgtctccgatgttccggccatgctgcgcccggtgggccgcctggataaggacagcgagggcctgctgctgatgaccgatgacggtgccttcatcaacctgctgacccacccgtccggcggggtaggcaagctctaccgcgtcaccgtcaatccccgcgccaccgaggagcagatcatccagatgtcctccggcgtggtactggacgacggcgtcaagacccagccctgcgtgatccatgttgtcgtggacgagccgggccgcaccgtgctggagatcaccctgcacgagggccgcaaccgccagatccgccgcatgtgctcggccgtcggcctgcaggtcgtccgcctgcgccgtactgccgaaggcccggtcaagctgggcatgctgcagccgggcgaataccgtgagctgaaaaagagcgagatcaacgccctgcgcaacgccgcccagcataaaagccgcagctccgaggccccgacccgcactgccccccgccgtcccggcccgctgcgtccccgcaaagagcagggctgaacccatatttagggtgtaaagttgctcgaaagcaattttttgtacaaaaaattgtgtattttttcaaaaagtactgcaatttctacttgtagatttttccacaaagtagtataattaatttaaatcgtggatttttttgtgaattcttcactaaaaaactttcagttttacaaatagggaggaagctgtatggcagcaaacaaacccggcaaggcaacgatccttgcagcattttttgatgacggcgcatattctccgctgtttaccgatggcgctgtaagcgccgcttacggcaacgcaaacggtcagagcgtctacgtcgtatttgaggacggcacccccgttggcgtgcaggatatcgaaaagaatatccgtgtgctggagatggccgccgagaccggtgccccggtcgtcaccttctacgactccaccggtgccaagctggagggcggcctggatctgctgaacgctaccgcccgcctgaccgctgagatcgcacgtgtttccggcgttgtgccgcagattgccgttgttaccggtacctgcgccggcaccaatgccatcaacgccgcttccgctgacctgtgcatcatggctgaggacgccgagctgttcttgaacgctccgttcaatgctgaagacaaagttgccggtgctggttccgctgaattcgccgccaaggctggcgttgccgctgtgaccgccgctgatgctgtcgccgctgccaagcaggctgcttctatcgccgccctgctgcccgccaacaacctggctggtcctgcactgttcgacttcagcgctccttccgctgcgctgaacaccgccaagtacaccgccgctgacgccgtcgctgctctgactgacgagggcagcgctgttgagttgtacaagggctacggcaagaacatcgttaccgctctggctaccatcaacggcagctccgttggtatcgttgctaccgagaaagccgccctgtgccacaagtgcactgccaaggctgcccgctttgtccgtctgtgcgatgcctacagcatccccgttgtgaccgtcgtcaacaccgaaggcttcggcaagagcgagggggatgaccaggccggtggtatccgccaggccgcccgtatggctggtgtttacgctgaggccaccacggtcaaggtcgctgttctggctggtgaggctgtcggccccgcttacacggtgttcgctgcttctgctgactggcgcgttgccgtgcagggctgcactgttgcaccgctggcccccgaggctgctgtcaccgttctgtacaaggacgagatcttcgcttctgataacatcgttgccgctacgaaggcaaaggctgctgcttacaccaaggacgtctgcagtgcccaggccgctgttgccaacggtgccgctgatactgtcgccgatgctgcttctgcccgcagcgctgttgcccaggccttggatatgctggccagcaagcgcgctgtccgcctggctaagaagcatggcaacatcacgctgtaatctgcgtttaacctgaacataacgacacgatctttaaggaggaaattcctatgaaaaacctgattgtcactgtcaacggcgttgcttataatgtcaccgtcgaggaaggcaccggcactgccgctgcttccgctcctgttgctgctgctcccgccgctgccccggctccggctgctgcacccgctgctcctgccgctcccgctggcgctgccggttccgtcaccgttactgctcccatgccgggcaacatcctggatgtcaaggtcaaggctggcgattccgtcaaggccggcgacaccctgctgatcctggaagccatgaagatggagaacgagatcagcgctccgcaggatggcaccattgccagcgtgaatgtgcgcaagggcgatgtcgtcaactccggcgatctgctctgcaccatgaactaagaaagggcaggtgaatgacattggctaagaaacctattaagatcaccgaggtcgttctgcgcgacgcgcaccagtccctgcttgctacccgtatgacgatggacgagatgcgtccgatcctgcccgagatggacaagatcccgtacttctccgttgagtgctggggcggcgctacgttcgactcctgcatccgttttctggacgaagacccctgggagcgtctgcgcatcctgcgcaaggagctgccccatcagaaactgcagatgctgttccgcggccagaacatgctgggctatcgtccttacgccgatgacgctgtcgagtacttcgtacaaaagtccgttgccaacggcatcgatgtcatccgtattttcgacgccctgaacgacccgcgcaacctgcagactgccatcaaggccgccaacaaggaaggtgctcacgttcaggcctgcatcagctacaccctgagccccgtacataacaacgagtactttgccaagtatgccaagaccctggaggagatgggcgctgactccatctgcatcaaggatatggctggtctgctgaagccctacacctgctatgacctggtctctgaactgaagaataccatcaagatccccgtagacatccacagccactacaccgccggtctggcttccatgtccatcctgaagggcatcgaggctggcgccgacatcgttgataccgccatgagtccgctggctctgggtacttctcatatgcccaccgagagtctggtcgccgccctgcagggtaccgactacgacaccggcctagatctgaaccagctgaatgttgtccgcgcttacttcaacaaactgcgtgagaagtacatctccaatggccagatcaaccagaagtctttgggcgtcgatgccaacaccctgctgtaccaggttccgggtggcatgttctccaacatgctgaagcagctgaaggatgccggcaaggaagacaagcttcaggatgttctggaggagattccccgcgttcgtgaggatgccggttacccgccgctggtcaccccgaccagccagatcgttggcacccaggctgtctttaacgtcatcatgggtgagcgctacaagatggtcaccaaggagttcaagggcctggtccatggcgactacggcaagactcccgctcccatcaagaaggagttcagcgactttatcctgaagggcgaggagcccatcacctgccgctttgccgacacgctggagcccgagatggacaagttgaaggctgaggccgccaagtacgccatccaggaggaagacgtcctgacctacgctatgttcccgcaggtcgcccccaagttcttcgaaaagcgcaatgcccgcctgcagggtgtcgatgctctgcatgctgactacgagaacaagtctcatccggtctgatttataactttgcaagccgtctctgccgcctggcaggggcggcttttttgttccagagattgggaattgcatcaggctcttctttgtggtataatatcaaagtatgagtgtacgggttgcacgcatgctttgcagtattgcacaagggagggcctgtttttgaccgttctgcgttatatcgtccctcccgaggcagactgtcagcggttggggatcttcctgcgcacgcagggcgtcaccgccgccctgatcaaatccgtcaaatataacggcgatggctttttcgccgatggagccccgctccacaccgaccagcctgtgcatcccggccagcagatcagctttgcattgccgccggaaccgcccaccagcgtcacgccacagcccgtcccgtttgccattgcctacgaggacgagttcgccgccgtactggaaaagcccgccggtatcgctgtacatcccacgttgaattacccggacggcaccctggccaacggctggctgtaccatttacagcagcaaggcaagaccggcgtgttccgcccggtcaaccgcattgacaaaaataccagtgggctggtgctctgtgcgcaaaattcgtttgccgcaccactgctggctgacagcgctcaaaagtgctacctggccatcgtgcagggaattctgccgttaggccccggccaggtggaagcccctatcgcacgccgcagcgattccatcatcggccgctgtgtacgggaggacggcaaatacagtctgacccggtacaacgtactgagtgtcggcacaggccacagcctggtggcctgcacgccctgcaccggccgcacccaccagattcgtgtacacatggcctacatcggccatccgctggcaggggacactctgtatggcgggtcggacagcatcctgtcccggcatgcgttgcactgcgctgttttgcggtttacgcacccggtcagcagacaggcgatccgtatccagagcgaactgccgccggatatggccgctttggcccacagtgaggggcttttcaacaactgggatctgcaagaactttgaaccaaactttgcatcgacctttttaggtcatctaaaaggagcagcaagattttgaattccgcgcaaatcgataaaaaaggcaaaaagaaaaatcaccgcgggccgtcgtccgccagtgcccataaggctcattcttcccgcagcaacctgattggcgacctgctgtacatgtatggcttctgggtcgagtacatttttgtgtgcgcttaccgcaaggcacacgccgtcgtcaaaggcattgccagcactctgggcaacctgcttatggtcgtgctgcgcccggtcctgctgggcgtcatcactttctgtgaggatctgattagtcccttcacccgcatggcctccggtatccgccacatccgggaactgccgcaggaactttccgatgccggtagcgaccagatccgcgctgccaaaaaggcctacgtccgcagcggtatccgcaagtactacacgcttctctggaacgccatcacctacgtgctgcccgccattgcggcggctgtgctggtggtcgtcgtccgcaacggcctggggcttcgttttgtgctgaacgtccaggtcaacggcgaaagcgtcggctacgtagccagcgagcaaatttttgaaaacgcccgcgaggatgtgcagtcccgtatcaacacggccaagtctatgctggaagaagccggtgcctctgtgccggatacccaatgggaagtttctcctacctacagcctggcagtttccgacgataccatgacggaaagcgagattgccaacgctattttgcagaccgccagcgatgagattgtggacggcaccgctgtgtacattgacggcaccctgcggtttgttaccaccgagggtgaccatctgcgcacctacctggaaagcatcaaggccccctttgaaaacgacatggattcgtccatccgcaccggttttgtccacgacatccgcctgctggacggcgtctatctgcaggaatctatcatgtcctacagcgacgtgatctccgctctgaacgaaggctccggcgtgcatacctatgtagccgaggaaggtgataccgtgcagagcgtcgtggataccaccggcgtcacctttgactcgctggcccagatgaaccccgacctgcaaagcctggatcaggagatccccgccggcaccgagctgttgacgggcgcttcctcggccgaactgctgaaagtcaaggtcgtgcagaccgagaccgagaccgtcgccatcccgttcagcaccgaaaagtccgagtccgatgaatacgacttcggcaagaccgtcaccctgcaggaaggtgtggacggcctcgaggacgtcacctacgagattacgatgatcgacggcgaagtcaccgaccgccaagcggtttcctacaacgtgctgcaggagcctgtcacccagatcaccgtgaccggcactaagctgaagaacggtatggtggccaagctcggctccggttccttcgtctggccggttcccggctacaagtatgtcagccgctggatgggcaatggccaccgcggcgcggacatctgcgccgcctacggcacgccgatttatgcttccgactccggcaccgtcatcgccgccggctggcactactcttacggcaactacgtcgaaatcgaccacggcaacggctacaaaacgctgtacgcccacatgtcccgcatcctggtcagccagggtcaggccgtcagcaagatggaccagatcggcgaggtcggctccaccggtaactccaccggcaatcattgccactttgagatgtactataacaacgtcctgttcagcgcgcagacactattcggcggcatgtaatttctgtcgaactctacaatatttcagcgcatatcctgtgcctgcgacagactttcacaaatattttgcaaatgtcttgtgccccacttttcaaatgccacaaaatagtgtataatgtatgaaagtgcgcatgggtgccttgtcccggcgagagggatgccaggcccgcacctgcacaaaggagagctacacttggaaaaattcgtgatacgcgggggagccccgctgcatggcgatgtcaacatcggcggtgccaaaaatgctgccgttgccattttgccggctaccattctggctgccgataaatgtctgattgaaaacctgccctgtatcagcgatgttatggcctcgctgcaaattttaagcgagctgggcgccagtatccgcatggtcagccgcagcacctatgaaattgataccacccacattgattgcaccgaagtgtcgaacgagttgtcccgccagatgcgggccagctactacttcctgggtgcgctactgggccgttttggtgcaggccaggttgctatgcccggcggctgcaacctcggcccccgtcccatcgaccagcatttgaaggctttcaccgcctttggcgctgaggactcggtggagtacggtcagatccatgtcaaggccgaccacctggtgggtgggcatgtgttctttgacacggtgtccgtcggtgctaccatgaacgccatgctggctgccgtgctggcagagggcacgaccattctggaaaacgtagctcgtgagccgcacattgtggaccttgctaacttcttgaacatgatgggcgctgacgtgcatggtgccggtaccgacgttatcaaaattcatggcgtcaaaaagatgcacggctgcaactattccatcattccggaccagatcgaggcaggcagctacatggtagccgccgccatcaccaagggcgatgtaacgctgcataacgtcatcccgaagcatctggaaccgattactgccaagctgcgcgcggctggctgcacgatccaggaatacgacgacgcactgcgcatcacccgcaccggcccgctgcatccgctgaaagtcaagacgatgccgcatcccggtttcccgaccgacatgcagccgctgatgaccgcgctgctcaccttggccgatggtacctccatcgtgactgagggcatctgggagaaccgcttccgttatgtggacgaactgattcacatgggtgctaacatccaggtggacggccaggtcgccgtcatcgagggcatcaaggagctgcgccctgcgccgttgcgtgccaccgacctgcgtgccggtgccgcgatggtagtcgctgcactggctgctaatggtgtcagcgagattgacgagaccatccacattgagcgcggctacgagaacatcgtggaaaagctgcagcttctcggcgctgacatccgccgcgtggagatccccgccagcagcatttcgcgggcaatgtaactgtacattctttatgggtcgcttgtgcggcccattttttctggactgaatacgaggaaagaacatggctttatttaccaccctgtattccggctcatcaggcaactgcggcctggtccgggaggggaaccaatacctgctggtggacatgggcaaaagctgccgcaccactctgaccgcgctgcgccgcctggacctggccatcagcgattgtgccggtatcttagttacccacgaacactccgatcatgtagccgggctggatacctttttaaaaaagtatcccatccccgtatacagtagtgccgacacactggacgcactggattcccgcgggacgctgccaccggctgtggagacctccgccatggatgggggaaacccgtttgatattggtccgttcaaggtcagctcttttcctaccagccacgacgtgccttgctgcggctaccgcatcgagaccccggacggccgccgcatggcccttgccaccgaccttggcatcctgacccccgtggtgcaggacagcctgctgggctgcgacctcgtcgcgctggaggccaactacgacgctttcagcctgcacggcgggccgtatccctactacttaaagcagcgcatcgccagcgaccgcggccatctggacaacagggcctgcgctgccgagattctggacctcattcaggagggctgcaaaaagtttgcgctgtgccatttgagccagaccaacaattcgccggagctggcgctgaccaccgtgtacaatgtgctgctggccgccggtatccagccggggcgtgatgtgctgatccaggcgcaggagcgcaacgacatcagcccgtacatcgagttttaagtttaaggggacgcccgcatgcagaacattgatttaatttgtatcggcaagatgaatgcttcttattttgcctccggtgtggccgagtaccagaaacgtctgggcggcttctgcaacttccgcatcatcgaactgccagaagcctccatcgccgacaaaaacgccagcgacaggcagatcgctaaagccctgcagaaagagtccgacgccatcttagcctcagtgcgcaagggcgcgtatctcgtcgcactttgtgtcgagggcaagcagatctccagcgaagatctggccgccctgctggcggagcgtgccggcagcggagccggggatatcgcctttgtcatcggttcctcccacgggctggacgaccgcgttaaaaaagccgcacaggcccgcatcagcatgggacgcatcacactgccccaccagctggcccgcctggtgctgaccgaacaactctaccgcgcctgcaccatcaacgccggtatgaagtaccacaaataaacctgccattacacaaaaatccccgcacacgagaaatgaagtgcccccaaaaagttagacaataatttgaagcaaaaattgttcaagcagccgaaagggct

SEQ ID NO: 7783 - DNA, 3363 bp, Unknown
  gut microbiota DNA sequence
tgtgcggtattgccctaaatatgttagtgctgcttcgggtagtaagtcttaaacttcttgaactggcggcgcagctgttccagcacgcaggcgtagcgcaccgggttccaggccagatccggcttgtacagcagcgagcaggcctctttgccctcggctttcaactggcgggcgtgttccaccagggccttgtcctcggtgtaggtaaaggcaacctgggcgggcacatggtgccagaacacctcgttgcggttgagcacgcagtcgctgccgccgtcgttccacttttccaccacaaggcgggcgatgttcatgccggaggcggtgacatagtagttgctgcggccctggcgtaggttgatctcaaacacgcggaagtccgtcgggtcgtcgcccaccttgatgtcaaagttggagaagccggtgtagtggcaatcttccagcatccggcggatgttctccaccaggggcagggcggtggtgtcctcggtcacgatggcggcatggttgcccaggccgtggggggtgtgctcctcgaccatcgtgtggcccaggcacatggcgcggaccttgccgttctcgtcggagaaagcagtcagcacccgcatgtggtcgtcgccgcccggcaccatcttttgcaggatcatcttgtccgggtagccgctggcgtagatgtcccgcacaattttggcggtttcgtccgggcttttggcggtgtagactttcttcatgccgtcaaagggaaacttccaatagtctacgctggaagacggcttgacaatgatgggatacgcaaagcccagcttggcagcagacagctcgctggcctccaccggcgcggtcagcaccttggtggtggggtaggggatgccgaacttgtcgcacacttcatagaactcggcctttttctgcacggtggtgtacaggtcggcggcggggccgggggcgatatactccggcagctcggccttgcggcggatgatcatggcggcgtagtcgtcagtgcagccgaacagatacagctttttgccggtgtgctgggcggcgaactcgtgcaggatgcgcagcatcgtgtcctcgttgtccatgtcaggcacggtggtaaagtgcacgattttagaatacttggtgggggccatggggtagcggccgtaggcgtagctttccacgccgtaagcctcgtggaaggcacgggcgaagttgtagcagttcaggtcagcgcccaaaaatacggggataatctcggacattatttccatctccaaatgataggcggggccgggcggccctgcttagaatttacgcatcaaatttctcaaagaactgttcgtgccaggtcaggaaggtgtaggccgtccagatcttgcggcgctcgtgcttggggtcatccagcatggccagcagcttatcctggtcaaagtattccccggctacgtcgccagcaaaactcttgcgaaccttggcggaaaattccgggtcctccagccacttggcaatgggcacggggaagcctttcttcgtgcggttggcccaggcatcgggcagggtcttgttggcggcggtgcgcagcacagccttggtgtcgccccgcagcttgtagcttacggggtaggtctcggcctcgcggaatacctcgcggtcgaggtagggcacgcgcagctccaggctgtgggccatgctcattttgtcggctttcagcaaaatgtcgccgggcagccagaggttcaggtcaaggtactgcttcttttccaactcgctcaggtccttcacgcggtcatagatcggcgcagcaacttcgcgggccgtggggccgacgcggtacttgggtttcaggatgtcgtaggcgtccttttcctcaaagacgtgcgcctggccgatgaaccaatcctcggggcggccgctgcctttaataatgaagtcgtgccccttgaagtagggcagatgctggctcacatcgctggccagatggcgcacaccggcgggcaggcgcttgtacttctgcatcagcggggtatcggcgtaccactcgtaaccggcgtagatctcgtcggcgccctcgccggaaagcaccacggtgacatgctggcgggccagctggcacaggaagtacagcggcacgctggacgggttggactgcggctcatccatgtggtactggatgtcggcaaaggcgtccaggcactgctccttggtcagcatctcgcggtagttgtggatgcccagcttctggctcagctcgccggcttcggtggtctcgtcgaatttgtgggtgccgtcggggctttcaaagccgaccgagaaggtatcatcgggcatcaggcaggcggtgatatagctggaatccacgccgccggacaggaacgagcccagcttcacatcgctgatgcggtgggcggccacgctctcccgcacgcgggcgtcgatctcgtccgccgcctgctcgtaggtcaggctggtcttgtggcggaagtccgcatcccagtagcgctcaatatgcatctggccgttcttgtactcaaaccagtgggccgggggcaacttgtaggtgcctttaaaaaaggtctcgttcatggcgctgtactggaaggtcaggtaggggcgcagggcctcggcgttgacctcccggcggaaaccgggatgctccagcaggctcttgatctcgctgccgaacagcagctccccctcgctggtctgggtgtagtagaacggtttgatgccgaacatatcgcgggcgccgtacagggtattcgttttggtatcgcagacaacaaaggcgaacatgccgcgcagcttggcggccagggcggtgccgtattcctcgtagccgtgcaggatgacctcggtatcgcagtgggtcttgaaaatgtgacccttggcctgcagctcggtgcgcaggtccataaagttgaagatctcgccgttgaaaacgacgacaacggtgccgtcctcgttatacatgggctgcttgccggcggccaggtcgatgatgctcaggcggcggaagcccagggccacggcgttttcgggggtgtcaccgctcaggtggtagccctccatatccggcccgcggtggatgatgcggtcggccatccgatgcaggatagcctcacgctcggcgcgcatgccggtaaaaccaacaaaaccacacatagtttttattcctttcccttagggtgtatgtggatgctcactacattatatttataggctttcctattgtaccacaagaaatccccccagtacaatacagaaccgccaaaaaccgaaaaatgccaacaaaaaaagcccctgctgctgaaaaatgcgcagggggagcctttaccatacaaactggaatttgtaattacattccatacatattgg

SEQ ID NO: 7784 - DNA, 3883 bp, Unknown
  gut microbiota DNA sequence
atccagctggcagacggcagctggtacaccctgccggtgggccgctacaccgtagccgaggccgagcgcagcgccgccgtggtcagcctgaccggctacgacaacatgctgaaactggagcgcaagttctccggcagcgcgattttgggcgacgcctacacgatgctgacccagatcgccggcacctgcggcgtggagctggcgcaaagcgaggcggagatcaaggccctctcgcccaacgccgagatcctgcgccagctcgacggaagctaccgggtctccacctggcgcgactgcgtgggggccattgcccaactgctggccgggtttgccaccatcgaccggctgggcaggctgcggatcgtgcagtttggagagacgccctgcgtgaccatttcaaaaaacgcacgtaccaatgcgaaaatctctgacttctcctgccactacgccgcgctggtcatcgagaccgacacggataccttcacctcagacatcgagggggagagcggcctggaaatgaccatctccgacatgccgctggccgaaagcggcaccgctgaggtgcggcagggcatctgcgacgcggtgtttgcgcggctgcgtgcgctggactacacccccgccgccgtgacgatgcccggcgacccggcgctggagctgggcgaccgcctggcgctgcccactgccgatgccgcgcccgaaacgctggtgacccatctggtgtggaagttccgcggcgaaatgacgctgaaaggcgtgggcaaaaacccctacctggcgggcgctgccacccacaccgacgcccagctgcgtagcctgcaaaagcaggccggcgcgaacaaaatcatttattacagcttcaccaacggctccgacataaaagtgaaggacaacggcaaggagaccaacgccgtgaacttgacttttgttaccacgcaggatacctcggccatgtttttggcgcaggtgctgctgacggcagaaccggatgtcgaggtggtgaagctgcctgtaacgggcgatactgcgtctgattttgaaggcgcggccacgctggaacaggatgccgccctgacgctgaccgtgcggtactacctggacaatgttctcatcgacagctttaccccggcccagcgtctggtgcggggcgcccacgccttggcgctgttttatcccttcccggatttggagggcgcggccagccaccgctggagcgtgcgcctgctgtgcgcgggcggcggcgtgaagatcgccaaggggcagatccgtgctaccatcaccggccagggcatggcggtgggcgacgcctgggacggcacgctggagcttgaggagctgattggccgaccgacccggacgcctgtggcccgcaaggtgctggccattcaggacgtcatcctggcaggcacgcagaagcccatcggtgatgcggcggccgagatcatcaccaggctgctgcgcaaggcaccggcaagaaacattttgtaaaaccgagaggaggaactttaccatgcccatccatggtcacaccaaaatcgaactcaccagccaaaccaccggtgaggtcgagacgatcgagaaagacaacattgtaacaaacgctgtatcgcagatatttaacgctttcaacggtatggccctcctgcgggaggccaacgccaacggtgagtacggcagcacgtcggataagagctgggagctgccggaaagcctctacggcggcattttgctgtacgacaccgccctgggcagcgacccggacaccctgttcgccccgccggaggccaacctcgtgggcagcggcgtgcccaaggtgcttaacaacggcaagggcctgcagcgcggcagctttaacgccaccgagagcaaaacagacctaaaaaacggcgttgtcacgtttgtttacgacttcgccaccagccaggccaacggcacgatcgccagcgtgtgcctcaccagccgctacggcggcttcttcggcgagagcgagaccgccctgcccgccgccgacggctccaacacgtcgagctactacaacagcgcgctgttcgggcaggagacgatctttcccaacgcgccgggcaagaacgaccgccacctctacggccgcccgctgtacgccgacccggaaaacgacgagatggtgtttggcgctatcagcaacaataagctggtgctgcgttacgccaccgctttgacgaccgagatcgatctgttcaatcccatcaacaccacccgcgtcaaaaagaccgaggagcgtgacctttcggattttctgcaggtcgaccacttcagctacagtgccgtaagttatgacgtagatgcggataagatctgcgtcgtcagcacccccggcgccgaccagctgaaaaccaccggcctgatccgcgtgcgcacctacgaccgcaagaccctggaggaaaaaacctacgccttcaccaaccccaccggcgtgacgctggcgggcaacgtgggcggcacctcgccggggctgcgcaataccggccgtctgctgggcggctgcctgttcatggccgggtacaccacctcgccctcggccaacgcggtgccgtttttcaaaattccgctggccgatcccagcaacgtgacggccatcaccacccacgatctgctgatgcccatgttccaggatatgcacgacgggcgcatctactttatgggcagcaggtacacggcctgcggcaccgtgctgaataccgccaccaacgagatgcacgccatcgaggcctactacaactacgagcagtacccctacctggctgtgcccgtgctgggccagcccgccgtgccctacatggtgcgttacgacgccaactccggcaacaaccaaagcaccgtgcaccagggcatccggcgcaactacctggccaccatcaacgatttggacgcgccggtgcagaaaacagccgataaaacgatgaaaattacctacacactgcgcagagaggagagttgatatgcagggcatttttgcggggcgcacccagctgcgctacccctacggccgttacggatacacccgcggcggcggcaaaatttggcacggcggtatggatctggttgggtcagactcgaccgatatacgcatgccgtattacaaaaataagcgtatcaccggcaaagttgtccgtgcccgccgcgtgacagaccacagcaataagacttgggagtggggctggtacgtctgcgtgcagctggaccccggccagacccccgacgacgtgaactatctgtacttttgccactgccgcgaactgaaagtgacggcggggcaggcggtggccagcggcgacctgctggccgtgatgggccaaagcggcaacgcggcgggaggctacgaccattgccacttcgaggcccgcgccacggctaccggcaagggcctggaccccagccagtacgcgggctgccccaacgcggtaggcgtgtacggcgaggcgccggggcaggcggattccggcgaggagaatgaggaaaacgccgatgctgcgaagaaactgcagcgtatttccatcggcccggtaagccggggcgacgccgacgcggtgtatgcggtgtgcgtcagccgcgggctggtggccgctggtttgtacaaaagtgaatggagtgtttgaatatgaacggaaatttggacaagaaaaacggttttttatatgcaaaagccgccgtggccgcgctgtgcggggcctttacggcggcgtttgggtggctgggctggttggtgctggcctgggcggcctgcatggcgctggattggctgagtggcagcgcggccgccgccagcaggggagagtggtccagcgcggcagcccgcgcggggatctggcacaaagccggtatggtggtggtcgtctgcgtagcg

SEQ ID NO: 7785 - DNA, 35380 bp, Unknown
  gut microbiota DNA sequence
tggccgcagtgaaccgttctttaagcggttgaaaaactcggtcaatattctgttgccactgatcttaacgagccttaaccgcatcgacgtcatctctaacgcgatggagttgcgcggctttggcaagggcagcaagcgcacctggtacgttcgccgtcccttcgcccggcgtgatttcatcgccctggcccttggcgtggtattgctgctggtcagcctgactgtcaccatcaagtttggtcgcttttataatccatttgtataatgacaaataaataatacaaaacgtaaaaacaaactgccttgcagggaaaacctccccgcaaggcagttcgtttttacttatctattatagtaggcttacagccagatgggattcgtccaggcgcggcggccttggtggtcgacgacctcggcgcggatccaggtctcgccgccgtgcagtgtgtgcaggccatgggtcagcgggctttcgtgctgcaaaatcgtctcgctgccgcctacgagcccgcccgcaataaagttgatgcgcgcggcaggggagcaggtcaggtacacttcgtcgccatccacaccccaggcagtgatctccggcccggcggaggcgtagtaatcaccggccagcaggtggtttacgatagcctcgtgggtcaattcctcagacttcacacagacccagcctcccagtgcgtcaaaaaacttggcagggttgtggttatcgtccgaagcaaaacagcctgtctgcgtgcctttctgcagcatcgtgttccaaaacgcggtgtcgcagccctcgccgcactctacctcggtgccatagttatatacttccacggcccagaccccttgcaggccgacgacatcggccatctccacgcgggaccatgtggggtggttgtaggtggtaaagcagccgcggcttttcaggtagtcggtcaactgctgcgcagcctgcaaaccgtcccaatcgcccacggccaccggcggggtcaggcgttcgccgtggtgcaaaacattgcctccggccgccctttgcatggcttcgttgcccaagatgccgtggatgtggtgggtcttgcgcagtccggtcccatgggtgcagcagaactgcaccagttcgggcatcgaggcatttttctctttcagcgctgccagctcctgcagcgcggcggggtccttgggcggctgtaccagccagctggaggcttccacgccgggcaataagatgaaatcttcacggtccaattcggcccgtaggtcagtgtagtagtcgtgctcgctcaggcacaaaaagctgtagccgtactggcggaacagcgccaccgcctgtgccggggtcaggtgcccgtccgagttggtggtgtgggagtgcagattgcccttgtaccactggccggggccgccgaaacaatcctttttcatacggcttcctcctccacatgcaggcagttgcgcttttccagcgagagccagaccttgctgccgttctcataaatcgaaaagctgcggaacagcgtatcggcggaaagctgcacaccgttcacatccaccttgtagcgcagtacattgccgcggggcgtgctgtcgataacggtgccctcaatatcgtaggtgccgggtaagttctgtttttcgcgggcaatgttcagcacctcgggccggatggcaatgggctgcgcgggcaggtcgatgtccccggtcacacggccaaattccagcggctccagcacattgtagctgccgatgaagcccgccgcaaacttggtgcgggggtgggtgtaaatggcaatgggggtatccatctgctcgatcttgccgcagttcagcaggcagatacggtcggacatgaccatggcttcgtcctggtcgtgggtgacaaagatggtggtaatgttcagctgcttctggatgcggcggatctccacctgcaaactcttgcgcagcttggcatcaatggcgctcagcggctcatccaacagcaaaacttttggccgggtgacgatggcgcgggccagtgccacacgctgctgctggccgccggaaagctgggccgggtaggcgtcggccttgtcctgcaagcccaccatggccagagcttcggtgatacggtcgttgatctcggccttgcttaagcgctgaatcttcagcccaaaggccatgttctgctccaccgtcatgttggggaacaggctgtactgctggaacaccatgccgatctgtcgctggcgggcatccaggtcggtgatgtcccgcccttccagcagaatgtgcccctgctgcacctgctccaacccggccaggcagcgcagcaacgtacttttgccgcagccggaaggtcccagcaaggtcaacagctcgccctcctccacttccaggtcaatgcctttcagcacttgggttttattgtcatagcttttgcagatatttttaaaggtaatgtaagacatggcggactccttaggatacccggtcggccgggtcctgacttttgtgtacaagataattgatcagcagcgtgataagcagcagaatgaccacggcggcgctcagttcctgggtgtcctgggcgcggttacggtacaggtaggactgggcggtctcaaactgcgaagacgcgatgattttgatgatggcgaaatcgccgaacagccccgaaagacacatcaaagcggagttgcaaagccccggcaggatggccggcaccacgatggtcaaaaagctgtggaaccgccgcgcacccagcatctcggcggcttccagcagaccgcgggtgtttaccgcgtacagactgttgcgcaaaccctgataggtcatgggcatgatgaacacgcagtagatgaagctgagcatcacaatgcggttggccaaaagggtgttggtgcccgcatacgtgcccagcaccgaggtagccaggataatgccgttgagcgtggtggggatcaggcagagcagctgcaccaccttttccagccccggcaggtagacgatgaccacatacaaggccagcagtacgctgacattggtgatgaccaccggcacaaaggagatgagcagcccgcgcccgatgccaagtaaaaatttctggtttgtcagcgtggcggcgatgtagtgcagggtgaagccctctggcaaaatatgcacccatcgggccgagaacgcgtagacgaccgtgaccaccagcggcatcaaaagaaacacggcaacgatggttttccagatcgctttggggagtgtatgttggttcatgttaccggtttcctttctcaaaatgccgcttgaccaggttactcaggcagatttccagcacgacaatgcccagcaataccagcgaaagggcactgcccagttcgggccgctgacgggtatcgcctacaaacatatccacgattttgatgggcagcagcgcaatgctgttattgatgagcaggtacggcgtcgcgtaggcggccaccgcgttggcaaacagcatattgaaggtgcccagaatgcccggcatcatcacgggaatgcccacctgcagccaaaaacggatgctgcctgcgttcatcaggcgggcggcttctttccactcccgccgcaccttgtccacggtgggcagcaacagcagcgtacccatggggatctggaagtaggcgtagataatgaacatgccggtcatcgagtacaggttgtagttggccagcaggctgatgcccagctgcttgcccagcagcaccagcacaccggaagtgcccatcatcgtgatgaacgcgatggtcagcggcacaccggaaaaagtggaggtcaggttcaataaagaaagataaagcgtctttttgcggccatggtcgccatacagcgccagtgccaggaaaaagtcaatgaccagccccaccgcggtggacagcagcgttacccacaggctgttgatgatggccgtgcggtacaccagctggtgggcaatggtgccgaactgcgccaggctgaaatgcccgttttcggaaaaggctttcacgaacatgctgaccagcgggacacattcaaacaacagcacgatcagccccaggggcaccagcagcaggcagcggctgccggtgcgtttgatttgttgcagcatagcaaattgctcccatcagcccatcaaggggatgatctcttcctcccagcgggtggcgatctcggtgcaggcggcggtcacggcatcgttgtcggtcagggggatggtgttggtgtactcctcgtccgggatcatcttggcggaaagttcagcaggcagttccacatcgctgcggatggggcgggcatagccctcggcacggttgatctgaccctcatcgctcagcagatattccacagtggctgcggccgcgtaggggtgcggggcgtacttgttgatgaccagcgcatagccggactgcagcgcgccatccttcatgacgtggcactcgatattggcatcgggtacactggccttggtcaggtcacggtactgcagggtcaggtaatcccaggtcagcagcacatcgatctcggcgcgatccatgcgctcctgactgtaggtgccggcatccaggcggccctcctgggccatctctttaaagaagtcgaaggccggatccaggttgtccattccgccgcccagcgcataggcgcaggacagcaccgccatctgggcggacgcaccgcgcaccacgtcgccaatggtgatggtggcgccgctgtctttcagcgcctgccaggaatcaatggtggtggaaacgcggtccgcgttgaccatggcgctcatagtgcccacgtagctgatgcaccacttgccgtccgggtccttggcccaatcggggatggaatcccaagtgctggccttgtagggctgcaccacgtccatctccacggcggtggggccgaacgcctggccgacatcgccgatgtccttcgtggcggcatccttctccgtctcaaaggtagaaagctcctcggcggagctcatgtcggtgtcctcatgggtcaggccgtacttctcgctcacagcggcccagctgccgcgccagttggcccagtcatccggcatgcctaccgagttgatctggccctcctccttggctttttcaaggatggtgtccagcggcacttcccgcaggtcaacgctttcggcagtagaagcgccgccgcaggcggtcagggacagggaggcagccatcattgtgccgcacagaacggcaacggcttttttgtggttgtttttcatggtgttctcctttgaacattcgtctcatatttcgtcggaacatctctaactatacggaaattcaccccaccaaacaaccaaatccccgccaagtttgtgtaaagccttggcggggcgcggggcgttattgtaaaaatccggtgccggccaaattggtcagaacggccctaaccatatgatacggcgttgctttttggcccggcgggcgggctgacgggccgcgactggtaaagcagatgtaaacggcgggtaacgtttacacacaaaacaaaaggctcgcagcagcaggatactttagtatcctgaactactgcgagcccttgtgagtaccaatttaccttgttatagttatcgaaaaatgcaaacccttcagcagtttcccatggcataggccatatcccaaaagcgcagatcgaaaagacagcacttctcaaacagctcgcacaggcgattttcctcctgcggggaaatggacgccgccagcgcgtcgatgcggtcgatcagatcctggttggctttgcggtattcctccgaaagatagcctgcaaaccaggcaccgtaggtcttattttgcagtgcctggggatagcgctgaaccatctgctcggcaatatacgcataactccaggagcagttcaaaagcgccaccaacccggtcagcacatttccgttctgggtctcgcacagcatataatgactgtaagcacaattgtcaatgtgcgtgtgcgcctggcggatctcctcttcggtgatgccaaggcgctgcatgtagggaatatgggtgcgataggtttcgccgagggtgctttcgatctcaccgctcaaaaagcggatctgttcaaacgtatcagccttttgcaaaatcgccgctaagatctttgtgtaatcccgcaggtacaggtaatcctgcagcatataatagcggaatttctctaaaggcagggtgccgtctgccatctgggtgataaaagggtggcaaagataccgcagccagagcttttccgcaaggacagcgatcttttgcgagagtttcccgcttgcttctatcttcatttgcgggcaatgatggcaacatagccgccgctctggtagccgggcacagcgtcctcgacatcctcgttggtgtacatcgggttcttcagcaaagtctggcagtagtcaaagtcatggaaaccgaggtctttcagcacattgatcttctcttcggtggagtgccatacaccggcgctgcacagctccagcgggtagggcagctggggcattaccccgttcagataaggatggtcaaaggtgcccagattcttagccagcagatacatgaagccgaaagcactctctttgggcacatccaacgagatgaagcgcccgcccggtttcagagcctttttgcagacagcgaaagccttgtgcagatcctccatatagctggagctgccgttgaggtaaatcacatcgtaggcattttcctccaggtcggcatcctcgatagcgccgaaggtgatgacgttcacaccgcgcttctgggcaatcgcgcccatatcgcgggaaggctcgatgccctcgatgccgctgtgatcgatcatgctctcaaacaggccgctgccgcagcccacagaaagcacgcgctggccggaaatattccccagtgcccgctggaacaaccgcagctcactctggaacaggttgtcgttttccataaaccaggcatcatattgggctgcataaccatcaaatttgggtttcattttagaaggttcctttcttttttagcgtgccgcgccggatttttccaccccgagcgccgccattttacaggctaaattatagcataaaccctatgctgccgcaatacgggatggtgcctttgcggtgcagatgcacgtcatagtgccggacggcgtccgcgtttttgcccgcagggggcgtaaagtcgccgactgcgtgtgcgatacctacgatttcgtacttcattttgtacccttactttctttttccggggcgttttgcttgccccctgttttgggaaccaactcggtttttgttggtgacataagagtacaacttttactggtaaatcggaaagcctgaagcatttcctttttcataaaaatctgttataatagacaaaaacagatgtaagtggggcgtaacagatgaaaacagggcttgtactagagggcggtgcgatgcgcggcatgttcacggcaggcgttatggatgtgctgatggagaacggcgtggattttgatggcgtgatcggcgtatcggcgggcgcggcgtttggctgcaactataagtcaaaacagattggccgtgttatccgctataatacacgcttctgcgccgataagcgttacggcggccttggctcgcttgtcaaaaccggtgacatttataatacgaatttttgctatggcacggtgccgctggaacttgacccctttgactttaccgcctacgatgccaacccgcaggaattttacgttgtctgcaccgacatcgaaagcggccagccagtttaccacaaatatctgggccaaagtgaccacggatttgattggatacgcgcctcggcttcgatgccgcttgtctcgcgcatcgttgaaattgagggccgaaaattgctggacggcggcattgccgattcgatccccgtgcggtactttcagtccatcggctacgaccgcaatgtggtggtgctgacccagcctaaaggctaccgcaaagggaaaaacggcattatgccgttgattcgccgcaagtataagcgctatcctaacctggttacggcgatggaaaaccgcccagccatgtataacgaaacggtggactacattgctcaggaggaaaccgcgggccgcctgctggtcattcgcccgccccaggcgctgccggtggaccgggtagagaagaacccggagcacctgaaagctgcttacaacatcggccgtcaggaggcggaaaagcgcttggccgaggtgaaagcctatttactggactgatctttgccgtgcggctcctgaaaggcaaactgtatcgttacatggtggtcggcatccacggtaatacgtttaataaactgctgcaattgcaccttgtttagggtggtaaattgcagcagtttttgcatttcttcgcatagcgattctgcgtcagcggcaggggagggagcatcggtcagcgcctgcaatcgctgggtcagttggccttcttctttgcgtaaatcggatgttatatcgctgaattcttctctcgtcaatagcccgtctgtcaagtctttgtaggccgacaggcgggtcttttttgttttgtttagctgggcggtcagtcggtcacgctcggcttgcacggtgttgctgcccttggccatctgccgcaagcgctcctgcgcaaagataggcaaatcaactgcaccatccgccagtgctcgcaattgatcgcagatctgtgcttccaggcaatcctcccggatggagtggctggtgcacagatgctgccccggccggcggctgtaggtgtagcaggtcaggtaaaaatgcccgcctaccttgtgggcaaacaatttgccgccgcaatcggcacagtaaaccagcccggtcagttgatgcggttgcatgttaggcgcggtgtaactgcgggtttccagcagcttttgcacctgcaaaaaatcggctttggtcacaagcccctcgtgggttccctcgaccacgatccaatcagtgctgtccaggaaccgcgccttatgcaccttgtaacttaccatctcgcgggtgtgctgggtcaccgcgccgtagtaagtgggcagggtcagaatgcgcttgatcgtggtgggggtccactcgccggtaaagcgccgcccggtcatccctttggtgcgggccgggcaggggacttgttcctgcatcagcagatgggcaatatgggtgcgagtctcacctgtcaaaaatagtgcgtagatacgctgcacaacaggcgcagtgtccgggtctggcaccaggtgatatttgtcggctgggtccagcttgtacccgtaaggggctgagcctaggtacttgccttggcgctgtaaagtgcgtttggcgcgcaaaactttgttgctgcaatcccgcgcgtagatgtcgttcatcaggtttttgaacaggctgggatcgatgctgccggtgtcggcacgggcactgtcgtacccgtcattgaccgctatgtaccgcacacctagggtaggaaaagtcttttcctgcaaaaggcccacttccaggtagttacgtcccaggcgggaaaggtcagtagtggcaaaggtggtgatacgcttttcctgcagtgcggccatcagcgcgcggaagccgggccgctcaaagtcagtgccggtgtggccatcatccaaaaattcggccacgatctgccagccttcccgcgctgcccactggtgcagatagctgcgctggttgccgatggagttgctctcggcctcggtgccgtcagcggaactcaggcgcagatagatggcaatctcccgactggctgtcgcgccttttttacgtaccgccatgctgttacactgcctgtcccggcagggccgcggtgcgcagcagagtctttaaaagagcttcgagcgtagggccgttgggggtgtaagtaaaggtgacctctgcttgccgctgcaccttgccagaagccttgttttgctggaccacctgctcacttttcatgcaaacgccctcctatttcaggtttgtccatttctatgccccaccccaacaaaaaatgccgcagcatttctactgcggcatttgcctcctgtgcggatgtgcagatgcgccggaaacccggcacatcgatacatctgcacaacttttcagtcagcaaatttgaattacggatcatcttctatgcgaagagattggagagctccaggataaggctcccaggaagccaaaaatctacggcgggtgcgttcaaatacatgatagtcggcaatgttacttatggcattggctagtggctgaattactgggtcccctagaatttcttcgtcaggaacaacgtaatcatcatctcctggacctaaacgggagactgttttgcttttgtgaagaaacttgttatgcatgcaaattgtgaattgcgtaaaagcttccttattgaagtcaatttcattgtcatatagcttggaaagcaccttataatagggggcaaaccttgcaccagtacagcgagctgaaatatagaagtccttgacaaatcgcttagaaggatttcttctggaattcttcatggcctcgcagatagaagagtgcttgaatagaatatgtcggtctctgtaatgaataaaagagtggcagtaaggatcaagtatggaggcagaagttcggtatgctatactcataatagaggaaaaatgctgccaatctgctgcgtaggtttccgttggctttccaaacaggggggccagtgcggtataaatgtaaagctcaaaggacgcttgaggatcgagtgagtagaattcactaggcagagcgtgtctatgagtggcggaacgctggctggcgctgtctgtgggagaaatactctttccgcaatccagttcaggaatttgctcggcaagttctttccaattcagcaaaatatcaaacggtgtagcaataagtagggaaaatagaacggcctgttcatagacgttccagcgtagggaacattgggtatggatttttccgccagccttattgcggacggtaagattttccgaagccatggccagtaacatacacaaagcacaaatctgcagccaatattcatgtgttatggctttaacagaaaagtagcgagcgtaagatccgtgaccaggtttggaagggtaataactggaaaagcgagcttcgcgtacagagggagaaagttctgataaatagtagcagacattggcaggaaagcaaaccttttcaggaagccctttctttcggggaaagcagtcagggtccttacgtgttgcatgggatagcataataagtgagaggacaggggcaagtggcagagtttctttgtagagccataaaggagcaattttatcgacaatagaaccatcaatggcgtaatctttgccagaagagtccatcttacgagaatggtacggcggtttgatgaaaagataagaaaatgggttgacattttttatagaaattttaaagcctttagggtttttagggcctttggggcctttcgacgggatatcctcagaaaattctgggataggcagagaatagttggtgctctgtagagaatcccagaaactctgtgaatctgattcgtcagttgatagcggagaaagatttttaagctcattattcttgaaattttcgctttttttcaaaatctcaagcgtttcagaagaaataccaggaatgttggaaagataagaaaaaatatcgtattttcgcttgattttaaatatttcgcctgcggtgatgtgtggtttgtcctggggtaaagtcataaaaatgcctccatacagggtgtatacgtgttccaatatgcgggaagacaaaaaatcggcaaataggtacaatggcaagtgtccggacagaaaataaaattgtaagccaaggaggctatcaaatgcgaaaatcccaagaagatgaagatatagagaaaatcttccaaaagtcaagaatgacaacggaagcacctatagtcaaacaggaagtcgaccaggaaaagccaaaagaattggagaatactatgtacagatctgcgaaagggtggatagagaccctatgctctgcagcagaaactgccggtcatatctccagtgaattgctgaccacagtcggcacccagaaaaaccagcgtagagaatcggaagcgagggccgagcgcgaaaaggcagaagccgaacttcgctatgccaaggccagaatagaaaacgcccgcgcccttcaggaagaaatcaaagcggattacatgcgggatgtccaagaatgctaccgggaatatttgaagcaaaatatagcaaaggtgtcaggacttccgtttgtggaacggctgccgcctgcggaagcgggtgatccggaatgaataccgaggaaaagcttcaagttttagctgccctgttggaggaaaattgcagcgctgtcagaatcaaagacggatgtatgcttttccagggtaaaaaagcgctgtttggtatcctgctgctgaaaacgatttatcgtgacgatgacaataaaataacatcattccgcatgcagtggctggagaaaggggcggtggatggccccgaagcagatgttgctatggcacaaaaccgacttatagaaaatctgcaaagtacctttcctcagatgctggtcgaaaatcctgccagagtaaagcagtgtgtccgcattgcactccaagtacagctaaaccattacaagcagctggaggcatccgagggcgtgttcattacaaaaccaggatggcacaccgaccggaatgatgagctggtatactatgtgggcccgatccggtatgcagtccatacagaaaccgtgggcatggcggattcgctaaaaaagtatcgggttccagagcgggccacggcgatagcacaacaacaggaatgcgacataataatggaattggccaaaataccctgtccgtccctgcacatggcgtttctgttccagatcgccgcaatcatcaaacctctcatggaacgagccggcattattgacagaaacccaatcctttatttgtatggggaagccggctccggcaaaacgcgtcttcttcggctcgtcaacagcttatacctcagaaacgatggtgacagagaaatttttgaaattcccctgcgctcctggaaaaacagtttatatagtggaatgcaggaggcatccggtacggtagttatcctggatgatctggcaggcagcaacggtgtacagtctgaacaggatgccaaaaagctgaaagagctgatcatggcgctgggcaatggggccctgcctctccgtggaacagagggtaaagaaagccgtgtagactttttggcggcggttacagcaaacagtatcctcgattatacgttggaaatcctggaacgtatctgcatcgtgtgtggggggtagggtgatattccctttgagcgcatccaacagatcatcggcagtgatccgtctccgcttgcgggtatttacctgcagctgattcggcatatcgtaagtaaacaggacgggcttgtcagatcgattcaaaaggcaagcttgcgttttacgcgccccgcagaactgtacaggatacacggaaactaccaggtatttcgctatgcagtggtggtgattgtagactatatgcaaactcaccgaatgagtaacgtggacttttttatacatgcgatggaagaaagcatccaaagatgcgagcaggcacagagagaagcaatattgaccaaaaaaagccgggctcaagaaaaggctgcgccggaagaatatgaccaaaaagtgatccggcagctgaaactggaacccaatctgctggccaaaagtccccgggagtacaggaacggcaaaggctatatcggctatattgatctgaagaaccaacgcgtctgcttaaaggtaaaggcgctgtgccgaaagttcccacccggcagcccaaacatgccggaaggttcgcaggaacgaaaaacctgtaggctatttaaaaagaacccctggctcatctgcggtgatacgcggacgagcgtacacggtgtagatgacaagcggttccttgccctgaaagcagaggcattcggtctgcgctgtgaactgtaatttccttcattataacaaagcaacgttaaaattacaacgcaaatacaaaataatcgatgttaaaattaagaggtacttatatggataacacaatttcttataccagacggcgggaagacagtgcagtctacaaagttacgatccgtaaacagcttacagcaatacagatgcggagtgtaaaaggccacctgtacaacaacccttactacgaatgggaagaggataagcagagatatcgccttggggacggcttgtacatgcgctttggagcaaataacgaccaaagtgtttattgggacattgtgcgggaaaaggacgaggatggtgaatacgaagaactcaacttttacggctactcggatccggagagcggcatccgtgacctaatgcgggaatgggacttgcatagttacgatccggcccagcagttctcggtgcggtccgtaacattgcaggcaatggtggaactggatacggatatggacctttcctggtatttgctgcttatctgcaaatcggtgtgtgacagtaactacaaggtgcaggaacttacgccggacaaatgtgtgattggttgtaaatcacacaagcttaccgtaaaaattgaacgagactacggcaatccacgcttgatttttaaattgaaagaggggcggcgcgccatcaaggactacaatcaggccgaaaaggttataagcccctatgaaacgctgaatcactattacgacaatggggaagatcttatctctgccttttggcgcatggtgctgaagaataccggcgattatctgcacagagatgacttgcaaaaaaagctgcgggaggtttaccctaaacgggccagcgagttggcagaagttgctgatcggtggaattcctatgctgacagggagaaggctgaaatgaacatcctggccgatatggtcgcagaagggcgaaccccggcggcagcacggaaaaaactgacagactaccgggaagcctttgcccgtgccggggtatctatggtctacctgccggatgatgtgcctgtggcgcagatgccatcggtctggacgctgctggagggtgaaaaaagagcgagctatgaagaattcaagagaaaattacaggaaaggtatgaatcgacgttgatggaacgcctgcacaacggcccctgcgatggggaatgcgaacagtgccagaagaaagccgaagaggaatacgaggaactttgcaacagttaaaactgccatgaccgtatttctataaaaaataattgtatattattttagtagaacagaaggcactggaaacggtgccttctgttactttttatacaaggaggaagtcccatgaacgacctgtgctgagacggattgcaagctgccggcagccattgcggaagccttactgactttggcagtggctgtcgtgacagaagtaatcaaaaacatgagcgaatgaaaacagaaaggaaatgcgatcatgaacgaaaagacccaaccctgtacccactgtggtgccgtgcacccccgcgtaaacctgacctggatgggcagtgccgaactctgcccggaatgcctgcaacgatatacggtatgctgcgattgctgcggcgaacgcatctggatggcaaacgactacggaactcattatctgcatctttgcgcgtcctgccgtgcagacaattatgttacctgcgaaaactgcggcgcactgattccgcaggaagatgcccactacaatgacgaggacgaagcttattgcgacagctgctatgagcgcggttacggcggaacgattcacaattattcttacaagccggaaccaatcttttacggggatggaccactctacctgggtgttgagctggaggtggatgaagcaggcaaggacaacattaatgcggtccaagcgctgcgggcgtttaaccaagaaaatgtatatggctatgtcaaatcggatggcagcctaaacgatggatttgaactggtgacacatccctgtacgctggaaacacacttacagcaggtgccttggcgggaaacgctggaagccttgcgcggcatgggctaccgcagccacgcaccgggaacctgcgggttgcatgtccatgtcagccgtaaggcattgggtaaagatgtgtacgagcaggaagagacaattgccaaactgctgtacattttcgagcgcttctggcaggagattttgcgcttctcccggcgaacagaaagccagatcaaccactgggctgcgcggtacggctacaaagattgcggcgaagagattttaaaggaggcaaagcacggagctaatggtagatacgcctgcatcaacctgactaacacggacacgatcgaatttcgtgtgttccgcggaactctgaaatacaatacagtaattgccaccctgcagttcgttgcaaacctgtgtcgggtggcaatttctttgccggaatatcgcatccaagagttcagctggccggcgctgattgaagcactgacgcaggataattgcccggaactggtgcagtacctaaaagaacggaacctgtatgtcaatgagccggtcacggcagaaagagaggtttaacctatgtgtggattgtttggatttagtgacctgcagcacagtctaacggaaaaacaggccagcgcccttgccaattcgctggcccgcgccagtgcagttcgtgggcaggatgcaacaggaattgcctacgtacagagtggaaaactgcgtatatacaagcgcccgaaacctgccgcgcggatgcaactgcggctccccaaaggcacgacccaactgctgggccatgtgcggatgacgacccaggggagcgagaagaaaaactataacaatcatccgttccgcggtgcattgcccggcggagactttgcattggcccacaacggtgtactgcataacgaaacgggcattcgcctgcggtttaacctgccacagacggcggtggaaacagacagttttgttgccgtccaattgctgcaaagttatggcgcggtgacaccgcagaccattgctgctatggcagaacagttggaggggacgttcacgttttcgattctgacttccggaaatgatctgtaccttgtgcggggcaataacccgctgtcagtgtggtattacccggccacgggggtgcatctctacgcaagtacgccggaaattttggcggcggcagtgattccgctgccatatttgcggggaaaagtacatcagaccgttaaggtggctgagggtgagatactttgcataacggcggaagggaaaatgcatcgcaaccatttttcaacggaacgaatcgattataggcgtttctggcagtcgctttgctggccgcataagaaggacacccagaagcaacggagagatttgaccgtgacggcccataacatgggcttcgacccggcggatgtggattggctgtcggattgtggttacggcgaggaagaaatcgaggcagctctgaacgacagtgatgcgttccgcgcattgctgtccgatgcctgttacgagatgttatattactgaggtgtgcttatgaaagaagaaaaaatccgtgttctggcgttactgccgactgagtacgccaagatggttacaatcgataacacactggaagccatgcagcaatttgtcggtggcctgatcgagtgcctgccaatggatgacccggaggcagatattgttctggtatgcaacgatgagggaaaattgctacagctgccgcccaaccgttggctttggggcggccaagacctgctggtcggcccggcttttatcgccgcaggggacgaggagggcaacctgtgttctttgtccgatgccatgttagaaaagtacacaaacctgtttaaggaacccatgttcctggcctggtaacccaaagaggggacagcattaagctgcacccctcttttttgctataaaattgtgtgtttttatgccgcaatattagccactacttgtcagtatggcgaaatattgtttgcaacgtccccgagaccctgtttacaattgaaataatttgtcgaatatggtagaattgctgtatatagaatcgaaaagtgtagaaataattagagaactgtcgatagagcggaccaggcatagtactacatatagaaaacgcatatatacaatgtttctaaaatgaatacggaaatgacaaggcgaggggaaagacgattggagtcttcgggaggataaggagttatgaaaaaagactataaaattgcggttgccggcactggagctagagatataatacgcggctgtcataatagggacaagggtacggcagagaatgaaaggctccgcaacccgaagttcatattttcttacccgaagaatgaacgactgatctttctgaacggcagaaatgccgcacaggaagaaatttcgaccatgagggtggggtgacagccagcggacaggtgcacgagcctatccgctctttgtgttggccaagatgttaatgaaaaaattgagtgggattgtgggaaagatttatgagcaagaaacttgcgattgcgatgttcggacagaagcgattatcgagagaaggcggagtagaaatcgttgtcaaagagctctgcacccgaatggcacagaatggctgtgacgtgacctgttacaacagagcaggccatcatgtgagtggtgcagaatatgacgatgctggtaaaacggagtacgagggaattcgtcagaagtctgttccgactattgaacagcgcggacttgctgcagtcagctcctccgcatttgcggcactttatagtgcatttggaaaatacgatgtggtgcacatccacgctgaaggaccggcgttctttgcatggctgccgaagatgtttggaaaaagagttgtagttaccgtccatggggagtgtgaaataatatggacaaccagagaaaagcctgatttcatgcgggtttgcgcggcttgaccttttcatctcaacttgtttctgcttgtcatggtgcgttacggccagcgtgctttcaggggttaatggcttctggttgcgctctatacttaacccaccacagcgaaagctgatagagcagaaaacaaaataaggaggtacgaggacaagcctgcgtatagattgttaccacaatctgtatacaggcttgttgttgtgctgtgaagtaagttgaggggtaaaagaatacgattggcaaaaaataccatccttcgggatgtgtacatagataaaaacaccttttgagggaattgggtccaaagaagaccggaggagtaaatgaattatggatataaaaaaggaatttgagcgatggttggtgaatgcaactgcggatgcagatgttgccgctgaactaaaaatgctggatgatacaaaaattgaggacgcattctatcgtgaccttgcatttggtacaggaggtctgcgtggtgtgattggcgcaggaaccaaccgcatgaatgtttacacggtggcaaaggcttctcagggtttggcagactatttgaaaaagaactttgaaactccgtctgtgaccatcggttacgacagccgtatcaagagcgatgtgtttgcaaaaatcgccgcgggcgtgtttgcagcgaatggcgtaaaggtcaatatttggcctgtcctaatgccggttccaaccgtgtcttttgcaacccgttatctgcacacctctgccggtgtcatggtgacggcttcccacaatcctagcaagtacaacggctataaggtctacggcgcagacggctgtcagattaccacagaggctgctgcggaaatccttgccgaaatcgagaagctggatatctttgcagacgtaaagaccagcgactttgaagcagacgtggcaaacggcagtatccagtacatcccggacgaggtctacaccgcattcgtggagcaggtcaagagtcagtctgttctgtttggcgaagaagtcaacaagaacgtagccatcgtgtatagcccgctgaacggcaccggtctgaagcctgtgacccgcaccttgaaagagatgggctacaccaacatcaccgtggtcaaagagcaggagcagccggacggaaacttcccgacctgcccgtatcccaacccggagatcaaagaggctatggcactgggcatggagtatgccaagaagtgcaacgccgacctgctgctggcaactgaccccgactgtgaccgtgtgggcattgctgtcaagaacaaggtaggggagtacgagctgctgaccggcaaccagactggtatgctacttctggattacatttgcagccagcgtgtgaagcacggcaagatgcccaccgacccggtcatggtcaagacgattgtcaccatggacatgggcgagcaaattgctacccattacggtctgcgcaccatcaatgtgttgaccggcttcaagttcatcggtgagcagattggcaagctggaaaagaagggaaaggcagacagctatgtgttcggctttgaggaaagctatggctacctgaccggctcctacgtccgcgacaaggacggcgtggacggcgcgtacatgatctgcgagatgttcagctactatgccaccaagggcatcagcctgctggacaagttggaggagctgtacaagacctacggctactgcctgaacacgctgcacagctatgagttcgacggcagcgccggttttgccaagatgcagaacatcatgcaggcattccggggagacatcaaggagtttggcggtaagaaggtcgtgaagctactggactacgctccgggtctggatggcctgccgaagtctgatgtactcaagttcctgctggaagataattgctccattgtggtgcgcccctctggtactgaaccgaagctaaagacttatatttctgtcagcgcagagaataaggaaacggctgagatggtggaggcagatatccgaaagagcgctgaaaaatatttgaagtaaaaaattggcagttgtatgaggagaaaaaacatgaatattattttgctttctggtggttccggtaaacgtctttggccgctttctaatgatgtgcgtagtaagcagtttatcaaactgttcaagaataataatgcgtatgagtctatggtgcagcgtgtttaccgccaaatcaccacagtagacgctgatgcaaagattaccattgcaaccagtaagtcgcaggcaagtgctatcaagaatcagctgggcgaaaaggcatccatttgtgtagagccttgccgccgcgatacctttccggctattgcgttggctgctacatatcttcatgatgaaatgggtgttgcaggggatgaagctgttgttgtctgcccggttgacccttatgtagataatacttattacgaagctgtcaagaccctgcaggagttggcagagcagggtggcgcaaatctgactttgatgggcattgagccgacttatcctagtgagaaatacggctatattatccctgaaagtggcgaaaatgtcagcagagttaaggaattcaaggaaaagccggatatagaaaacgccaaaaagtatctggcacagagcgcattgtggaatgcaggcatctttgcgttcaagctagactatttgctggacagagcacacagtatgattgactttgaggattaccgcgacctgttcaacaaatatgacaccctgaccaaaatcagctttgactatgctgtggtcgaaaaagaatccagcattcaggttctgcgctatagcggtgactggaaggatgtcggcacatggaatatgatggctgaggtcatggcagataagacgaagggcaaggcaattctggatgagacctgcgtgaataccaatgttgtcaatgaactgaacatccccatcctctgtatgggctgcaaggatatgattattgccgccagcggcgatggcatcttgatttccgataaggaacgcagcggttatatgaaaccgtatgttgagaaaattgaaactgaagcaatgtacgccgagaagtcttggggtacatacacggttattgatgtccagccgggttctatgacagtcaaaatctccatgaaagctggagaaaagatgagctaccatatgcacaatgagcgcgaagaagtttggacggttgtttccggcaaaggtaaggcaattgtcgatggcatggagcaggttcttcgcactggtgatgtaattaccattgcagcaggttgcaaacacaccgttgaggcaattacacctctggatatgattgaggttcagctgggggacgaaatcagtgtaaccgataaaatcaagtttgagcttggttaagggacagagcgatggagattatgaaattgctgcctacgggaaaggattatctctggggcggcacaaggttaagagaagaatacggcaagaaaatcgatttgactccgttggcagaaacatgggagtgctctgttcatcctgatggaccgagctatattgcgaacggcgaattcaaaggtctggaactggcagaggtattaaaacggcatcctgaatacattggaacgaaagtagaagatggaaaactgccggtactggtgaaatttattgacgcgaaaaaggacttatctgtgcaggttcatccaagcgatgcgtatgcaagagaccatgagggtgacaatggcaagacagagatgtggtatgtcattgatgctgaggaaggcgcgcacctgatttatggtttccagcatgaggtgacggaagaaattctgcgaaaggcagtggaaaccggtactctggataagcacttgcagaaagtggaagtccataaaggtgatacctattttgtgccagcaggtacagttcacggaatcggaaaaggcattctggttgcagaaattcaggaaagctctaatgtgacttatcgggtctatgactacaaccgtgtggacaaaaatggaaaaaagcgtgaattgcactttgataaggcggttcaggttatggatatgagcgttgcaccggatgtaagccagaaaccccgaatggtgaagcattatccggggtgttctcgtgagattctgtgccgatgcaagtattttgagacagagaaaattcaggttacgaagggattcgcgttttcggtaatggatacctcctttcaggtgcttatgtgtctggacggctatggtgaggttcagacaatggatgctgaacagaaaccgatgcgtttcagcaagggggaaactttgttcttgcctgctgggctgggacggtgcttggttgttggcgatgctgaacttattaaggtgagatgttaaacagtagtggggagaagaatgaaaagagtattacatatatcaaaatattattatcccttttcgggtggtacagaacaaatagcaagagatgttgtattggcacttaaggataaatgcgagcaaaagattattgctttcaatgatgggaaagaagataaaatcgaagttgttgatggaattgaagtgacaaaatgcggatgctttgcaaaagtatctgcgcagtctctttcgactacctataaaaatcatttgcatcaaattatagcagaattttcgccagatattgtgatctttcattatccaaatccatttgtggcagcattattgctaaatgaacttaaaaaatgtaaggcgaagctaattgtatattggcaccttgatattataaggcagagattcctgaagatattttttgcaccacaaaacagaaagctactgaatcgagctgacaaggtaattgcaacatctcctaattatattgagggaagtccttggctgcaatccgtaaaagaaaaatgcgttgttattccgaattgtattaatgtggaacgaatggaaatcacgccagctatagagaaacgtgcaggagagattcggaaagagaataaagataaaactatctgtgttgcagttgggcgacacactgagtataaaggattcacatatttggtacaagcaagcaaacttttagggaacaacttccgcatttacatcactggaaaaggtgaacttactgaaaaacttcacgaggaagcaaaaggtgataacaaaataacctttactggtcggattgatgatactgaattaaaagcattgctccttgcatgtgatattttttgctttccttctattacaaagaatgaagctttcggattggctcttgcagaaggaatgtactatgcaaagccagcggttacattcacgataccaggatctggtgttaactatgttagtcttaatggagtaacaggaattgaagtcgaaaaccgcaacgtaagagaatatgcagacgcaatgattcgtttatctaaaaacagcgacgaaagacaagaatatggaaaaaatgctcgggaacgagtgctggacaactttttaagcacacaattttcaaaaaaaataaagaacattgtagacggtatttaaaatacaatttcgataaatcaaaatgattgcttaggagagaatatgttttatgaaagaaaatgatgtgaaagttttagcaatgtatttgcctcagtatcacgaagttgaagaaaactcccgcttttggggaaaagggttcactgattgggtgtctgtaaaaaaggctacccctttatatgaaggacactatcagccggaggttccgcttaacaataattactatgatttgtctcggaaagaatcgatcaaatggcagattgatctggcaaagaaatatggtgtatatgggtttggaatttatcattactggttctccgatgaaaagcagttactgacaaaaccagcagagcttattcttgaaaacaaagatcttgacattccgttcttttttgcttgggataatgcaagctggagacgtacatggagcaaatttcgtggtaatgcatgggcaccgatggaggacgctgcaaacaaagaagaaaaaaagggaccgtctattctaattgagtacaaattgggcggaaaagctgaatggaaacatcactttgattatttgttagaatattttcgggatgagcgatatataaaagtggatggaaaaccattgtttgaaattttcaattattccgatgatatatataaaatgcatcaatattgggatgaactggcgaaagaaaatggattcaatggaatttatattgtttacaaaaaaagcgcgttgtatcgtctgccagaagaaagtactaatttctgctatgaacctcaaaactctggttggggtgcgggttggaaactatggagttttaaagctttaagccttcttggactggcaggaaagaatgggccactcaagtattcctacgataaagtttggaaaacaataattaaaaacgctcattctcggcaaaaatcaaatgagtggcacggtgcatttgtttgttacgatgacactccacgtcgaggcaaacaaggacgagttgtaacaggatgttctccagaaaagtttggaaagtatatgagcgagctcttaagcattgcaaagtcgcagaataaagagtttatattgttaactgcatggaatgagtggggtgagggcgcaatgctcgaaccatcggaaaaggaagggtatagatatttaactgaattgaagaaagcggtagagtctcaatgaaacggtattacaaaaatcttataaaaagtacattattgggacagttgtttcagacggtcaagctgaattcatttagaagaaaatggataaagaaaaataaatgcacacagctatttccaatgaatatgtttgattccagtattgtaaaagcaggaaagcattcttatggagaattaaatgtagtttcatttggaaatgaggccacattgaccattggaaattatgtttcaatcgctgaaaatgtatatttcttgctggatgtagaacattatattgatcatatctcaacatacccgtttcgggtaaaactgcttcaggaatgcaaaagtgaatcttttgctaagggaaacatcgttgtagaagatgatgtatggataggttttggagcagtgattatgtctggcgtaacaatcgggaaaggtgccattgtaggggcaggagcacttgttacaaagaatgttccaccttatgctattgttgtgggaacgccggctaaagtgattcgttatagattccctgatacagtgcaaaaagaaatccaaaaaatagattatgcatcgcttacagaagaaaaagttgagaagcacaaggaattactatattcgcccgtgacggaggataatgcaaagaaatttatagaattattgatgcagtagaagaaaggagaaaaaatggtatggagaatcaaccgattttgtcaatttgtattccgacgtataaacgtgaatatttaattgaaaagcttttaaatgggatttatgctcagaattgtgatcgctccttgtttgaagtttgcatcaccgataattctgaaacagacgagacacagaaattgattcaggataaattttctggcatcgagaatctgcattacaaaaaggtagaatgcgaaggttatagaaattcgatcgaagcgttaaaacttggaaatgggcaatttttaaaactgcacaatgattacaccatgtttcatgatgggtgcctggcaaaattgattgataatgttgcggcactggccaaggataaaccggttgttttttatacattgcgaggaaaggatgaggttcgttctttccgtgattttgataagtttatgtatgatatcaattacttatccacatggagttcatccttttcaatctggaaagaggattttgataggctgatgacagatggtataaactgtaatagtatgtatcctcatacatcgctgttatttgcagagtcatggaaaaataatttccttgtggacgagtatggctatttttataatgatcagccgaagaaaaaaggcggaatcaaaggtaagagtggttataacttggtggataattttgtgcgaatctatctgggcatggtaaatgacgatttggtaagtaagaatttgatttcgcccaaaacttatgcaagaattgaaaccaacatccttcggttttgcgctaacagctatgtaagatataataaccgaccgggctatacatattcttttgacgataaaaaaggtattattacgaaacagtgtgggacgagagcatacatgcaatattgcttttttgagtcgctctatcgcataaggaaactggtaaagccgggagatattagctaaggaataaggtaaaaagatggatagaattggtttgctgacaattcacgatacgattaactttggctcgcaattacagacgtacggtttatataaggcggttgaatcgcttggatgtaatgtaaagttgatcgattataaatgtgacgcaattgcagcccgagaaagtacgcttccacttagagaagcaaaaaatattaaagatgttgtgaaatcactgattttacacgggaatcttgaaaaacggaaagaaaactttcatcaattcatggtttctcatatgtcgatatcgcaagaatataacaaaaacacgattgcggatgccaatgacaacttcgatacgtttcttgttggaagcgatattgtatggggactgaatataacgggtagcgattttaattatatgttagagtttgctgatgacgaaaaaaagaaagtgtctttctcgtcgtcagtaggcacaaaatggagtaccgaggacgaatggaaggtacaagaatgcttgtcaaggtttgaccaaattgcagttcgagagtcagaggcagcagaatggataaagcctcttgttactactgaagtagaagtgacctgcgatccgacgatgctatggaatcgggatttttgggggaaattagtacataagccgaataaactcgaaaaatatgttctggtttatatgagcgacccagaaaatgtatgtgttaagagagccattgaatatggaaagcgccataaaatgccggtctattatatcaattatcgcgctccggtatatggaactgtagataagcgccctgtaagtttggaagaatgggtatcgttgttttattatgcagatgtggttttttcagcatcatatcatgggttgctttattctctttactttgagaaaaaagtattttattttaactggacaaataagtctcggatgaattcactcacaaataaactgtccatagagaaccgagaaggaacattggaaaatatagagaaagatgaaccaatacattacgatgtggtcaatcaacggcttgatgcaatgcggagcagttcgtgggaaatccttaagaggatgttgatatgagtaaagttattacagcgggcgcattgtgtactggatgcggcgcgtgcgagaatatatgtcctaaatcctgtgtgatacgcattaaagaagatgcgggttttcagatgcaaaaaggtgatggatgcgttgattgcggtttgtgcagtaaagtgtgcccggttttgaatatgcctgagtttgcatatccacaaaaagcatatgccgcgtgggcgacagatacgaccattagaaaaacttccgcaagcggtggtgtggcagccacattgtatagatatgccttgaaacaaggatattattttgtcggagcatatttgaacgattcgtttgaatgccatttagcaattggcagtacagaggaggacattagaaaatttcaaaattcaaaatacacatttagttttcctgatgaaatttacaagcaggtaggccagttagtaaagcagggaaaagatgtattgtttgtaggtcttccttgtcaggtagctgcggtaaaaaattattttaagacgagtaagctgtcgtttgaaaaacttatattagttgacattatttgtcatggaacgcctaatccagattatttgaagagtcatattgccgcagtggcaggaggagagaaggtcgagaaatgtttcttccgtgatgcaaacttcgacacgtcgaagtatgcttatacattgtataagcatacttcgaatgatcctttttataagaaatacgttgatgaagatgatctttatcaaattggttatcatggtgcgctgatttaccgtgattcgtgttatgcatgtcaatatgcacagacaaatagatgcagcgatttaaccataggagactttcatgtatgggatgtggaatcctgcgatattgatatcgaaaatgtgtctacgattctgataaattcggaaaaaggcatgaagttgttagaggatataaagagtgataatgcgctgatagcgattgaacgtcccttggacgaaccaattcggggagaaaaacagctacgccatccgtcaattgccggcccggaacgcaaacagtttttggtagagtatcaaaaatctcatgattatgagctggctgcaaacatagcgtttcgtggaatcgtgagacgtagaaaactaaagattgaaaaaatcaaaatgcaggttaaaaagacaattaaaatatttgtgccaaggaaactatggctgttgatgaaaaaaagcgtgaaaaaggattaggtttggtgaggggtatgaaagttctatacattgcgaaaagaggtccgaataatattgccgctaaaacgcatttaagtgtgataaaggcgatttatggagcggacaatgttatcgaaattgatcttctgaaggctttgcctgaacataaagatagatatattgcatatggatataattctaaaaacctgggtgaacgtattatacgttttttacaggggaattctccgtttatcagcaataaaatcattggtgacttgtgttcgattattcgagaaaatcaaatttcgctggtattcagtgaagagtctgatttgggaaacctttacaaaaaaatcaaagatactttccataatgtaagaatcatttgcttcttccatgatatatcggccgatttgtttgcaaaaagaattgatgatgcgccgaaatggaagcaacattatattctggaatgcaagaacattatcaaacaggaaaaagtcacacagaaatacgttgatgaaaagtgggtttttaatcaggcagacgctgaacgttttaaggcacactatggctatgccccagatgaaattattccaatgggtgcgccaataccgaaaaccggtgaagaatataaaaaaattgctacagataaagaagataaaaaacagatgctttttgtgtgctcaagctattatgtgaatattgatggcttcaaatggttctatcaaaatgttattccgaatttgaaaaagaagtatcatatcataattgtaggtactggcgcacaacaattgaaatctttgataacaaatgaagatatcgaaattcttggaagagtcgaatccatggcagcttattatgagtcagctgatgtcataattgaaccggtgtttgacggtggtggaatgaaggttaaaaccatcgaagctttatcttttggaaaggtaatcattagtacaacagaaagtctaaatggatattgggaagccgtacctgaagcactaagaggaaaaaaaatattcagatgcaatacagccgatgaatggattgttgcatgcaacagtattcttgacagtgaaattagacgatacaattcggatgtgtttaatgttttcgttgaagcgttttctgaagatgtgctgcaaaaaagattcagtcattctttaagaaatttatgcaaggattaagcagaatagtacggagggaaaaatagcttgaaggttaaagtgaattctatcatttatatgctactaataatgcttattctgatagatactcgtttactatattttaataatgtgaatcagcttttggaattgagtcttgctgttttggcactgttttttgcatttataacgtcttcgagggaaaaaaaatcgacattgcaagtgtttccatatttgaggaaagtgtgcgtttcaacgataattagctttatgatcgtttatgcatacagcctttttaaatatcacaatcaaaccctgatggggacttttgttggcgactcatctcactataagatgttattgattgtgctacttgtacctctggcgaagctttgtttagataatggagggacaaaatggctgttcaaaatgatgaatgtgttcgctgccctgctgtattttctggtagcagttcagtttgttatatataatttaaacaaaacggtattcttgcacgctatgtcagcaggcagcgatataccgcttttgaatggaacgttgagaattagcttatcgtggattggcaatctaatgatcctttacaatttccatatgttttacaaagacactaaagacaaacagacgaacaaagtaaagcacttcgttttgtttgctattggctttgttgaattgattgtaatttcacgtgtacgtggtactacgcttgctgttacaattggaattcttgtgttgatatttgcagacagaagcacccaaaaaacaatgatgaaaaaaatgttaattgtggttatcttgctctgtggattttttggaacggatattgtgtcaaattttttggattctttctcgcttgacgcaacaagagcatatagcacaactgccagattatatgcgatagatttttattggagtgcctttttgaaaaaccctctttttggcataggatttgctgatggaactgttaatgctgcagttgttcatggagatggccgtgcaaatgtttctgatgtcggaatatttgcacagatagcgaaatacggcatatttattcttccggtttacatcttgcccttgattcattctggtaaaaggatcgcaattatatggaagatgaactatgtcgaaaatagacaactgtatttggccttgttcatgtatgttttagtttcatcaatttccttggtgtcgattgaccattttagaatgcttcagtggcccatttttcttgtgaccattgagatggcttattggtcgtctattaacagaattaaaatagaggaagtataggaaggagatactaatggagcctaaagttagtgtagtactagtgaactataatggatacaaagacacagttgattgcttgaagagtctttctcgtgttgattatgataattttgatgtaatagttgttgacaatgcatcaactgaactacccacgaaagacgagatggcttacataaaatcgcaggcgctatttcttccggtgcaacacaatctaggcttttcaggaggaaacaacatcggcatagaacaggcaattaagaatggagcggcttatgttttgctgctgaacaatgatacaacagttgaacctgatttccttaaaaatatggtggaagccgcaaaaaacggcagggatgtcggaattgttactggaaaaatacgctttttctcacgaccggattacatatggtttggcggaggatactttgataatcgcgatggcaagataggtcatgaaaggtataatataaaagatgatgagcaattcaattccccggtaaggaatatctcctttgctagcggatgtttgatgcttattccaattggtgcggtccaaaaagttggactacttgaagaaaaatactttctttactctgaagatacggattattgttgccgcattcggaaagctggtctgaatattctattttgtgaaaaagcagttatttatcataaagttagcgcctctacaggaaaaaacagtgattcgatgacatattacactacaagaaataaactgtatattgcgagagattttaccacaaatcgatatagtgcgtatgcgaggattactcttcaacttttaaaggatgttataagagggaggaagagactttccccgattgttggaggatacagaagtttcttcaagaatgaagttggtatgatgccgaagaactgatagtgataatggaggatgagagcgtgcttagggtggtattggctattctcttactggcatatttattttgtagtgtttattgccggattaagaaaataaagagcgactttagaggtgtagagtctgttagaaaaaatgtgaattgtgataaggtggaagaaaatcagggaaacactgtagcggaactgtcaatccggaatcgagtggtaacagttctttatcgtatatcggataatgtaattagggtgatgttgtttattacgggctacattccatcccatcatatcagaaatttcttgtatcgccatatttttatggtctcttttggaaaaaaagtagtaatgtattatggcgcagaaattagagctccgtggaatctttatattgatgatggagcaatcattggcgataaggcaatacttgatgctcggcgcggtatctatattggcaaaaatgtaaacctttcaacaggtgtttggatttggacgctacagcataaggtgaattctcctatctttgaaacggagggagcacccgtttatgtcgaagatagtgcttggattagttgccgtgcaactgtacttccgggtgtaaccattgcgcgggggggtgattgcagcaaatggcgtgtgtgcaaagaacacagatgaatttggtgtatacggtggtgtcccgtgtaaaaaaattggtgaaagaaatcagaatttgacatatgaattccaaggttgtcatatgcatatgctgtaataaatagaagaggtgaactccatgaatcttttgatttttagtgcaaattggtataatcggggcgatgaatccgccatacgggcgatgatagatgaaataagaattgtttttcccgattcccatataaaaattcattttaatcagccggtaaaggaaattccatatgatgatattgaaatactgaatcccttcattcgttgtgcaggaaggaatatttttaagaatattttttataatctggcgcttcgaactaatggaaaaattccctatattggggcagatgcggcaaactttagagcctttgtagatgctgtaaagtgggcggattatgcaatctatgcaccggggggaccctgcataggtgactactataacgtaagaaggctactgcttgatattatcgagatgattcttagaaacggtgttccgtattcattatttgcaccatcagtcgggcccttcagtgtggatgaaaaacgggtgaagtatttgatcgatcaggcaaaagtagtctgtttccgagaatcgatttcacaggggtattacgcagctctttctccagagaaaaaaacgaccgttacattggattctgcttttcaacacgaaattgacttgaaagaaaacagaagcaagctggacggctacaaggaattatcggattttctcaaaaagtcagagaaggtaatcggaattaccgtcaccgatttaaaatggcacaggaaatacagagagagtgatataaatatcactattgctaacacgttccatgagtttttgcaatacatcgaggaaaaggggtatagtgtactttttattccacaactgtttggagcaaataatgacgcagaatatatgtcttcttttgcgggtaacaatagctttgtgatgtcggatcggtatgactgctattttcagcagtttgtgatttcccagctatatgcagttgttgggatgcgttatcactccaatatattttctgcaaaaatgggtaccccttttgtgtctgttgcctacgagcaaaaaatgcagggatttatggaaaaagttggactggcagaatactgcttggatatccatagcctttcttttgacagtttgaaaactgtgtttgataagatgacggaaaactatgattcctacaaggaaatgctggatagggaaaaagacacttttcgacagatgtcttacagtacaacacaaatgatcgtagagagcattcttgatgaggtaagataaacgatagctatgtgatgtttagagattctattttatggagtatcgataaatgaaagtaaatatgggaaaaaaacaaagctataaaaatattgccatgaatgtttttgcgtttgttgtgcagttttttattagtttttatatttctccgctcattgttagtaaggttggagcatcggcatatggatttattggcctggctaatgatttcgtatcgtatgctgcgattattgcaacagtgtttaactcggtagcatcaaggtttattgcaaattctttttacaaaaaggattatgaaacagcaaactattattttaatagcttgattgctgccaatattgcgatttcagcggtcttaggacttgcaggagttttgcttgttcctaatctggataaggtgctgtcgatacctgcatcactcgtttttgatgtaaaactgacgttcgccctgatttttggctcctatattatttcgttgttgacacttgtttttacaacatcgacatttgttacaaacagaactgatatccagggaattcg

SEQ ID NO: 7786 - DNA, 22832 bp, Unknown
  gut microbiota DNA sequence
accaggcggtacagctcggggatcataagctggatataatcgaccgtcagcagcgccagcaggcccaaaagcagcacgggtgcactgcgcagataataccggttgatatacttgccgaagatcatggcttcccctccttttcgcttttcttattcacggtatggcaaaacagccgtatctttcagtatattggattatcgccataaagtcaacgaaacggcgggaaaaatgccgcaaacggatgtgacatccatccataaaatacagcataccacttaaaggcaggtttaagtcaaggggcgacgccccgtatccgcaaaacaaaaacccacccccagccgtgccagcatgaccggcggtgcgatttgcagcagaatggggctgcttttttcttcgccaaagaacacgtaggccttttccctgccttgacggagggtgaggcctatgtcagaagcccctcctggcagagggcggccacgatattgttcatcgtctggcggggcagcaggtcctggcccagcgggagtacaccctgcggcatttgataatggcatggttgacgctgttgtgcagccgttgagtttgggttttctggtttgacataaaaaatccctccgccttataatccactttgggattataaggcggagggacgctttgtcaggagttaagacaataccgcataattctaagtgccgatacggcgagcgaggtgcggcagctgctaagccaaaagcgcagataatactttgtgtattatcgagcattttggcaacgcaggtgccgtgccgcagccgccggagcggtgcttaagccgctaggcgggaattgtgcggtgttgccttaagtttacgcacctgttttctcgtaaatgcagtgggtgccctggtgctgctgcagaccgcccaggcactttttattgcagcgcacacagcggtggatggcctgcacctgcccggcagcagccttgctgggccaagcagggtcggccagcagttggcggctcatggcggcgcaggtgatgcggccgctggccagctgggcttccacaaaatcaggattggtcaggccgcccacgccggtgataggtttgtcggtatattggcgcacctcatcgcagaacttcaggaagcaaccctcccccttaaaatagggatgattggcgggcgggatagtatcctccaagctggaatggttggccagggtaacgtggaagctggtcacaccggcctccaccagcagcggtacaaagatacccagttcgctttccagtacaccggcattgccgtagtgggggtcctcctgccggacagccagtttgtagtcgatgggcagctccggcaaacggctgcgcacggcgcgcacagcttcaacggcaaagcgggcgcggttttcggcgctgccgccgtaggcatcggtgcggtggttgaacacgctggagctgaaactgccgcacatacggtcgccgtggatctgcaccatgtcgaacccggcttttaccgccagctcggcggcctcgccgaagccgtggatgatcttatcgatcttgcgctgcggcagattggtgatataaggggccacttcctcgttgagcagggtgcgcagctgctgcatcgtgattttcttcgtcagaacgcccggcacatatttgagcatggctgccatgttggagtctgactggtgcagctgggcgcagagcttgcagccgcagctatggacgatctccgccaggctctggtaccaggcaaagccctttttgtcaaacagagacttttcaaaccggcttttgcccaccggcacatcccccacaatgatcatggcgcagccgcctgctgcaatggcgcggatcttggcaaagtattcttcgtccgacaggccgaaggtggtgggggcaaagataatgcggtttttcagttccaggccaccgtagttcacggggctaaaaatagtttcatacatgttcgggcatcccttctgctgctttttgtaaaagggccagcagctggcctttttcggtatcgttcaggttggccaggcgggtatcgtcccaggtgaaaaacacttggtggctgacaacgaaagcctgctgtcccctatcggtcagggtcagggtataactgcggccgtgtttttccctggagagaaagccatccgcagccagtttgttcaggctgcgctggctgtagccccagtccaggtacagggccttagtaagctctgacggtgaacagcccgggtgcttgcctacgtaaataacgaagaacagcagcccaaagttgagccctacggcttgcagctgctcgccggtaaacgcggaaaaactgcggtaaaaaatggtggagtaataggataaagttttgtggtacatgggaataacctccgtacttgactttatcaagtatatacccgttacttgataaagtcaagtaaataacgcaaattttaacaattcttgccaaactgtgccgtacctttgtataatagaaacaatagaaaaatcacaacaaaggagcaacgtaaatgaaaatcgcagtcattggtcccggcgcgatggggctgctgttcggcagctacctgtcccaacaccatgatgttaccctggtgggcaccaaccccgccaaaatgcagtccattaccgaaaatggcgttacaatccgcgagatggacggcagcgagcgcatctaccgcccccatgctaccgccgacaccaccggcctctcccctgtcgacctggtcatcgtgcaggtcaaggccagcgcctccgaggccgcgctgaccaaaaacaaggccctcatcggtcccgacaccatcctgatgaccctgcaaaacggtatgggccacgaaaccttgctgagccgtttcgccgcccgtgagcagatcgtcatcggcaccacccagcagggcagttataagttgggcgagaccaccgtctgtcacagcggcctgggcaaaacgtttttgggaaccgtcaccggtgacagcagccgctttgccccgctggccgagatgttcgcgggctgcggcttcccctgcgaagtctgcagccaggtgcagggcatgatctgggataagctgatgatcaacgcatcctccagcgtgctgtccggcattttgcaggtggcccagggctacgtcgagcaggactcccacgcctggacgctggccgagaagctcatccgtgagctgtgcgccgccgccaccgctgacggttaccctttcgacgccgaggagcagattgcccgcatccggctgcacctgcaaaaggcgcctgacggcttcaccagcatctacgccgacctgaaggcgggccgccgcaccgaggtggatgtcatcaacggcgcggtcgtggaggccgggcaccgccacaatatccccgtgcccacccatgagtttgtggtggaactggtccacgccatggaaggcagagcataaaatcgagagcaaataaacagagcaacgcaaataagcaggagtcaaaccttatgaaaccccgcagattgggcaagacaaagagaaggactatgcttcggtgctggccaacgccccggctcacgcctaccgcggccagtgtacctattgcggccactgcaagccctgcgtggccaacctggacattgcgatgatcaacaagttctacgacttggccaccatgcagcccgaagtgcccgctactgtgcagagccactacgaactgctggaaaagaccgcctcggcctgcatcgactgccatgcctgcgagagccgctgcccctttggcgtaaaaattgccgagaggatgaagaagacggcggagctgtttgggtgctaagcgcgctgcaaaccctgtaggggccgatgcttgcatcggcccgccaaaagagaggtacttactatgaaactgcaaaacggccgcccggcggatacgaccggacgtttggagaaagaactgcgctgttacgacctactggaccgcctgggtgtgccctatgagcgggtcgaccacgcccctgccatgacgatggaagtctgccaggagatcgaccgtgtgctgaacgcggtgatctgcaaaaacctgtttctctgcaaccggcaggagaccgcgttttacctgctgatgatccccgacaccaaggtgttccacaccaaggatctgtcggcgcagatcggctcggcgcggctgtcctttgctaaggctgagtatatgcagcagctcctggacatcacgccggggtctgtcagcgtgttgggcctgatgaacgatacggcccacaaggtgcagctgctcatcgatgaggatgtgctggccagcgagtatgtgggctgccacccctgtatcaacaccagcagcctgcgcctgcgcacccgtgacctggtggagaagatcttgcctgcgatagaacatgagtttattaaggtgaagttgtaaggtcccctgccccggtgggcgtggtcacaaattcttcaaaaactattttaaaatcgttcaaagctcttttatatcctgcacataagttacctgtatactatgtatcgtagtcgaaagacaaacgcggaaagtatcccgcaatcatacacactgtgccttgggccatgccagagcaatcgctcggtccaggccagacaaccaataaggctacgatgccattacatatatacatgattcttctcctatcctctgaaataccccttggagcgccccgccttacccccgcggggcactccttccttttaaaaattgcacggtgcagcgtgtaaagaaaacttttttgaaaaaaccgcaaaaaaattgaaaaaaaggcttgcatttccggttccgctttgctataataatcaagcactgagcgacacggagtgccgcgacggaacaaaaaagaatatgggagctttcccgagtggccaatggggacagactgtaaatctgctgcttaatgcttcggtggttcgaatccaccagctcccaccaacaaagcgatacctgataatgggtatcgcttttgtttttgtctttattttccggggatacgctggcggattcgaacagcccgggcccggagctttgcgtcccccgccgggcaaaaacagccctgcaggctgtctttagggcgcggctcgcgaatctaccaactcccaccaagaaatgctctgcatcgcgtgatgcagagcaaaagatgacttattcggcgtagtggatgcgcgcagggtcgaagcggtcctgctggggtttgctctcggcggggtagcccaatgcgaagatggcaaaggcgtgatgcccggcgggcatttgcagtacggattcgacctcgtgcatgcgctcctcgatgggggcaatgcccagccagacgccgccaaggcctagtgcatcggtttccagccaaagattttcgttggcgatgctcaggtcgatctgcgcgtacatcgggaagataacgtcctcgcggtaggcagagacgatcagcacgggagcatttttggcgcagcctgtataggggctggtggcggccagcttttggatcaagtcgcggttcatcaccacataaaattcccacggctgctgatttccggcagaaggagccgccatagcggcgcgaagcaatttctcgattttctccggttccacgggcttgtcctgaaatttacggatacttacgcggtgaaaaatgctgtccatcgtaaaaactcccttctaaaataaaaatgtgcaggcccaaaggcttgcacaattactttcgtaaacggtcgcgtccatgtaggtatcataacggaaaatgcaaaattttgcaagaggaagctgcagcataaataaaaacatgaaatctcgctgcacccggtgatgcagcgagattttttaatagatggcgtacaagaatccgccgccgccgagaaagtagcccatgaacagaaagaggaagagcgccccctcgtagacggcccagcgcaggatgcggggagcggtggcaaggcggtcacggaagtggatgccccgctcgtgggcgaggtcgacggcaatgaccagtgccaacccgaagaaaagcagcagctgttcctggcggctggtcaagcccagctcccaatagttgctgaacgccttgtggccgccgttgtgcaggatgccgccaaaataggccgcggcattggccaggctgctggcgcggaacaccgtaaaggtggccagaagcagtgtgaatgtgcccgccacaccaacaagccgcgcccagccccgggtgatggccttgcgccagggcaggtgattttctaacgcctgcaaagcgccgtgggcaaagccccacacgagataggtcagcccggcgccgtgccacaggccgctgacgaggaacgtggcaataatattgccatcgcgccgcgcggcgctgcatcggctgccgcccagcgggatgtaaacgtaatctttcagccagcgggacaggctgatgtgccagcggtcccacagttcgcggatggtggcagccaaaaacggctggcggaagttttccggcaggggcaggcccagcatctcccccgcccccagcacgatgtcagtgtagccggagaaatcggcgtaaagctggaacacatacagcactgcgcacagaaacagctggctgcggtcgtaggcggaagggtcagcaaaggcggcgttgacggccagcgcggcgcggtcggccacggccagttttttaaagtagccccaaaagcaccgctgagctccccgctgccattggccgggctgtggggcggcggcgtccagttggggcatcagctcgtcatagcggttgaacggcccctgggtgatggacagaaaaaacgacgcaaagcagagcagccgggcgtactgcgattccggctcctgcttgccccggcggacgtccaccaggtagctggtcaattgcaggctgaaatacccgatgcccagcacttgcggcacgctcacgtcccagatgcgcagcgagaacgcctgccccagcagcaaggcggcggggcgcagtctgagcagcgtcagcggggccaatgccccggccaggcctacatagaaccaacgggggctgccgcgcaggtgcagcgcggcctgccagaccagcagagtcataaggcagagcagcaggcagccctgccaatccagcgagaggtagaacacgaggctggccgccagcatcagctgccagcggcgtggctgcggggtgacgcgccaaaggcccgccaataatgctgcgaacaggatgaaaccgaaggaaccaacggtgagcatggcggagcctcctttgctttgatttttgtgggtggctggcgagcgctgccaccctgcggcggcgctcttttatattataacagtatgccgcttttaggatcttcctttttgtgaccaaaaaggaagcgaaaaagttccgctgttgcgaggcagcgcgcttggcggccaaaacgatggccgccatccagcagagctggcccgctcgtgtggatcaaagccccactggggctttgatcgctacgcgaccccgccttaggggttgctcgctcctaaggaccctaaagagatggctgagaagcaaaaaagctaaaaaacgcaggagtgctgcgtttttcttaacgctttttcgcttctctccatattgaccccttcggggctaaaattacaggtgcgccatcgcaatcgactgatccggggtcagctcaagcttctcctcgaccgtatcataaaacaacgtcgaaacatcttccccgtcattttcccgggcaatcgtatcgcacaaaacggcagtaaacttttcggcgccctggccgttgaggtggtgggcgtcggagaaatcccctaccagcaggttcagggtgtccacatctttgtacagcgaaaaatcccagtacactgtgttattctcggcggcaaaatcccgcagggcgtccacgtaggcctggtagttggccgtattgcacaggtaggcgctgggcagcggcgcggtgaaaagcaccaggttaatgccgttctcctggcaaaattcagcggtcttgcgaagatattcccatccaaagtctgacagcggcgcttctgggtccacatccagcagcgtgtggaacgcgttttccggcgcaccgctggtgtagacgaacccacgcccgcggtagctttcgccctcgtcggcgtaggtcaggtagctgtagttgtccagggcgtagccgtcggtcagcttggcgcgccagagcgcgggcatttccggtggctcggccacaccgtgacgggccggcagcagcaggtcggcaaaggcggccatgccgcccatttcggcctggtaggcgtagcggttgggcgaattccaccgcatgtggtcggtcagcaggtagcaggccagtggcacgttcttggaggcgctctggttatagccggtgtagaacatctctaaatagacggtctttagttgattttgcgcggcggcttcccgcagcatgtagtagctgccgtcgggcagttgttgggacgaccctgcgttaaagctgtaagtccccagcgcggcgtccacggcatcggggtcgacactgcggtaacagtgggacgaccccaaaaacagcgtgtcgatcttgcccgcgtcggcgtacaactcctgtagcatcgcgcgggagtaggagtgcacatcgtccaccagcaaaaagttggcagcagccagcacagccagcgtcagtgcggcaaacagcagtacggcactcagtttacgtagcattttcatggcgcgttatcgctcaattttcatgtgggggtgtttcggctggtaggcggctacgtccagctgccaggtggtggagccgtccgcggtctcctccactttctcaaagccaaaacttgcataaaaatcgcgcaccatcgcgtttttgacggtgggataatagtacccgcggatggtctttaccccgcgcgcggcggcgttggccaccatgatgtccatcatggcatcctccatgccgcgcttgagtacacggcagctcatcagccacaggcgtaggtgcagggtctccccttcctgttcgcctgcggtaacggtgacgatgccgttatcgccgaacttgtccaccagcttgccgcagcggcagagccaggccgggttctcggccatggcgcggatgtcatcctcgctgcagcgcagagtggtcaggttgaactggttggatttgttggtcagctgagcgatgcgctggatgtacagcggctcaaaatctttgatggtagccgtcatctccaggctgtccaggtactcgccgtaatcgctgaaagacgcctgtgccttggcgcgctgggcgttttggtggtacagttcggtctttttcaggtcctctttcgagagggcagtgacctcaaagtagccgccgtgatccagcatcttgatgtagttctcggcaccgtccagcgcaggcacggccacgccgggtacctgggcggccacgatggcacgttcggcggggttgtcatcggcaaagacaaagctgtccgcgcccaggttcagttcggcggcgatgtcggtcaggttgcggtccttcggctcccagttggccttgatagagacaaaatcgtcaggtcgcaacacgccgtccgggtggttcaggcccgccagcgcgttggcttcgtcatttttggagtccacggccaagatcacgccgatggatttcagcgccttgcagtagctctggaactcggcgtagacctggccctccggcacctcgggaccgatggccagcccgtcgacgccgtcgtcgcccacgatgccgccccagagcgtattgtccaggtccagcacaagggcttttttgttacggccgtacaaagacttgatgatattggccacactgttggccagcgacgggatggcatccagacacatggcatatttgtacatgtgccagaagaaggcgtcgccccaggcggtcaggccgtaatcggcggagaggtagtcaatatcgttgatgtaaaaatgctcatgcgcggcggcgtaggcatagaacttctggttcatccggctgatgaagttggagcggccgtgggggtcccagatgtcgcggttgcccatcaggcggaagttggggcggtcaaagttgttttggatgaccgggcagccgaacttggcctccaatgcctgccacatcgtctcaaaatgagtgtactggtcggccagcatcgcgtcgatatcggcttcgctgtcggcggtggtgggcagggcggtcaggttgcgccagctggtgtggatgtagatgatgtcggggtggaactcgtccagctccggcgtgccgaacatggcgtcctgccaatactgggcgtactcgctctggtagaactcggcctcgatgccgtactgcagcagaaacagccccagctggtcggccacttcgttcgtggtggacccgccgaggatggcgatttttttgcgcagggggtgcgggttttgggccagcagctcccgccgcagccgccgctttttgcgcagcagcgtttcagtatccagcggatagtggaaacaatccatgggtggctcctttttaacctaactctgccaaggcgcctttcagggcctggctgatctggtcggggcagctggtggccttgcggccgcagcggatgccctccatgcgggtgatggcgtcctcggccttcatgccgggcagcaggctggcaatgcctttcaggttgccatcgcagccgcccaggaccttgacgcttttaatggtgtggtcggggttcagttcaacttcggtctgcaccgagcaggtgcctttgtttttgtagatgtatgccatggtgatgttgctccttttataatggtagtccgtttggtatttgtcgcgcatttgtaagggtcgatgcgagcatccgccctacagaatcaggtggttctcttaaacgtggattttcttgccttggccaaatcgttcaacctggcgatctgctcatcgtgggtagcgaacgcgccgaccgggcgcggggtgacggtgtggatgccgtggtagtctgtgccgccggtgatgagcagtccattctccttggccagacgcaacagctcggttttgtcctcgggggtgttgcgggggtggtcgatctccacgccgtccagccgcccggcggcgatcagctcccgggccagttccatgctgtgatacacgctggggtgcgccagcaccaccacgccgcggcaggctttaataaggtccagcacggtgtccaccggctcataccggggcgtgtgcaggatgcgcccgcgcacaggtttcagcccgaacagcgagcggtagacctcgttatacagcccgtcggccaggccgtactgccacagcacccgcatgatgtgggccttgtacaaggtgccgctgtccttggcaaattccagcgcctcctgggtggagtactgcgggcagatctcctccagctccttgctgctttgcatcatggcggtgtagcggcgctcggccatcatgcgggaaaaatcctccagcgcggggcaatcatcgggccagtagcacaaaaggtgcacgcggtgggcgcgctcgtagtcgtaggcggtcaactccgtggcggggatcagatgcacgccgtcctgcaccgggtgggcgtaggcgtagcggacgctctggatcgaatcatgatccgagatagccagatgcgtcatcccggcgcaccgcgccagaaacggcagcttggcaaccggtgtggaaccatcggaataagtcgtatgcgtatgcagatcgcccggcatggtgggtagacctcctttaccttttccggaatatattattatacaatgttttttgtggtttgggaagacccttgatttttggttgctttgagttgctttgagttgcggcttgcgccccggccctgcctaccctgcggcagggcctagtataacgggttgcatccgttaggccttccttttttgtgaccaaaaaaggaagcgaaaaaagtcccgctgttgcgaggcagcgcgcttggtggcgcaaaacgaaagccgcccgaaaaaatcattttaaagtcgtagcatactcctgtgcagaagccacaaactgcttcgccgcaggcgatagccccccacgggatagacacgccaacccaatgctgcgcttggcggcaggttccagccgcagcacctggcacccgctgtggtcggtgccgcggcggaacatcagctctggcatgatagccagcccctgcccgcaggacaccatcgcgatcatgctctggtcgtccacgatgtagcatcggctgttcacgtgcagatcattctttttaaaatagctttggatgtcggcgtccacgtcggattgctggctgacgaacgccctgccctgcaattcctcggcccgcacgcagccggggcggtggggctggtagtcggcaggggcgatgcagaccagcggatcatcgtagagcggttcaaaatccaggtcacgcgcgctggaattggagaggaatccaagctccactgtgccgcccttgagccaatccacgatgtcggcgtaggacccctggtacaactgcacgtcgatcccgggaaactgcttttgaaacggcggcaccaattgtggcacccaggtgacgcaggccgagttgaacacccccagccgaagcacgcccttgtgcatgccgttgacctgggcgatggattggctgagcagttcactgctgttgagcatctggcggatggacggcagcaggctttcggcggcagcggtcatggttacgccgcttttggtgcgggtgaacagcagaaacccgcactccgactccatgccggagaccgcgtggctgatggccgagggcgttaagtgcatctgctccgccgccgcggcaaaggtgcccagctgggacaccgtcataaaaatctggcaatctgtcagggtcataaacgacttctcctaacgtgaacgaatttcactttatatatgaaaaagttaagctttacttcacgtctatactgtactattatattagcagaaagtcaatgcccgtaacgcacattgcgggctgtacaagactcctctccctcctaagccttgccgtccgcacaccggcagggccttttttattgccttttttcggcagagcgtgtatgatagagaaagtatatataaatgtaagaggtttcaaccatgtccaaaacaagaggtgtacgtggggcggccgggtggtgcgccatcgcagcgatcctgtatttattggcccgcagcctgctgtatgcgggcattagcgcgctggtgggggtggtgcaccccggcgccagcctggccaaacccatcggcgtaagcgaggtcggtctcggcctgctgcagatcgtcattgccgttggcgctgccctggtcccgctgctgtggatgctgcgaggcacccgcctgcaaaccgacgacctgcgcatcaccgtgcccgcgccatggagcccggcattctgcctgccggtgtttttgggcgtggccagcacggctaacctgtgcggcgggctgctggtgcgcctggccggggccgaggacgctgccaccctgctgcccagcggcggcgcagagctgttcgtgcagtttttggcgctttgcgccgtgcccgctgtggtggaggaactgcttttccgcggcgcactgcaagggctgatgcgccccagcggcagtgcggcggcgattttcggcccggcgctgctgttcgggctgctgcatctcgacctggcccaggggctgacggccttcgcttgcggcgtttttctgggctggcttgccgagcggtcaggcagcattttgcccgggatgctactgcatttttgcaataacacgctggcttttttaaatctgtacctgcgtttttacgcaccgcagccggtatcttttggcgttgaactgtttattttgttcttctttccggcgtttggcgtgtggctcatctggcacgcccggcagcaggggttccgcttctcggcgggtctgcgtcccggtgtggacgtgaccgaaattttcaccagccccgtctatgacctggccgttgtgttcctggtttgctacacgatttttgtttgaggtgcccttatgaccgacgaagaactgatgcgcgccgccttggacgaggcccgcgaggccgccgccctgggtgaggtacccgtgggtgccgtggtggccaaggatggggaaatcattgcccgggcgcataatttgcgcgagagcggcaaaaatgctacctaccacgccgagctgatggccatcgatgcggcctgcaaggcgctgggcggctggcggctgtggcagtgcgagctgttcgtgacgctggaaccctgcccgatgtgcagcggggccattatcaacagccgcttaaagcgggtggtgtacggcgcacgggaccccaaggcgggttgctgcggcagcctgaccgacctgtttgcgttgccgttcaaccatcatccggtgattgaatctgggttgctggaagaagaagcgcaagcgcttttgcaagatttctttgcgatgctgcgcgaaaagaggaagaaaaaatgatgcgtaacgtgtttttgaccggcggcagccggggcattggcgcggcggctgtgctggcgctggcccgcgcgggctacaacgtggcctttacctatcatgcacaccccgaagccgccgaggccgtagccgcccaggcccgcgacctctcccctgccgggacgtttctgcccatctgcgctgacgcgggcgactccacccaggtgtgcgccgctgtggcccaggccgaagaagccctgggcagtttgcaggtacttgtctgcaatgcgggcatcgcccagcaaaagctgtttaccgacactaccgacgaggattggcaccgcatgatggccgtggatctggacggtgcattttatgcctgccgcgccgtgctgcccggcatgatccggcagaaatacgggcgcatcgtgctcatcagcagtatgtggggccagaccggcggcagctgcgaggtagcctacagcgctgccaaagcagggctgatcggcctgggccgcgcccttgccaaagaggaaggccccagcggcgtgacggtgaacatcatcgcgcccggcgtcattgacaccgacatgatggccagctttaccgacgaggaccgcgcggctttggcagaggaaacgcctgtagagcgtttgggcacggctgaggatgttgcacggtctatcgtgtttttgtgcgacgaaaatgccgggtatatcaccgggcaggtgctgggcgtgaatggcggactggtgatttgaattttcgctgcggctccgcggccgtaaggcggcagcgaacgggcggcgcgggccatactaccgagaccctgcgccagcgcgtctgtgccgaatacccggccatcgagaccgccaacccggcctttgccagccggtaaacacgcacgcctctccttttgcatactatgctgcaaagggggattttttatggctctttttcaaaacggcattgatgtgtcccgctatcagggcagcatcaactggacccaggtggccgccgcgggtaagcagttcgccatcgtgcgggtggggtccagcaacagcggcggcttgtacgtagatccgtactttttgcagaatgtcaccggcgcccacagtgccgggctgcgggtgggcgcctactactacacctatgcccgcacccgcgctgccgttgccagcgaattgactgcctttttaaatatgctggagggcatcaagctggagtacccggtgttcgtggatgtggaggactcaagccttaccagcctgggccgcgctgagctgaccagcctggtgcagtacgctatggatattttgtatcagcgcaaatggtatgccgggtggtacagttacacaaactacatcaacagctatttgaacgcgggcgcactggttgattacccgctgtgggtggcggactaccgcgccacgctgggttacaccggtgcctacacgatgtggcagtacagcggcagcggcacggtgagcggcatcagcggcgcgtgcgatctaaatcgcagctacaaggattttttgcctgaaatacaggctggcggctacaacaactacggggccgccagcccttcggtgcaaaaagtggatgggtataagctggtggttttcaacgtccggtgcgaatatttttacacatccaacttaaatgacgtggtgggctacctgcccctgggcaactactgcgtcaccggccagaccaccgccaaatatgagggttacgattgggtgacctttaaatatcaaggcgaagaatactggaccgccctgctgggcgatcgcaaccgcctggaaaaatgcgaatgtaattgcaactgacccttgaaaactagattttgttgtggtaagatacaactacaaggtgtatttccatctgtaagatgtagaaacggtcatgaatccaatttgacaacccaccaccatttatggtttaataaatttatatgccaaaattcaggcaacaccgcacaattcagggggaaccgccgcatggcaaaaaaacaacaggaatacggcaacgacagcatccgccagctgaaaggcgcggaccgtgtgcgtaagcgcccggccgttatttttggctcggacggcgtggaaggctgtgcccattccatctttgagatcatctccaactccatcgatgaagcccgtgacggccatggcaaccgcatcaacgtcaccctctaccccgaccatgtcgttgaggttgaggacttcggccgcggcatcccggtggactacaacaaggctgaggaccgctggaactgggaccttgtcttctgcgagctgtacgctggcggcaaatacgccgagggcagcggcaactacgatttcagcctgggcctcaacggcctgggcctgtgtgccacccagtacgccagcgagtggatgaccgccgacatctaccgcgatggcttccactatcacctcgactttaaaaaaggagagaacgtgggcggcctgcaaaaggaggcgttcaagggcaagcgcaccggctcggtcatccgctggaagccggacaccgaggtctttaccgacatcgccgtcccggctgacagctttaaagatatgctgcgccgccaggctgtggtaaacgacggtgtgacgcttgttttcgaggataaatccggcggtgacacggagaagtacgagtacctctacgagcacggtatcaccgattacgtcaacgaactggttggcgataagggcctgaccccggtgcacttctgctccggttccgccactggccgtgaccgcgccgaccagccagactatcaggtcaaaatgaacgtggccttcgccttctccaacaccgtgcaggcgttggaatactaccacaactccagctggctggagcacggcggcagccccgaccgtgccgtccgcctggccttcgtcaaccaggtcaacgcctggctgaaatccaagggcctgtacaaaaagaacgaaagtgcgatcacttttgccgatgtgcaggattgcttggtgttggtttcgtccagcttctccacccgtaccagctacgagaaccagaccaaaaaggccattaccaacaaatttgtggcccaggccatgaccgagttcctcaagcatcagctggaggtctacttcatcgagcaccccgacgaggcggagaaagcctgcaagcaggtgctgatcaacaagcagagccgtgaacacgcagaaaaagcgcgtatcaccattaaaaagacgatgacccagcagatggacctagccaaccgcgtgcagaagtttgtggactgccgcaccaaggaccccacccgccgtgagctgtatattgtggagggcgattccgctatgggcgccgtcaagcagagccgcgactcggagttccaggccatcatgcccatccgcggcaagattttgaactgcctgaaagccgactatgcccgcatttttaagtcggaaatcatcaccgacctcatccgcgttatgggctgcggtgtcgagctgggcggcagccacaacaaggatttagccagcttcaatctggataacctgcggttcaataaagttgtcatctgcacggatgccgacgtggacggctaccagatccgcaccctggtgctgacgatgctctaccgcctgacgccgaccctcatcaacaagggctacgtctacatcgccgagtcgccgctgtacgagatcaacaccaaaaacaaaacctactttgcctacaccgagccggaaaaggctgacatcctgcgccgcatcgatggtgaaaaatatacgattcaacgttcgaaaggcttgggcgagaacgacccggaaatgatgtggctgacgactatgagtcccgaaagccggagacttattaaggtgctgcccaccgatgccgagcgcacggcagaagtttttgacctgctgctgggcgacaatctgcaaggccgaaaagaccatatcgccgaacacggcgcggagtatctggatgatttggatgtaagctgagtaagggaaaacaacgatggcaaaacgaaaagaaaagaaaatcattgccgcccggccccagctgggcgataacgtcgagatcctctcggcgggcgaggtgctggaatctcccatcaccgatacgctggaaaccaactatatgccctacgccatgagcgtcatcgtctcccgcgctctgccggagatcgacggcttcaaaccggcgcaccgcaagctgctgtataccatgtacggcatgggcctgctcaagggcaaccgcaccaaaagtgccaatatcgtgggcagcaccatgcacctgaacccccacggcgatgccgccatctacgatacgatggtgcgtatgggccgctccaacgagagcctgctggtgccgtttgtcgactccaaaggtaacttcggcaaggcgtacagccgcgatatggcctacgccgccgcccgttatactgaggcaaagttggaacccgtctgtgacgagctgttccgcgacatcgacaaggacaccgtcgactttgtgccaaactatgacggtacaacgacagaacctaccctgctgcctgtcaccttccccgccattctggcaaacaatacgctgggcatcgcggtcggtatggcctccaatatctgctccttcaacttggaggaactgtgcaacgccaccatcgccctgatgaaagacccccaggctgacctgcgggagatcatccccgcccccgattttgtgggcggcggcaccatcctgtacgacgcagccgagatgcagaatgtgctggaaaaaggccgcggtagtgtgcgtgtccgcgcccagtggagctacgataaagaaaacaattgcatcgatgtaacgcgaattccgcccacaactaccgtcgaagcaatcatggataagatcactgaactggtcaaactgggcaagatccgtgagatcagcgacatgcgcgatgagaccgacctgaatggtctgaaactgaccatcgacctcaagcgcggccaggacccggataagctcatggctcgcctgttcaaggccacaccgctggaggacagcttcgcctgcaactttaacgtgttgatcggtggccagcccaaggtgctgggcgtgcgggacattctgctggagtggatcgccttccgcgccgagtgcgtgcgccgccgtacctactacgatttgaaaggcaaggaaaagcgcctgcacttgctgcagggcctgaaagctatcctgctggacatcgacaaggccatcgaaattgtgcgtaacactgctgaggaatctgaggtcgtccccaacctgatgattggcttcggcatcgatgaggttcaggctgagtacgtggccgaaatcaagctgcgtcacctgaaccgcgagtatattttgaagcgcaccgaggaaatcgaggagctggaggatgccatcgccgacctgcaggacatcctcaaacgcccggctcgcatcaatcgcatcatcatgcaggaattgggcgatgtggcgaagaaatacggcaagccccgccgctgcgagatcttgtacgagatccccgccgacaccgccgacgagccggacgagcaggtgccggactaccccgtacatctgttctttacacgggatggctactttaaaaagatcaccccgcaaagcctgcgtatgagcggcgagcagaaactgaaggacggtgacgaagtgctgttcacctgcgaaagcaccaacagtgcagagctgctattctttacaaatcaccaccaggtgtacaaatcccacgcctacgacttcggcgacagcaaagccagcgtgctgggtgattacgtcgcatcgtcccttggcatggaggagggcgaagtgcccctctacatggtggtcacgccggactacaagggttggatgctcttcttcttccaaaacggcaagtgcgccaaggtgccgctgtccagctacgagaccaagcagaaccgccgcaagctgctgaaagcctacagcgataaggaagagttggcctgcatgcgctacctgcccgctgagaccgagctggctatcttcaccaccaacggccgcctactgctggcgggcagcgccctcattcccgaaaaggccactcgcgacagtgctggtgtgaacgttgtaacgttgaaaaagaacgctaagatcgcccgcgtcactctggccgacggcctggagctgggcgaggcccaccgttaccgtgtgcgcacgctgcccgccgccggtgctatcctgcgcgccgacgacagcgccgaacaactgacgctgtaaggccgcacgccgtaaaccggctggcgctcccctgcccgttggggtcccgcgccgcaccgccgcaaaaccagcattgacaacgccgcccaagtttggtataataacagtcactgatgcgggattagctcatccggtagagtgactgcttcccaagcagtaggtggcgagttcgagactcgtatcccgctccaaaatgaatattggtgatacaccaacaaaaaaccgttaagctgcatagcttagcggtttttcttttgtttcgtgatgattcatagcgtttcacgttgtatatttattctggtgcaacctgggtgctatacactttttgcgtccactttataggtacgctggtgcgtttttgagtgcggttttctccatgaaattcaccaaaaaagcggcgggccgcccattgggtagcccgccgcttctcttattcctcgtcgtccttagtctgccgttctgcggctttcttcccggcggccagcagtttcagcaggccatcagggacatcggcacccatgtggatggcgttctcggcgatggagccgagttcggtaaaaatataccacaccagcaccacgggcaaaatcaggctctggtacgtaatgcccaggccgggcaggttggcgaccgcgatgctgagcacagcatctgtcagcgcggccacaatgaccacgaccagcatgccggccttgtgccagatgccagaccgtgccacggcgctggaccactctcccctgctggcggccgccgcgctgccggagagccaatccagcaccatgcaggcagcccaggccaccaccagccagcccagccagccgaatgccgcggtaaaggcaccgcaggcggcagcgatcaccgccttgacccacaggaaaatgttgtcgtctttcatggtttactcctttcgttcacgctgcctgcgcggtgcccttggcacctacggcggacagcttgtccaacacggccttggcatcgcccagggtgatggggccgacctcgatgttctgatgcgccatctcagcatcgctgaattctgcccagtacagccgcatggccaccagctgcagctggatcgcaaggctgaacaccgccatggcctgggcgttggtcaggttgctggcacagatggtctgcagcgtggaggcggcaggcttgtcctcggccgggcgctcgaccgcatgctcaccgggaccgtaggtgtagacgctgctgctggcggtggtgaagtcatcatccagccaggtcagagggttggtgcgcttgccgcccagcagcacctcgaagtgcagatgcgcgccaaaaacgttgccggtggcaccgctgtagccgatcagctggccctctttgaccttttctcccttggcaacaatgaacttgaacaggtgggcgtagcgagtgacaaggctctgctgcttgtagtcggcgtggcggatgtccacgtagttgccgtaactctgcatgctgcgctcgtcggtggtgtggccgtcccacagctgggtggccgacaccgtgccgtcctctgccgcgtagaccgggcgcacggcggtgttgccgatctgggtgcgcaggtcgatgccgttatggctgcggccgctgttgtagtgccagccctgggtcaaaatgtgctgatccagcggccagcgaagtaaaacttcaccattcgataatctcatttgaaaactcctttttatgttctcaaccaccagttcatgacaatgtccgaactgggcttttcttctaccaacgccgtgatggtcccggccccggtgtagaccaggcccgcgttgatcttgtccatcgaatcggcgaggatcacatcggtggcaaatacgttggtcttgttggtcgagccgaggctcaagaacatgctgttggcggtcagggtcggtgcgaccgagatcttcttcgaggggtacacggtctgcttgtaggcaaagccctgggcttgctcatccgtggaggcggtcgtccagctgtccacgtaaaaggtggcgtaatactcccacggcagggcaacgtagaggactttgttctgcaccgggttagcgctgctgccggacagcgcggcatcgaccgtggttttgttggcctccgattcaatgccgctcagtttggaatactgggccgggctcatcaggccg

SEQ ID NO: 7787 - DNA, 1105 bp, Unknown
  gut microbiota DNA sequence
tttcaagatgtgttagactgttttcatgttggatgattcacacacttttctcggctgtttctgaaacacaaaaaaacacagagccattttacgcccactatgctccaacacaggatggtgacgaattttgaactaccagacgtaccttttctttgaaggccgcaccgaatatatccagggctacgacacgccccagcatacatatctgctgggttccctggtgttcggtgtgctagacctggatgccgccccctatctggaacggggccgcgcgttgctggaaagattccggggcgtaaacttcccggaagatcagaccatgcagcagagtctggccgctcctgacacctgtgtgtactaccaggtagcttccttttaccatgactttgccgccgctgtgcggcaggtttccccggccctgtttgatctggtggaaggctacacgcttgccaacttccgtagcaatgaacgggaactgaaagcgacccaacatagcctgtggcaatttatacagactggaaaaaatgacagttcgtatacatttgatgaattgcgcatcagaatgtcccacctcggcgaattggccatgaccagcgacatcatggaagggttctgccggaactttccggagtacacagaccagatgaaggtctttatccagcgtgataccggggatgcctctctgtgccggacggcgttgtcggtattggaatcctttgtgaccttgctgcagcagttggtggacggcaaaacagatctgcgccaactgatcgaggctacactgatggacgaggacggacgccccagaacagagcatggccagcacccttcggagttgctggtggaactggccgaaaatggcgattcgacctaccagaaataccacaaactggaggacgacatccatatccagacccgctacaaacggcccacagacaacaaaaaaggcggcatttctgccgccacgttctacgcaagcgatacgctgcctgcgttactctttttggaatttgtacagatgtgttctcaggatctgccggttgccgtctgtgaaagctgtcaccggctgtttgtccccttctccagccgcgccaagtattgtgag

SEQ ID NO: 7788 - DNA, 995 bp, Unknown
  gut microbiota DNA sequence
agggaagcagcatcagcgccagccgaagcttccaagaactgcagcatagaaacagacctcctttccaaccataatcctttacttactatctgaagaatccgagaccagcgtagaggtagcaccttgcacggtcttgcacatccgctgcacctcggacatcttccaaaatatttcatccagcgtgcactgaatgttctccttcttgcgggtgattttccccagatccgcaaggtacaagagctttcgctgtttttcctgctccatgttctggagctgctgctggagcttctcccggtcgcgccccagcaggcgagcggtagcgacaaacttttctgtaaatgtacttccggggaagtcgttgatggtttcaaccacgtcctcgggcaaacggagcgttttcacttgtgtagccaaaccgacccacatccttccacagctacaagcgacttatcttatggggtgaccttcacttgttggcggggacgttgggaagaacttccacagattccacgaaaccgcccgggtcgtaacggatgtcaatacggctaccaaccagcatagagtagccgccctgctttttggcttcctcggccatgaggtctgcatcgacaaactgctggcagacctcgtgccctttcagctctttgtcgcgggggttctcccgaaccagatgcaggatatacgcgttcagctctttaccgttctttctggattttaccccaataagcgacttgataccaacaatgcaacattccatagaaaacctacctttcaaaacgtgtaatacaggggtgtcagtagtgacattattattgtaaatccacaggcgggaaatttgtaaaaaaatctgaaaaaaggtgttgacaaacgcttgcggcggtggtattatatacaagctgtccggcgggacaccccgtaaggacagcacagcaggaccttgaaaattgaacaaaactgaaacttgtggaaccttgaacgtgggtttggaaacccac

SEQ ID NO: 7789 - DNA, 162 bp, Unknown
  gut microbiota DNA sequence
tcgtttccaactgttgtcccccactccagggcaggttactcacgcgttactcacccgttcgccactaaatcaagaaaagcaagctcctcttgattccgttcgacttgcatgtgttaggcgcgccgccagcgttcgtcctgagccaggatcaaactctttata

SEQ ID NO: 7790 - DNA, 239 bp, Unknown
  gut microbiota DNA sequence
tccgttcgacttgcatgtgttaggcgcgccgccagcgttcgtcctgagccaggatcaaactctttataaatggtatttaatcgccatttaaaagcgttaaatctctgtaatcactcagacacaatcgcttgcgtcctgtatgaattacttgtaaatttggaattgattatcgtgggtttccaaacccacgttcaaggttccacaagtttcagttttgttcaattttcaaggtcctgctg

SEQ ID NO: 7791 - DNA, 4451 bp, Unknown
  gut microbiota DNA sequence
gtggtgacgcccgcaaggctgcacttaattatcagaatcagaagaagaatccagctccgcatcgcggatggctttgatctggcgttccaggtcgaaggctttgttcaggacggggtagatggcctgcatggtcaggaccgcgggcagccacaggcccgtgaggaccatggcaaagccgctgatgggccacagcagcaggatgatgatccagtagacaaactgccacactacgcccagcgcggcgcggggcaggtagcccaaaaacaggaacagcgagtttttgaccagccccgcaaacggcaggtccagcagcacgacctgggcaaacaggaactcgcccagacccagcagcaaaaacaggcctacggccagcagcgcccccggcactacaccggccgaaacgtcataatggaacaccgtaaagatctgcatggccagcagcagaccgcagatggcacccggcaaaagcgacgccctgacgttacgtttccaggcgcgacggtaggtagcccaccaaaagcccggctcgtcgcgcaggctgcgcaggatggtatccagcaggccgcacagctggggcgcggcgatcatgccgcccagcacgcctgccagcagcagcggcaccagagagtgggtatcgacggcgaaccacacaccaaacacgaacggcagtgcgctgaccagcgccagcagacccgccaggtaaaaggacgtgaggtcacggcccaaaatctcgaaaaagcgggcggggccttttttgcggggagcgtccggcgagacaccggggccggggcggtcgaaatggaaattgaacaaagccatgggggattctcctttgctccggggcaaattgtcacggatttaacattattgtacctattgtagcacgatggggcgtgcgttgcaatgatttaacaaaaaagacacgctttggcggagcgtgtcttgaagtggcataggattaaaaaggcaaggatgcaatgattttaatgtctcccccacccgcttacgcggtattgcctaaaattatcttctccgggcgtcggcggagagggcgtggagctcgggggcgtacatgtggtagttgagcaggtaacggccatgggcgggcacgcggtagaaagccgccttgatgcgctccagcggggtgctgccgttctcggcgctgctgttgccgctgataagcagcacatactggttctcgctgtaacgggccatggcgtcgcactggcgcaggctcttgtggatcagctcgcccagctgctccatcatggagccggtctcggcggggtcagcgttctgggcgggcgacatggtgagcagcgccaggtagaccggcacgccgaagcggctttgcacgccgcgctgcaggtgatagatctggcggaaattctcgaagctgcaatacgcagcgccgggggtgtcgtcggcggacagttcctcggccaggcgggagatgtcattttccaggttgcggtcagcctggcgggcctggcgggagaccacacccacacgctccggctcgacggcatggtgcaggcagcccatcgcgttgccgcggcgggtcatctccagcgcttgctcatggcggcccagggcctccaaagcctggatcatctccagatacaggcgctcctcgtaggggtccagctcgatggcgcggcggcacagcttaacgatgcgctcattctcacccttgcgcttgcaggcttccagcacctggaacagcgcgatgcggtactgcacgtgcagggtcaggctgcgggtctcgacccaaggctcgttgcagaacatcggcagcagacggccagcatacagctccagcacgcgctcgtagcgggctaccgcggcggcggggttcagctggcggcgggcttcctccatcagggcttccatctcaaacacgtccacacggcactccatggtggggttccactggtagtagccgcggctggtgatgatgcaggtctccagctccttcaggccctcggcatcgatcatgttgcggaagcggtgcatgatggcgcgcagagccatatccgggttggtggaccgttcgccgttccacagggtatccgtcaggtctttgtgggtcaccttttcgcccttttgcaggacgaggtactggatcagcatcgtagccttgcgtgactgtttcagtgcggctaggaccggcttgccgtccataaggatctcaaattttccgagcatcctgatctcaatgtctgccatggtaggtctctcctgtgcgtttgtttcacgattgacacaccttgcggtgttatttttaattagtatactgttttttcacccgattgtccagtgcccatacaacaatttattcgccaaatcatttgttatttttattggaactccggtgcgccgggcagcggaatgaccgcggtctgggtgtagacgggggtgccatcgggcttagcgacggtcagttgcatagacagcgaggtcaggcagatcttcccggtttccttctcctctttccatccgcgggcatagaacgcaagatccgaaacgacaagccccatataatctttgttaggataggccgttgtataagcgtaggtcgtgtactcttttttctttccgtccttgccctccgtttgcttgtaaaaacgcatgtgcaggtagcggttcagctcggcaaaggtgtcgtcggcagggtcgtagaggaccttggtgctggtggtgttgtcggcgttcagggtggtggcggtcagcttgggcacataaccggcatcaagtatctcggtatagctgctttccactgtaaagcgcagcgcagtgccttccgtcaggcgggcatcttctataaaaatattatttgccgaatccgcgtctgccgaatccgcgtcgctctctgttgcggcgtttacgatagagatcgtgccgtcggcatcggccagctcgccccggatggtctcggtgagggcatcggccaggttctgggcgcgggtcagctgctgcacctcgatgtaggcttcggcgcagggcttgaccagcgtgaccgccgccgtgccaaacagtgccagcagcaccaggcagaccatcagctccacgagggtggtaccttttttattgttcagcggggtggtcatggggtcgtgtcctcttttgtgtcgtctttatcttcgtccacttttttgtagtaacgggtgaaggtatgcgtggcaacagcctcatcgttatcgtctttgaccttagcctgtatggtctgtatttccacatccttgacggcaaagaccgtgcggtcaccgcggctgaagctcatcctggtcgtggtgccggattcgtttttccactcggccgcatcgtcgttgaccgggtaaagtgcttcggtaagcaggtaggcgttatcgcgggtggtctgcgcctgggccgaggcccgcctggcaaaccgcagcgacgcggtaaacagcgccagaaacagcataagcagcacgaaggccaccagcacttccacgatggtttcgccgcggcggtcacggagggcgtttttcaatctttgcatagtgccacctccttactcatcattgccgttgatgcgtgtaaaaatgcacgcactatccgtatccatgctgtagcgcaggtatagtgtagaagcattattttttgtgacggtacgttcctcaccggttgccattttggtcaatctcaaagctgtatcgccctcggcaccactgaagctgtaacgagtgttttcattatccagcgtgtaatagtagctgtaaatgccggtatgcttgtactttctggtgtagctgtagctctggtctcccttgaccactttgacggtcacacgaatgacataatcatccacattcatagtggaaccgttctcgcgctgatttctcagtttgatgagaaggttgctcaggttctctgtgatgggttcgttatcgatcacgttgccgccttcgtccacatcgtcgctggggtgcttgttcagggtgacggtcatctcgtcgatgccctcgggcgcctgcagggtaaacgtatggtcggtgtcgtcgccgtaggggttatcgatagagccttttttaacgtagatatggttgataaagtagccgatgctctggtcgttctcctcggtcatcgcgccgtctttttctttagcgccggtgtaatgcagcagttcctgctccagcacatcggagaagctgacggccagctcgtagacgtcctgctccggcagctggcggtcggcgttggccatcatcagcgaggccgcatacacaagggcggcagccagcgccacaaacagcgcgcccaggcacagcactaagatcatggcaaggccctgctggtcccgcagcgggcggttgcgttttgggggcatggtgcgccctcctttctgcttttttaaatcaagggcaataccgcacaattctaagtgccgatacggcgggaattgtgcggtgttgcccaaggtcaggccg

SEQ ID NO: 7792 - DNA, 19138 bp, Unknown
  gut microbiota DNA sequence
cctctgccctggggtcgttggccgggggcgtggggtccgtctcccctgcccggcccgtgctttgtgcgggctgggggtcggcttccgccatggcgaacaccgggcgggcggcatcctcggtcatggcctggccctctgtgcgcagggagacttccagccggtcggaatcgacggtcttttcgccgttgcccacagcccagatggtgaccttttcggtgtacttctccagtgctctggtctcgtcgttgtcgccgtcggcgcgctgggtcatatcaggcagggtaaggcggtagcccagggaataatcggtcatctcggcctggcgcagggcaggcacggtcttgatgcggtagctggggttatcgttgtcgatagcgtggtggccggtcagagtgatgggctggctgaccagctccgtcacttcggacgtcgtaccgtcatcattcgtcaccgtgcgggtcacctgcacaatgctcaaatcgtaccagacatactcatcctcggtgccctcgtttgcaatgttgcgggcggcctcggtgatgtccagccagttggccgggtcgttttcgttcaagccagacggcagtttttccaccttcaaaatatcgccgcggtgggtcgttatagtttgcgtaccatcgtcattttccgttaccacatccgccggggccacggtaaagcggatgtcgtagccttcctcgttcgggtcgtcagcgggcatatccgcggcaggcgtcacgtggaagcggtacttctcggcaaagttgcgggtggtgccgtcggtatcggtgtactcgttgacggcaggccactgcacagcgtactggtggatggtgatctctgcgctgtcaggtttccaggcttcgccctcggtgccgtacagcttgccctccaccgtggattccaccgaggtcacgctgagaacgccgtctttttccggcttgtccagctggatcttgggcaggtgcaaagcgcctgcggcctgggcataatcgtccggcacgtagaacttccaggaggaggaggtagctgccgactcgctgttggccaccatggcgcgcagggcgggcagcaggtagcggttggcgtcggcgggctgcatggtaaaagcgttggcgttgggcgtgaccgtgtaggacacggtggtgccatcgccgctgacctgggtctcgctgcccacggtcttggaggcttcggggatcatcagcgttgccttatcctcacgcagggcggcattcagggcgtccaggttttccttggtggggtcgtccatccagatcttggccttggcgcaggcgtcgttgtaggcggcctcatcatcaaacaaatagccggtaaagaagtagctggcggcgtcggccttgtccaccgtcatccggatggtcaggtcattgcagaaagcgttcatcagcggcagggcgtcattgacggccttgcccgtccaggtaaagtccaccttgctgatggccggggcctcggtgcgttggatgatggtctgcgggtcgctgacctcgccgttggggctgcgcagcacggtggtgtcgccgtctgccgggcaggccaccacgtagaacaccagcgtttcgccctggtaagcttccaggtccacgatggtctgggtgtctttgatgagcgtggtgctgtcgccatccgccgggtgcagcttaaaggcttcgcccagggtggtgccggcggcgttggtggtctgcacctgtgcccacagctcatagtggtccacgcgttcatccgagacggcaggccagctgatctgatagcgggtctgttcggcattgctggtatccacggggaacacctggccgggctcgcccacctgctgcaggcggcgcagcacggtatagacggcggtgtcggctgcgccgatgccctgggtggtgccggtggtatcgcgggtgacgcgcaggcgcactttatcaaagcgccagctgttgctgccgcccgcaaggtcggtatcgatagggagggtgtagctgtaggtgccgtccttgtactgaactttgctgttggcatcatccggcagggtgatggtttcctccgccgtagaaattacattgctgttttcatccctggtttcggtcacaccgtacagcgtcagcttatacctggtgctgccgccgctggcagccgcctcgccgggttgggtccaggtaaaggtgtaggccagctggttgtcgttggccagcttgtcgacgtcgtaattcaggtacaggtcgccgtcggcaggcacgcccgtcaacttcggggcctgggcaacggtgatgttgttttgttcaaaaatgacctggttcgcggcatagccagcccagttgctgtagtctgtcagattcttgcttacaaaatacagcggggtcaggttggcaaagctgtagccgttgctttcccgcacgatttccaggccgccataccaggacgccgggcgggcgggagtggaagcctgcagcttggccagagcttcggcatcggcagcatcccaacgggtgaccacatcccccaaaccgctggtgaccggcacagccacgaccgtccagttatcatagttggtcagggtgtcgtccggcaggttattgaaggtaaaagtagtgttgctgttgggcacaacgttctggcgtgcagccagcgtgatgtactggcctttgagatagacattttcgccgttcagcgtgacggcctcatcgcccaggtagcggcccatgagcatgacgcggtaggttggctgtgtgccgctgacgctggcggtaaagttcagcgtaaccgttacggtcaggtcgtcgatggtagcgccggtaatttcgacatttttggcagcaagtctgccctcggccaggccggagttgctgttgccccatgtgttgtcgccgggaaccacgacccaggagaccggcatatacaccgtctcgtcatactggccggaacgcatccagcgctggtcgctgctggtggcttccgccgtcatacgctggctgctgccaagtttctccgaaatgcgtttgggcgtggtattcccgttgctgaactggtaggtgtcgccgttatcgccgccgaccttgactgtgacgctccaatcggccaggccgctgttctgcatcaacgtatcgtattcatcggcattggtcagcaccagcttttggctgaactgaacatggccgccctcctccggcgtgggcatcaggcgaacctccagctccggcgtgggcagggcgcggacaaactgctgccggcccgaagcagctgccgtgccggtacccttgctgttgacgccggccacgctgaccttgaaatagcggcccttccactcggccttactttcaaaggtaaagcgggtgtcgtaggcatcggcctccagcagggaggtattgccgatacggtcgccgttttcatcggtctcgtaaacggtgatatggtagtagatggccgggctgccggtggtgggggcattccaggtcacgttataacggccgtaaatactctcgttaccggaaccggtagcatcactgcgttcgattttcagtcctgtgggggcattcggggcgctgttgtccaggatattgctgtagtagcgttggagcacctcatcggtaatatcttccttactggtcttgttgtcaccgttgacgtcgtcgaagaggagcaggatcttgccaacatagccgacattccatttctccggcacaggatactgggtcagatccttggcatccgctgcaaagatataacgcacagacgaagcttccgagaagctttggcccggcaaggtggtaatatacgagctgctcttttttacagcctgcatcgagacgaccggtctgccatcgcttgaaatctttggcagcatcgcaaagaagtgataaaagttgtcgccatcctgggcggcgttggcaccgctgtccacaccggcatacaggcgatgcgcgtttacgacggtagtcgcaccgccgccttcttcgctttcattggtaccctggctccatccccccgtaaccttgttgcggcccaggccctcttgcagccccttaatgccggaatagccatcgaagctcttatccagctgcatgtagtagttgtcggaaccggtcagttgttcattggctgtatggcgataggcaatcgggtaccagatgctgcccgtattgttcttgcttttatacaaggcaaaacaattggtgatggtcgttttcttgttagaggtgctgcctttgccgcggttgccccagatgccagctgaacggacggggccccacatttcggtggaatagttacggcagcggtcaatgttgacctcaacgttggggatagccgcccacggaccaatatagcagaagatgccgacagacatcgactgtgcctgtagttccacattggagccgttgacgcactcgatcacgttgatggtcatggcatcgctgttatggtcattcgccagctgtaccttaccaaaaacgccgcctacgtcgtttgcaccattggtcatcttttttacgctgccatagttgctgcagcgatacaggttggccgccgtaccggcaacaggattattgaagtaacctgccacgccgccaacggtgccggagctttcgccgttgttggcgttggtggtgatctcgccaaagttatagcagttggtcagcgtaccgccgtagctgagccagtaggccagcacaccacccgcgttgttggagcggctgttgaacaccgtgccaacattgatacatttttccagcgtccagcggtcgccggtgcggttttcctgcgtaccaataacgccgcctacatagttatctgctgcattgtcacctttggtggtagcatagcggtcattattagcgttgctattgtcatccgccgttccccgcgtgccgcgcacaaagcggcgcacggcggcaaagttgaccaggccgctggtggaatccgcattggattcgttctggccgatgacgccgcccacggcgccccagctttggttgatgttatcggcgtagacgaaccactggccgctggcactgttggtgatctggccggtgacatcgttaaagccggtgatgccgcccaggtaaccgtcggccaggccgttgccatggctggtgctgccccgcagcgagaccagcagctggttgacgctgcggttggtataaactgtattatagtttttatcgccataggtcagggtatcaaagccctgcatggccttaaagtcgatctgcagttttttctctgcatcaccgctggccttgccggtcagtacgcggaccatctggttcaggttggcgttctgtttgtcggtgtctaccactttggcagtgacttcgttgccgttttcgtcggtggtggtctcgtctttatagggcacatccagccaggcgttgatctgttttacaaggggctgtgtgtccaggccgccgctggtggagatgctgccgctgttggagccggccacgccgcccacaaagccgctgcgggcggtgatgatactacccgttttgtctttggtgccgacggtgctgccggtgatctcgccgcggttgcggcccacgataccgccgatatgggcggcgctgttcatcttggtggcagcgtcctggctggcgcccacgttggaggcaccctgcactttcagctcgatatagccgaccttgcagtccttcaccttgccggtggcggcggcagtgccgtcggtgttatacaccacgtcgttgctgcccacgatgccgcccacggtgctgcccacggtggtaaagccgttatccttaccgatggcgcccgtatagctgcacgcacttaaggtgccgctgctgctgccagcaacgccgcccaggttgagatattttgccatgctgtcctgcaggttggtgcttacggtcacgttctcagccgtgccggtgttttcgcccagtgcgccgcccgccgtgacagtgctgtcgccggccgtcaggttggcaaggctgagagaatttgcacgcacattgcccttgctgagggagcctgcgttatagccgaccaggccgcccacccgggtagccgggccgtacaggcgcacgtcgccgccgaaatttgccatattgaacaggttcgcatcgctgatcactgcaccggcttcgttgcaggctgtaatgccgccgatggcgtccgacgtgccgcgaatatccgagccgtagacccgggacgttgtgatgctgccgtagttatgggcggtcacgccgccggcttcgccgttggctgctgtaacgctgccgttcatggtaacgccctccagctcgccgccgacctcgttgcagccggcgatgccgcctgcaaagccaccgccggtatacagcacacggttgccgctggctgcgtgcatgcagccgtagatgcggccgctgttgctgccggcaatgccgcccgcatactggtttaccacctggatagagcctgcgcggttcgtggcgttctggatcaggccctcgttgcggcctgctacgccgccgccctgggtggtggaggaaacagtcgtgccgttttgcacggtgatggatatgctggtcggggtctccgggtcctggccaatcgtaccagatgccgcattcaagcccgccacaccgccggtctgggtggtgccgctgacttttaccgtcacgctcttggcggtgacggtgcccaagttatagcctgccacgccgccggtgacggtgatgccgtagacattgccgttggcactttccagcgtaataacgccggatttactgttataaccggccacaccgccgatgtccagcccgccgcggatgctgctgctttccgccggggcggagttggtgatggtgccgttgttgatgcccgcgatgccgcccaggtagcggtagccctcctgctggctgcccatggagttgaccatccggccgttggtgatggtgccgttgttgacgccggtcaggccgcctgcggccacggggtgctgcacgccgccgtagttggtgcaattatgcagtgtggttttggccgtagtgcagccgatgatgccgcccgcaaagtagccgttgtggtcggggtccagctcgcccagcgagacaccgctgtccagcctgtacgccccgccgttggccgcgtcagccctggggctgagggccaggccgccgtaggactgtgcctggctctggttgccgttgctggcgttttccagcgtgagggtggtgtcggctgcgttgtagccgatgatgccgcccacgtaggcgttggcgtaaatgttgaactggttgctcaggctcgtcagggtgatggcgctgccgctggggttcagcttcggctcgtcgaaggcgttgccgctgctgaacttaggcagcagggtctgcaggtcggccgcgatggtgccgttcttgttctgcagggcgtttttcagcgtatctgcgttgactacgcggttgtagccgatcataccgcccgccacgccgtcggccacgatgcgtccggtgccgatggtggcggcgttggccgccgcaccgccggcgttgacaaatttgaattcgttcgcgggcaggttggcgccgatgacgccgcccacaaagtggacgccctcgatgcggttggcgctgacctgcacggtgggcaggctggccgcgccgttcaggccgatgacgccgcccacgcagtcgccggtggccacgatggtaccggtgacgctgaggatggtggcttggctgtttgtgatggtggcggtggcgtcgttgtagcccgccacgccgcctacaaagctgccgccgtacagcaccgcgcccaggaccgcgcccttgtcggactcggcctgccagctgatctgaccgtgggtgccgttgcagccggccacgccgcccacgaaatcggcatagcggggggtgccgtccccggtctggctcaactgctgcagcagcgcaatcttgtttttatccgttacctcaacagtagacatactgttgacgctgtccaccagtttggcggtctcgtttttggtgagggccgcgctgtcctgcttgccccaggcagcatcgttgacgcccgcaatgccgcccacgtaggccgcattggcgcccaggcctgccaccaggcccttgttggtcatgttttcgatggtgctgttcaggccgttgaccgagacgataccgcccacgtaacggttgccgaacacatagctgttgttggtgccgccgctggtgtacaggttgctgcccacaaaaccgccgacaaagccgcccacgaagctgcggcccagcacatacccggactcggtgtagcagttggtcatctggacgtcgcggccaaagcccaccaggccgccgacaaagtcgcccttgagggggctgttctcgttcaacgtaccgtcggcgttatagcccgcctgcacaaggttggtcagggtcgtctcactcaggccgctgcgggtggcgctgtggcactcatccagtacaaggctgcgcgcatagcccgcaatgccgccaaagaactggcccagcacgcggctttggcctgcggtactgccctggtagttggccccggccagcacggtgccctggttggccaggccggtcagggtgttggcgtcgctgtcgttctcggtggtggtggagtacaggttgcccgtgatgccgcccacgaaggcattgcccaccacggtggacttgttggtgatgtccttgaggttttcggcgttccgggtgccggtcaggttggtggcgtccagtacaccggccacgccgcccacgcccacggcgcgccagagggtctggctctcgttttcgtttgcgatggcgttatagcgtgctttttctgccgtatcggcgctggtgccggtatccgcaccgctgttgttggcggcgtcctcatcctggaagatgcccgccacggtgacgttctggtccagcgtcaggccggtgagtttggcgccggttttgggcatggcaaagccgacgagcccgccgatgccgtggggttcgtctttgtacaaggtgccgtccacccggttcacgccggtggtcttgctgctgaaggtcagcacagcggtgaccttggcctcagcgccgcggcggctgctgcggtcgacggtgcagttggtcaggctgccggtgtccacgcccgccagtgcgcccaccgaccagatctcggtgcggtagtcggggtcggtatcggccagggcctgcaggtattgggtgccgttggcatccatcgccatggcggtgtcggcgttttgcccgcctgcggatctgacctcggcgttgatctgcacatcggggtcgcgcagggtgatatttttcagtgtaccgttgttttcacccaccaggcctaggtagtggtcgcgggccttgtaggcagcttcaccggcatatttccgctccacggcagcgatagaactgccccgcaattgcaggttgctgatgaccacttgtccgctgccgccggtgctgccgtttagggtgacgtccttgccgatggcggggatggtgggccaggccacgacctcgccggtgcggctgggcaccttggccacaggctccgcgtccttcttctcgggcgagcagtagacggtgacgccgccgtcggtccaatccagggcggtgtttttacccgtaaaggcatattcgccgctatttacccagcgcaggttgtacaggtggcggaagtatttcaacgtgccgccgcttgccttgctgcctgcggcaaacaatgtattttcggtattggactgctgcggtttgctttcggtataaagatcctgaaagttcgcgttaggacgtgctttcatcttaacgtaaacatctttaggagcatggtccgtcaggcgtgtaatgctgaacagggtggtcttggtggagctcaggtcggcaccgtcattttcggcggcgcgcagcaggttggcgtcgcacatggcgtccagcgtcaggataaagcggcccttgctgtagctgagggggaaggtgtagtcctggtacgtttcgctccagccgtttccctcagcgttgggccggtacaccttgatctgggcgttgttgtgggtggggtcggcaagaacgcggctccactcgatctccagcttaaagaggggtgcattggtcgttgcatcgtagaattcagcgtcataaatggtgtcgatgtcgccgtttttgctgttgccgctccagtttaaggtcagggtctcgttgttgatgagctgcgggtttttgactttcaggcgtgtctggctcaaggccaccacgttgacggtgtcctcggccgagtagtagcccaccagcgaatccccgcggcggtggccgtagctgcggtcgtcaataagcatcgcgccgtcggcaccgtcatcagaggcaaagcgcagcttatcggacgctgtatcgtaaaaagcggagtagacctgcccggtcaggctgtccacctccaccacaatggacgcgttgaaaagcgactcatcgtagacgtaggggtccaacaggccgcgcaccatcctgctggcgtcgctgtcggggttcgccttatcatagtacaacgcgtagatctggctgttgaaggcattggctttttccgcggctccgtcaccgaactgttcgctcaatccatcagcgctgaagtggtcgcccagcgtgccgacttcgcgcagctccgtcaaaaatgtatccatatcgccgctggtatccttgcgggtcagggcgatctgggcggtctggaacacggtgcgggcgccggattcgttatgttcgaaccgggccaggcggacataggcgatcagcccggtgcccgccagggcagccaggatgccaagaatgagcagcacgaccatcagctccaccatcgtgaagccccgggcggtgcgcagtttttgtttgatttcctttataataggcagcacaagtgtacctcgtttatatccgggcggtcgacgaaaatcgacagattttccaatataagtaggttcattatagtataacagtttgcaagttgcaagaggaaatatggtagtttgccttggcggcgggcactaattgtagggctgccccttgccgccggccaaaaaattccgttcttatataacataaaatttgtcgaatcgccttgcatattgtcgcaaggtacagtatactttagtctgtgtaaaagtaaaggcaacggaaggggggcggcgggatgctgtctgatcgtatcggcgcgaaagtccggggttcccaggatgctccgccgctctcgatggcggaaaagctgctgcttgcgttttgcgccgccgcgctggtctttgtctgcctggccgcctatacccagctggaccgccagggcaaggcccgcgccgcgctgacccagatcaaggccgctcagttggccgcccgcgccgtgtcggcccaatgctactctgccggtacgccgtttgccgaccaatccacccacgatggcttcgctgagggcatcgccggacagatcgagaccctgggcgctctgcccggcactgtgactctgctgcagatcagcgaggacggctacaccgtggagcagctgctctacgccgagggcgacatgcgcgcgctgtacgacgccgagaccggctatactgtctggcgggccgagcagcgcatccgctttgacagattggagggcgcgtgatgctgctggtggaaggtctgctggggctcatcgcgtttttgctgggggccgcgctgttcagctttatgaacgtcgtggcctggcggctgccccggggtaaaaatccgttgaccggtcgcagtttttgcccgcaatgtggggctgcgctcaccgccggggatctggtcccggtgttcagctggctattcctgcgcgggcggtgccgccactgcagggcgcccatcccggtgcgctacctgttggtggagctgctgggcggcgtgctggcgctgggctgccgttggcggttcggcacggcctacacgctgggcgaggggctgttcggcatgcggtggcaggggcttctggccctggcgctctgcggcgtgctgctcagcatcgcgctgatcgatgccgagacccagcttatccccaaccggctcaacgccgcggtggccgtgctggcggtgctcaacctgctgctctcccctgcccggtgggccggggcgctcatcggcatggtgtgcatcagcgtgccgatgctgctgctctgcctggcgatccccggcgcgttcggcggcggggacatcaagttaatggccgctgccgggctgtttttgggctggcggcataccctgttggcgatgttttttggcattttgggcggcgggttttacggcatgtatctgctggccgcccgcaaggccgacaaaaaagaccacttcgcatttggaccattcctctgcgtcggcattgtgctggcgctgcttttcggcgatcccgtgcttgcatggtactgccggtttttataacgtttcatcgtaatttcggaggttttccatgccgcgttaccgctacacagccacggcgctttcgggcaagacactgcacggtgtcaccgaggccgccagcgccgaagcgctgtacatcaccctgcgggagcaagacctgtacatgaccgacgccaaagaggtcggcaccaatgccagcgtctaccgcccgctgaaaacgccggagctggcggagttttgccgcagcctgggcacactgctttcggcgggcgtgccgctggtgcgcgcgtttcgcatcatggcggacgagcgcggcctgaacgcccgcaccaggctgctgtacaacaccttattaaaagagctgcgcaagggcgtgccactttccgacgcgatgcaccagtgtgcgcccgctttcccggagctgctcatcgccatgacccgcagcgccgagggcaccggcagcatcgacgccagctttttgcgcatgggccgctactacgaccgcgagcacaaggtcaaccagcaggtgggcaacagtttgatgtaccccatcatcctgtcggtcatgatcgtgggtgttatcgctattttgatgggctttgtggtgccccagttcatgcccatgtttgagcagatggactctctgccgctgcccacggtaattttgtttgctgtatcggactttgtttcagccaactgggtgcttatcattttggtcgcagcctttttggtggtgggcggccgcatcgcgctggcccagcccgccgtgcgccgccagtgggaccgcatgcagctgcacgcgcccgtcatcggcaagctgaaccagaagatctgcacggcccgcttcgcccgcacgctgtccaacctgtattccagcggcgttcccatcgtagctacgttgattgcaagccgcgacgccgtgggcaaccgctggatcatcagccagtttgacgaggtgctggacaaggtccgcgccggcaacagcctgtcggaatcgctggcactggtggacggcttcgagcagtcgatgtcctcctccatcgccgtgggcgaggagaccggcaagctggacgagctgctggccaccatcagcgagacgctggactttgaggcggaggtcgccaccaagcggctagtaacgctgctggagcccatcatgatcgtcatcatgggcctcatcgtggcgttcgtggtggtcgccgtcatcctgcccatctaccagtcctacggcacgatcgggcagtcgagttcgacgtattgatgttgtgttttcattgatgtttaggatgtggctaaagtagccacccctcagtcacctaacggtgacaccgcttacgcacagcgggtgaggggtggccccgaagcctgcacttttcctcacacaaaatcttctaaaaaggagatcgcatctatgtccgttttaacctcgctttatctttgcaaccgtaccgtgtatgcggcggtaggctcaccgacggcgaatggggccaaaatcacggcggcctgccagaccgaactgccggagggctgcctgatcaacggcatcatcaccaacgaggccgagctgaccgctgcgctgcaaggcttttttgccgccaacgagctgcccacccagcgtgttgcgctggcggtgggcggcagccagttcaaccaccgggtgctgaccctgccccgcatgagtgaaaagaagcgcgcagccgtgctgacgcgggagttttccaccggcggcgccgacgtgaccgccccgctggacgactacatgctgctttccaccgacaaaaagaccaaggccgacacggtgctggccacccgcgtggagagtgcggtgatcgaaacttacatcaacctggccgcagcctgcgggctgaagctgtacagcatcgacctggcgctggccgggcagatcaagctggtgcgcgccaccccggagcttgccggcaagagctttgtaatgctgcaatttgacggtgattcgctgattgcagggctgtacgaaaaggggcagtacaaatactccacccgcagccggttgttcaatccccgcgggaccgaggcttcgggcaccgagatcgggcagaagctttccggtttgatccagttccagaccgctgccaagagcgagcaccccattaaggccgtttatttcggcggcagcaccgccgctgacttggctgtctgtacgccggcttgccgggctttgcagttggagatcgccgcctaccccagcacccccaacatcaagctgccggaccatgtaaagctggccgacatcgccctggccgccgggaacctgattgcccggtgacgcggtgcggaattgtcccggggccgcgccccggctctcccgttctttgtaaggaaacgcaaaagaggtttgtttatggcaacaaaacaaaacaacttttatctgcaataccagctggccgctaaggcgggcaaaaatgccgaccgtaaggcatttttgcgcaaggcggcaccgggggccatcattgtggccgggtgcatgctggcctggggcggtgtgtttctgcacacggccatgatgcgcgccgatacctgcgacctacgggcctggtgcgccgatgaacaaaaccttacgccctaccagcaatcgctgcaggaccagcaggccgccgacgcttaccacagcctgactgactacgccaacagcgtgaccagcctgctggcaagctaccccgacctgaccagcagcctgctcaaccgcatcgacgcggcaggttccggcagcggcatcacggtggagttcaccagctacgacgccgcctccggggtgctgcagttcaacgccacctccaataccgtcatcgacatccccgcctacgtgcgggcgctgcaaaactgcggcgtcttttcggatgtggactacaccggctaccagtccaccaacggccggggccagcccgccgggtacgcgctgaacctgcgctgcaccttggccgcaccggaataaccctgtaaggaggacgccatgactactgagatcaccgcccgcgacaagctgctgctttatgtcgtaggtatgttagctttcatcttcttctttgtgcaatttatgctcaccccggccctggaagccagcgacgaggccgcagcaagcctggccgaggcccagcaggcgcagatcgccatgcaggagaccatcgccctggccggcaccaatgccgccgccaaaaccgagagctgggccgctttgcagcaggccaacgccaactactacggtctgctttccagcagcgacctggacaccctcgtctctaatttagagctggggcatgatctggggcctgtctcgctggacatcagtgccattgacacccaaagcctgaccggctacgccgccagcacccaggccgacgacaccgccgcgccgacggacatcaactccgccgactccatgctggccaccgccgacaccaacaccgtgctgatggaactgaccccgccgctgacccgcatctatgcccaggccgactattttaaacagtgtaccgtcactttccgctgcaccggcagcgacagcaacttctacaccatgctggacgacctggccgcgcagtacccctcggtacagctgaaaagcgtgcagatcgaccacgccgcctacaccaacgccagcggtgccaccaccaacaccgccacctatacagtacagctgaatgtgatcctctgcgataaggagagtgtggtatcttgaacaacatccgtcttggcgatgtcctgatcgactttggctatatcacccaggaccagctgcaggccgccctggcctaccagaaagagcataaaaacctgcgtgtgggccaggctttgcaggagcttggctatgtcaacgagcaccaggtgctggaagccctggcccagcacctgcatctgcgggtgattgattttacacagatcaacgcggatatttccgccgtggagaaggttccccgcgagctggcccaaaagtacgacatgctgcccatcgccatcaacggccgcagcctggtcattgccgccaacgatccgctgaactactacgccatcgaggacatccgccagctgaccagcatggagccggagatcgtgctggcagagctggagcccctgcgccgcagcatccagtattattacgccgaggtccgcgcccgcaaggccgccagcaaggccaacagcagcgacatggccgccgcccgcagcgaggagttcgccgtggacatgaccgaggagggcggcgacaccgacgcgcccatcatccgcctgctgaacagcctggtccagcgtgccgccaccaccggcgcctccgatattcacatcgagccgttcgagggcgaaacgaaggtgcgcatgcgcattgacggcgttatcatcgattatgtaacgctgcagcgtgctttgcaccagtctttgattgcccgtatcaagatcatgtccaacctggacattgccgagcaccgcgtgccccaggacgggcatttccgcgcccggctggagaccgggccggacgtgaacgtgcgtgtgtcgattttgcccaccgtgtttggcgaaaaagccgtgctgcgtctgctggccaccaacacccacattgaacacgccgaccactttggcatggacgacgagacctataagcggttccgcccgctgctggaccgccccaacggcatcgtctacctgaccggccccaccggcagcggcaagaccaccacgctgtacatggtgctgcaggaggtcgcccagcggcaggtgaacgtttccaccattgaggaccccgtggagcgcaacctggaccgcatcaaccagacccaggtgaacaacgtggcgggcctgaccttcgagagcggcctgcgcgccctgctgcgccaggacccggacgtcatcatggtgggcgagacccgcgacgccgagaccgcgtccatctccgtccgtgcggccatcaccggccacatggttttctccaccctgcacacgaacgacgctctatcgtccattgtccgtttggaggatatgggcgtggagcggtacatgatcgccaactctctggccggtgtggtggcccagcgcctgatgcgccgcgtctgccctgcctgcgccaggaaagtgcccgtcaccgaggccgaagccgagctgctggggccgagcatcccctttgtcgcccgcggcaccggctgcccccagtgcaacggcaccggctacaaaggacgcgtggccatccacgagatggtggtcatcaacaaggcgttgcgccgcatgatcgccgagggcgcgagcattgaagaaatgaccgatgcagcgcggaaaactcagggcatgcgcagcctgcgggagagcgccgtgcagctggtgcgcgacggcgtgactacccccgaagaactgctgaagatcacctattttgaggagtgataccctatgcagatccatgaactgaccgcgctggcccgccagatgaaggccagcgacatccatatttcccaaggcctgccgctgatgttccgcattgacggcaagctggtggaagcccccgtgcagtttgacgaggacgccacccgtgccctgattgaaaataccctggacgagagccaccgcgaagcactggacacccagcggctggacgcggactttgccatcgccgcgccggacggcacccgcagccgtgtgaacgtgttttaccagcagggcaaaatttcagcgacgctgcgtcttttaaacgatgagatccccaccatggagcagctgggcctgccgccggttttgaagaaattggcggacgagccccgcggcctgatcctggtcaccggccccacgggcagcggcaagtccacgacgctggcctcgatgatcgactacatcaaccagaaccgctccgaccacatcctgaccatcgaggaccccatcgagtacgtgtataaaagcaaaaaagctttgatccatcagcgcgaggtgggcagcgacgtgaccggctttgccgccgccctgcgcagtgctttgcgtgaggacccggacgtgattctcgttggcgagatgcgcgactacgagaccatctccgccgccgtgactgccgccgagaccggccatctggtgatgagcacactgcacaccatcggcgcagcgcagaccattgaccgtatcatcgacgtctgcccgccgggtgcgcaaagccagatccgcgggcagctttcaacggtgctgcgtggtgttatcacccagcagcttttgcccctggccaccggccgcgggcggtgtgccgccactgaaattttggtgggcagcgatgcggtgtgcaacctgatccgcgagaataagtgcttccagatccccagtgttttgcagtccggggccgctttaggcatgcacagcctgaacggcgacctggcccggctggtggattgcgggaagattacccgcgaggcggcgctgcggtgctctaccgataagaaggatcttgagcagtatttttgatcgatgtttctgccttacgggcgtcaccaccatgcggtgacgcccttttattatgggttgcatccataagggccttcctttttgtgaccaaaaaggaagcgaaaaagtctcgctgttgcgaggcagcgaaccccgcccaaggggctactcgccccttggaaccccaaagatgaggtcgagaagcaaaaaagctaaaaaacgcaggagtgctgcgtttttcttaacgctttttcgctcctctccatattgaccccttcggggccgaaattcctctataaaataaggtgaatggctcccctctaggggagccagat

SEQ ID NO: 7793 - DNA, 8681 bp, Unknown
  gut microbiota DNA sequence
ctgggcaacgctgtccttgacctcgtcggtgtagacgtcccaaggcacctcggcggtgacctcactggaggtagcgacggtgccggcagtcttgcgggagtaatccttgccggcgccggtggtgtagaagtcccacagggtggggttgacggtgacaccgaccttttcgagggcggtgcgcagggtatcggcggtggaggcatcaatgttgccggaaccggtgccgccgtacacgaggttgacgctgctgctggagaaggtgctgaccttcgcgtcggcagccagaggcagcgcgttgttgttgttcatcagcagggcagcgccctcggcctcgacctgctgggtcaaagccaaaccatagttgaccatctcctcggcggagttgaagtcactggtgaagtactgggcgttggtgtcctcgttctccagctcccagaagctgccgccaaagcgggcagccatggtattgtcgaactttgcggccagtacggacaaaggcacggaaatgaccataacgatcgcacagaggatcgtcaggactttccacagcgtaatgtgcttacgcttggtctttttgtaggcctttttcaaggtctgcttttgcattttcagatcatccattatgttttctccttgttttgtttaaaccaaccgcggcgtgcggtgtgtttccaaaattatacccagtttgcgctggtggactttttcttgcccagcttgtaggcggggttgggggtgcttaccttgcggaaagcagcctcgtcgatgcaatcccctgccacggcctggaccttgacttcgccatccagctttacgcggaagcggaagatgtgctcaccctcttgctcggccagcttttcgccgttggcgtagagcgtgacctgcttctggttggagtagaccttgacctcaatctcgttctgggtgcggtcgatgaaccgcttggagcagatatgcacaaacggttcattgctccaccaggctttgtagatgtagaagctgtccttgcgggtcttgcggtcgaaggtaaccagccccttatggttcatgcccggttcaccgccctggtcgcgggcatcggcggcgaaatcgtacatattccacacgtgggtggaccacagccatttatggcgggcgaaacattccagcatgtactcgtggtagatggcctgatattcctcggtgtggtcaccgcggcggggatgctcactgtgcagattgggcataccctcggcgccgtattcactgaagcccagcgggcggttggggtagcagaggtggaagaaatccatccacaggtcgttcaggaacagccccggcacataccagcccaggtacaggttccagctgaccagatcggtgatgtgggccaccgggttgaaggggccgcacatggcgtagcaggccagcgtggtcaggcgggtcttgtccatttcatggcagaggtcgttgagttggcggtggttgtcccgcatgtcgcggttatccttggtggaaatggtgatctcgttggagaccccccagcagacgatgctggcgtggttgtagttctggacgatcagctctttcatctggctgatggtgttggcgcggccgttgggcatgtgctccgagatgtaagggatctcggcccagacgaccatgcctacctcatcgcagaggtcatagaagtactggtcatgctggtagtgggccaggcggatggtgttcgcgcccagctccttgatgagctgcatgtcctcgtcgtgcatctcccgcgtgatggcattgcccaggcccttgcggtcctgatggcgggagacaccgtgcagcgggtacgggcgaccattgaggaagaagccctgcttggcatcaaccgagaagctgcgcacgccgaagcgctggcggacttcatcgacaggctggccgtccttcatcaggcggacgacgcaggtgtacaggtaggggtcgcggatgccgtcccacaggtggggatactccatcgtcagggtggtgtcgccgcctttgccagccagcacttccctgccctcggcgtcgaggatggagatggcgacctcaccctcaccgctgaccctggtctcaacgcggatgtcagcgttggcgccctgcacggtcggggtgatctgcacgccggggccgccgaagtgatccagtgcgatgtgatccttgctgaccaccagcaggctgaccgtgcggtagatgccgccgtagaaggtgaagtcggctttctggggatagacaaagtcatttttgctgttgtcggcgatgacggtcagctcgttctgttctttcagcagagcggtgatgtccacccggaaggtggagaagccaccgtcgtggttggcaatctcggtgccgttcaggctgaccttggcgctgtcgcccaccccctcgaactgcagccagacctgctgggcagcggggtcaaaagcgggggccgcgaagctggttttataggtgcagctgccgcgccagtagtcgttgccgccatcctggccgtcgatgttgttccaggtatggggcaggtcgaccgtgacggttttgccatccgggccggtgaactgccagtttttcatcagcgtggtcgtgcttcgcatagcgtccctccgtagtgtgttttcgtctgctgtgtattgtacagaagaacgcagttttctgcaatgggtttgcgaaaagtggtacttttagtgggataatcggttttttatgacaaaaaattaacccctaattttgtgcaacttgtacaaaatcaggggtagtttttgtatttcgagtattttaaggcaataccgcataattctaagtgccgatacggcgagcgaggtgcggcagccgccggagcggtgcttaagccgttaggcgggaattgtgcggtgttgccttaagatttgggcggcggcagtacgatcttgaccgcgcttagtacattctggttctcggtggtcatagtgccgttgtatttctgcacgatgcggcgcatgactttcagctcgtagttatgctggcgggcggcccgggcaggggcctccgttacgacgggtgagatgatgttgatgaccgtgaagccctgccgcttacagaccagcaggtcgatcatccggcgcggctcgtccatctggcgggcggcggcatcgatggcctgatccagcgcattggagaagagggcgtacaggtcgcccggctccacaaaggccacagcactgccgtcggccacgcagttcagcgtgatgtgccgggcctcgcagtgcatgctcttttcggtcagcaccacgtccagcacctcgttgccggtgtcggcgttggcatcgtagcgctgcacggcgcgctcagcctcattcagatccttttcctgggctgcatcggggttcaggcggcgcaggtcagcgatctgtacctttaactcatggcattttcggttgatgatctgcacgttctgccgtgcgatctggtactgctggcgctggcgctcatacagcaggttcagggtgtccatttccttctgcattgccgattttttgaagagctcggtctgcagataaagcagcgtcaggcagtagagctgggtcaaaaatgcgggtgcaaccagtaccaggcccacgcccgtattttgcagtgtggacatcagcgcgaaaaactggaaaacgaacatgccgcccagcagacctgcgctgagcagctgccgcgggccgatacggtagaggccttcatcgggcatcagtcgcgcagcggtataccgcacaagaatacagacggcaagggtaaagccgatttgccccagcatcatggggatagtggccagggcaggctgctgcaggccggctttggccgcgccccaaatcagcaaacgccacaattcatagatagattccgacgtaagcacgatccaaacgctgcagtaagcgctggcagcggcgtccagcggggtacacaattttgtagaaatgctcacccacaaaaagaacccgccataaatcaccagcagcatcggggccgaggtgcgcccgctgttggcccaggtaatgacctgcgcaaagggtaccgtggccacaaaatccaaaagaaaccgcaggcggtagttttcccgtcgtttcagcggcagccaataggccatctgggccagccagatacaaagggcactggtcagcagcgttaccagcggggccactacagcgcacccccgacgtaagccgccacggcggccaaaaaggccacccgctggcggcggctgatttccagctgctcctgcccgatctgcacgaaatcattctgcacgccggtcacatggcgcaggttgaccagatagcactggttgcagcgggcaaagtggtagggggccagctctttctcggccttttgcaggctgccccgcaccgaccaggtatcggcagcggtgtggtagtgcagcaggcggtcgcgggtctccaggtacaaaatatcatcggtattcagcagctgcacaccgccgcccacctgcagggcaatttgcccgccacggcggcgctggatgcgctggagcgcccgctccagcttggtgctgaactggtagtagctgacgggcttaagcacgaagtccagggcatccacctcgtacccgcggatggcgtactgggccatgttggtgacgaacaccagcaccacatccggatccacctgccggatgcgttcggcggtaggcatgccgcccagggtgggcatctcgatgtccaggaagataatgtcaaagccgggacggtaggggtccacgatctcggccccatcggcaaaagcggtcacgtccagctggcggccgctttcccgggcatactgggcaataaatccgcaaagctgctcccgcatggcgtcgttgtcttccactacggcgattttagccattttgtatgcccccttccaggtaaacgtatataacagtattatggcaaatatgccggaaaaaagcaacactttttgctgcaaaaaatccgcctgccgaaacagacggaattttctaaatttaatgcggtgcgccgccgcccaattgcgggatggggcagtggcggatgtaccacgcgaagagcagcgaggagatgctccatgtgatggggtaggcccagaataccacgccgatggcatggataaaatgcagcgtgattgtaatgtaggtgatgcgcagcacgcaccagaccgccagcatgaccatcatgggcaccaccgggcggcccaggccgcgcaggatgcctgcacagcaatggctgaacgccagcaggcagtagaacagcgccgccgtgtgggcctgctggacgccgaaagcgataacgtccggctcgctgctgaaggctccgatgagccagggggacgccagatagatgcagacgcccacgacctcggccatggcgatggagcagaggatgccgaatttcatgcccttgcgcacgcggtccggctgacccgcgcctacgttctggctaacgaacgttgccagcgccatggcaaagcaggtcaccggcaggaaggcaaagccctccaccttactataagcaccgcagcccgccatggcgttggcaccaaaggagttgatgttggactgcacaatgacattggccagcgagatgaccgagttctggatgccggagggcaggccctgtacaatgacagccttgagggacggcccatcaaagcggacttcccgcgggcggacggcccattcttctttggagcgtatcagcttggagaacgccagcacggcgctgaccgtctgggaggcaatcgtggcaaatgccgctgcgccaacacccatgcggaaaacgccgatcaaaacaaggtccagcacgatattgatgatggaggccgcgatcaggtaccgcatagggctgcggctgtcgcccacagactgcaaaatactcgcacctacgttgtacataaccacagcaatgctgcccataaagtacatgcggaagtaggcgatggagttgaccagtacgttgtccggcgtgcccatccaacgcaagatctgcggagtaagcagcacacccaccaccgtaagcaccgcaccggcggccaggcccagggctaccgtagtgtggatggtgcggcgcatgcgctgccaatccttggcaccaaagtagcgggccaccacaacgcccgcgcccagcgacacgccgttgacaaagccggtcaagagaaagatcagactgccggaggagccgacagcggccagagcctcgccgcccaggaagttgccgacgatgagggagtcggctgcattgtacagctgttggaaaaggttgctgataaaaataggcagcgcaaacagcagcatgccttttgctacactgccctcggtcagggtcgttttcttttggggttccattctgtgtttcctacactccttctgttcgccatcgggtgacataaatgtattgtaacacttccttacgaggtatggcaagtttttggatacatattttatacaagatggcaaaagaccccgccatgccttgcggcgcagcggggtcttttgtttgaaaagaacattttgcagagcaaacgggaatggtgaaataagatcaagcggtctcctgcattttggccgtcagcttccgggcggcaaacacaagcgccacagcggcggcagccaacagggcagagccgatgtacccggccacgtaggagccggtggaatcgtagaaggtcgcgctaatcttggggccgacaaaggcgccgatgccgtagccgatgaagatcaggccgtagttgcggttgtagtacttgctgccgaacacgtttttgacgataggggcaaagaccaccagcagtccgccgaaggagaagcccaccaggcagatgcaggcgatgaagtaaggcagactcttggcaaccgtcagcatgcacatggagataccgttgaggaccaataccagaatcagggagttccagcccttgagcttatcatagataaagccgaagccgatacggccgcacatgttggccagcgtcatgatggaaacacacatggcggcagtcatggcgttctggccgatctggttctgggcaatgggcgaagtggcgctgaccatcatggtaccggcggcgttcgcaaagataaacatcacgaccatgacccagaataccggggtcttgaccatctgggggatgttgtagtttttggcattcagctcttttgcctgggtggcgctgggggtccagccttcgggcatccagccctccgggcagggcacgatcatccatgccacagcgccgacaccgatcaggaatacgaccgccaggatgcggcaggccatctgagcgccgtaggtatcgatgagccactgggcgatgggcgacatgatgaaggggccgcaggaagcgcccgcctggacaaggccggagatagaaccggccttatcggggaaccatttcagcgcagtgggcaggcaggccgggtagatcgtaccggcacctgcgccagccatgacgccgtagaacaggtatagctgcggaatggtagaggcaaaaccggtgaggaaccagccagcggcgaagaaaaccaggcccagatagatggctacacggggctggagcttttcggccagcaggccgcccacaaagcccatagcgcagtaaacgaacatataaatggtgtacgccatgctgaactgcgagctgctccagccaaactggccggtgagcggcagagcaaacaaactgaaaaaggcggtggcagaggtgaacaggctttggatccagacacctgcaaaaacacgccagcgcgttgcttttgtgatcgtcatagctgtcccccgttactgctgcagggtaccgagatccagccccaggtcacggccgctgaacttaccggcggcgcggctggtgcccagccagtagaccatatcggagatgtcggccacttccaggaagggcacaccgtcatacatttcctgccagttggcaaagttcatgccggtcaggtcgttgatgaactgcacgtagctgtcggtctcgcacatcggggtcttgaccttggtggggcagacagtgttgacgacgatgccggtgcctttcagctcctgggccagggtcttggtcaggccgcggacgccccacttggccatgcagtaggtggccagcttgggggtgccgtacatgccggaggtagaggaaatgttgatgatacggccaaatccctgctttcgcatgtagagggcggcgtacttatcagtgcgccaggtgccgatcaggtcaatgtcgatgaccttctgcacctgggcgtcggtcagctcccaggtatagccgaaattgatgacacctgcgttggcgacgacaacatcgatgcggccaaaggtctgccaggccttctcgaacaggttctgcatgtcctcgtccgaggtgatgttggcgcggacagccagtgccttggcgccggcggcctcgatctcggcgacagtctgcttgaaggtctcgccttcggggtcctgcatgtcggccaggacgacatcaaagccgttctcggcaaacttgagggcgtgggacttgccctgacccatagcaccgccggtgatcagtacaactttacgttccattgttttttcctcctctttttcgagatcgttacttttttcgcaacctcatttgactttattatagcgatgctgtatcataaatacaaatacaggttttctatcaaattcatccaaaaaatttattgg

SEQ ID NO: 7794 - DNA, 363 bp, Unknown
  gut microbiota DNA sequence
accaccatcgcaagcgttggtgtcatcacgcgccccacattcagggtctgcccatacagacatgaaaaaagccgggtggcgttgattccgacaatccagtcggctcgctcccggcataaagccgcctcatataaggcatcatattctgttcccggtctgagcttctgaaagccttcccggatagcactgtcctccattgatgaaatccaaagccgttccaccggctttttgcagccgcactgatggtaaaccagtcggaaaatcagttcgccctcacgccctgcatcggttgcacagatcagactctccacatctttccgctgcatgagctttttcaggattccgaactgctttttcgtgctg

SEQ ID NO: 7795 - DNA, 20978 bp, Unknown
  gut microbiota DNA sequence
tacaacaaccgcaggatcaaggcaaagctaaagggcttgccgcctgcaattcacagacagcaagccctctcggctgcttgaacaatttttacttcagaatattgtctaactttttggggtcacttcattttttcagatgcgggcttttatcaaatcatttccacagccagaacagcacggccagcagcaccgccagacccaccaggtaggcaccggcgatgagcagggtggccttcagagcgcccataacggcccagaatttctccttggcggtccattcgtcgggctgctcccaggggcggtcgttgaccggctccggggcagcggcaggcttgcggctatggggcagcagcatcggcgtggggccgatgccgctcatatcggcgatggtacggccatcgtcctcaaacgaatcgtgctttctcatttctcgtacaggtggcagaccacataatggccgggctcgacctcacactgtttgggggcttcggtcttgcagcgctcggtggcgtaggggcagcgggtgtggaacttacaacccgccggcgggttggccggggacggaatggaaccctgcagtacgatgcgctcccgcttgaccgtcgggtccgggatgggaatggccgagaacagcgccttggtgtaggggtgcagcggattggcaaagatgtcgtcggtctcgccgtactccaccaggttgcccaggtacataacgcccaccgtgtcagagatatgctcgacaacggacaggtcgtgggagatgaacaggtaggtcaggttgcgcttttcctgcaatgttttcagcaggttgatgatctgtgcctggatggacacgtccagtgcggagaccggttcgtcacagacaacgaactccgggttcagggccagggcgcgggcgatgcagatacgctggcgctggccgccggagaactcatgcggatagcgggtcttgtggtagggctgcaggccgcagtcgtccatgacctggtcgatataatcatcaaactcattcttcggtaccaggttatgctcgcgcacagcctcgccgatgatctcgccgacgggcagacggggggacaggctggagaacgggtcctggaagatgatctgcatcttggtgcgcagttcccgcagttcggcgctgttcatatcgtagacttctttgccgttgaacagcacctggccgccggtcttatcgccgctcaggcgcaggatggtgcggccggtggtggacttgccgcagccggactcgcccaccaggcccatggtgcagccgcggcgcaggttaaaggtaacgccgtccactgccttgacatggcccaccgtctgggacagcaggccgcccttgatggggaaatattttttgaggtggttgaccatcaggatgtactgagggtcataggtgacgggggtgtaatccattgcttcaggcattttctttgccatacgtcactcacccgcctttctgttttcttcgtagtagcggtagcagctgaccttatgggtgggggacaggctgatttcgcaggggtactcgccgctgcagcagggcagctgcatctcgcagcggtccttgaagtagcagtagtccggcatatcgaccgggttgggcaccttgccggggatagagtacaagcggtcgacctttttgccgacgaccggcttggaggccatcaggccgatggtgtaagggtggctgggatgggcgaagatctcctcgacggtgcccttctcgaccacgcggcccgcgtacatgacgacgacatagtccgccatctcggcaataacgcccaggtcatgggtgatgagcatgatagaggagttaatgcggtccttcaggttgcgcagcaggtccaaaatctgggcctggatggtcacgtccagcgcggtagtcggctcgtcagcaatgatgatcttggggttgcaggccagggccatggcgatcatgacgcgctggcgcataccgccggacagctcgtgagggtacatctcgtagacgccattgctgttggcgatgccaacggtctccagcatctcgatggtgcgcttcttgatgtcctccttggtcttgccttcaccctcgtgcagggcgatgacctcgtcgatctgggcgccgatgcggaataccgggttcagactggtcataggctcctggaagatcatcgagatatagttgccgcgcaggccctgcatcttatcggcgggggtcttggcgatgtcgtaagccttgccgccgcccaggttcaggcggatctcgccatccacgatctggccctgggggcgctgcagcagctgcatcagggacaggctggtaacggacttgccgcagccggactcacccacgacgccgaccgtcttgccgacgggcacctcgaaggagacgccgtcaacgcttttgaccacgccggtatcggtgaagaagtaggtgtgcaggttatcgaactcgaccgcgtttttctcatcgtgcatctggaccgtgtactcgctctccggcacgttgcggcgcttgcgttttttctcgtattgatcggtaatgcggcggttttctttggagatacgccgcgactctttggcggaaaggtatccgtcctgttttttagccatcgtgtgtttctccttccaatcagcgtttcatcttggggtcaaaggcgtcgcgcagaccgtcacccacaaagttgaagcccagaacggtgagcagcaggcagacaccggcggggatccagataaacaggtagttggtcataacgtaggcattgttgacatcgttgatgatgttgccccaggaggcaaacgggtatttgacgcccaggcccaggaaggacagggtggcttcggtcaggatggtggagccgagacccatggtgcaggtgacgatcagctgcgggatgacgttggggatcaggtggcggaagatacggtgccagacgttgatgccgcaggcctcggtagccagcatgaactcctgctcacgcagggaaaggatctggccgcggaccaggcgggcaatgctgggccagcccaggaagcccaaaatcagcatcaggtacatcatacgggtccaggagtccacgcgcatggcgtccatggcggcgccgatgatgataatgacgggcatcgagggaatgcagtagaacacgtcgaccacacgcatgatgatgttatcgacccagccgccgaagtagccggagatgccgcccatcaggatacccagggaggcttcgatgacaacgacgatgaagccgatgatcagcgagacgcggccgccgtacatcaggcgggtcagcatgtccatgccgttggtgtcggtgcccagccaatgctccttgctggggctggcgtaacggtcgtagacgtaggtctcggtcatctgcttgacgctccacaccttggtggaaggatcgtagacgatgtcgtactcggcctcgttgccgtcggcatcggtgtagttgaactcctcggcatcatcatcgatggcttcctgcaggcgctccttgaagtcgcgggtgatgacgatgctggaatcggcggcggagacgacgaagcggctgacatagcccagtgtctcgccgccggcggtgatgttgccgtcctcgtccagggcgtagtccacgccgttggcggcgaactcttcctcgccattggccatagcggtcagggcggcaagcttggtctcgaagttaaacttatccgcgccgtcagtctcattgaccaggtcacggctggcgtaccccataacagtattgcccttgtaaacaacgtagaaatcgtcgttcaccaggtcgagggtgtagtccacatctttataggtgaactcggtctcgccttttttggaggcttccagcgccttgctctgggcgatagagccaaagtcctggccgtcagccacgacaaagcgcatggtgtcgttgcgggtcacgcccacatactctttggacatctgggtgtaggtgaagaactgctcgtcctggccgtaggggctgacaaggccgccaatgaaagagaagacgaacatagcaaccaaaatggacaggcccacaacggccagccggttgcggaagaaccgcttggcaaccagtgcgccgggggaaagtaccttgacgcggcggtcatcgttcagggagtactgctcctgctgggggttctggttctgggtgttttcactcatgggtgtgcagtctcctttcttaagaaatgcgtacgcgcgggtcgaccacgccgtacaggatgtctgtcagcaggttgctggccagggtcagcactgccataaaggacaggtagaacatcgtaaagggaatatcgcctgcgaccatcgactggtaagaaatgtagccgatgccggggatggagaacagcgtctcggtgatcagtgcaccgctgaacaggccgggcaggctaccgccaatgatggtgaccagcgggatcagcgtgttgcggaaggcgtgcttatagataacggtatgttccgacaggcccttggcgcgggcggtgcggatgtagtcagcgttcagcacttccagcatattggtgcgggtgtagcgcatgtagccgccgatggaaacgatgaccagcgtggcgataggcagcaccaggtggttggccttatccaggaactggcccatcgagtccagctgggcatagtcacgccctaccagaccgtacaggtcaaaccagcccagcttgaccgagaacagcagcttgagcagcgtagcaaagaagaaagtgggcagagagatgccgaccagtgcggccgcggtaataacgtagtcggtacggctgtactgcttggtggcagccagcacgcccaggggcacggcaatgatgatggacagcacaaaggagatgccgcccataataacggacaggccgaccacttcctggaatttctgggtagcagggacattccacttccagctgtcgccaaagttgccgacgatggccttggacagccaggtgaagaagccgggcacaatgtccagatccaggccgtaggaggcattcagctgggccagccattcctcatagggtttggcaccgggtgcctgggccagctgcattgccatcgtctcggcaaaagagctgggcaggcagcggatcagcgcgtagataatgaacatgacacagaacaggatcaataccgattgcgcgatacgcttgatgatgtaatttcgcacgggtgtttcgttccttccttgcacggcggggccgcgtttgtttttatgcagggatttttgcagggatatgccggaatatgggcatccccgtcccccgcaagggctgaccccctgcgggggagtgggacaaccatattatggccgaatgtgcatagtatggctgtttttgtatccaaactgcttgaataagtttagacacagcaaccgttccggcgttataaagcgccggaacggtcgctatttattgctgtttaagcagaacgcagggtgaacttaactcagttcagctcggtgttgttcagctcagacttgtaggtccagtacggggtcatgtccttagcgatggtgtcgatgttgacacgctcggtggagaagatggtagcctcgctgcgctggtagacgggcagctcaacgccccaatccaggatgatctccatagcctctttgtacatggccttacgggcttcctggtcggtggtctggcgggcagccataatcagctcgtccagatcggcatcatcgatgttgtagtagttggtggaaccgctgctatggtacagctggtacatgtcggggtcgttggtggactgccaggcagcaacccagccctcggcagcgccggactggtaggaagcgtacaggtcagaagcgttggccatatcgttgacagtcagggtgaagccgatggtcttcagggcggctgccgcgttggtcagggtctggaaggtggggtggtcgccgttgccgccggcaccgatgttgacctgatactccatcttggcaccggcaggagcagcggtaacctgaccgttctcgacggtgtagccggcagcctcgaagtagcccagggcggcctgcagggcagcctggtacttgtcctcgctgctcatgtcagaggtgtagatgtcgttgccgtccacgtcggtggagtaagcaaccttgtagccgtcatcggtaacggaaggagcggcccaggaagtgttggagatggggtagttgataacggtagcggtgtcgccgtagtaagagtcgatgccctcatcacggtaagcagccacaacggtcatgatggccttgcgcaggtccttggaagcctcggaagcggggtcgccgccaacattgacgttcttggcgctcagggcgatgtagccgtagccgcggaagtccttcagacgggtggtgatgacggggccatcctcgccctcgacgccgttgatgtcggcgatctggtcagcaacttccagagagtaggaaggatcggaaatgtcgatggtgccagcctgaacgccggtgatcttatcggcctcctgggtctccttcatgttgacgtgagcgatcttgggtgcgccgtcaaagtagtcggggttggcatccaggtaaacaacgccgtcgctgtacttgttgaaggtgaacataccgccgcccagaggagcgctggtcttggagcggacaccgctcaggtcacccttgacaaagccgaaggagttgttgtcgtagtcatacagggaagcatcaccatagtagtgcagaggagcaatgggcatctgcagctgatagatcatggtggtggacagctcggtggtggtcagggtcatgctgtagtcgctggtcttaacgataccggcaacattgggcacgtcgttgccaacggtgacaccagtggtggagtagttgtaaacttcctcggggatcaggtcagacagggcagagccagcagtctcggcttccatagcggagaagttccagtcgtactgggcgccgatagccaggaagaaatccttagcggtagcgccatcggccaggtcgaagccccagccggcagcagcggaggcaacatcggtagctccgccgttctcggtcatgtagtcaacgatctcctgggcgaacttcacgccgccgtcgttgacagcgtcccagaaagccttctgctggtcagcagtgaagtaagtattgtcggtgttatcctcgccagcctcagcgatcagcttagacagggtggacatggagttgcggtactcctccaggccaacgatgggggtggagtacatggtaacagagccatcgtaagtaggatcgaggaaaacatacatagagaagatgacatcatcgatggtgacaggctcgccgtcagagaacttcaggtcgtcacgcagtttcaggtcataggtaacggtgccgtcgtcattctcggtgacaacgcagtcagaggtgccgtggtaggtgtagtcggtgccattgtactcgcgggtctcgccctcgatgccgttcaggatcatttcgcccttacggtcggcgcccagcaggccgagctgggtcaggtcgatgacatcctggtcagaggcagaagcggcgaagaaggggctgaatttgccctcaaagccggtctctgccaggacgagggtgccgtcgctggtggaagtggtagcctcggccgtggcagtgctggtagcttcgctggatgcagcggaggaagcggagctgccgcagccggccagcatgctcaggctcagggccgcagcagatgccagcgcaatggcttgctttgcgtttttcatgtgtacaaaacctcctaaaatttgccctatcggcaagtcattatggccgctggggagtggccataacgggaaagggaattccctttccgatgactgtgtattcatacagtgtgcacttgtcgataatggcttatcttatatagtacctgagattgcgtaaaatgtcaacttaaaagtgctatttttgtggcatttacctaaatttgtgatattttttttggcaaagaaaggtcttgattttattgtgccccgtaccaaaaagcgagcagctgcacagctgcccgctttttttcacattgctacatattatatttatcaataattctgtataattattcctgcttttcgtactttagcgctttaaattgatggttttccattgcaaaggcaccggctgctgctgcctgcagcaggataaacaggatacgcgcaggcaggttttgcctgctgaccgccagctgtaccagctgggcggcagctgtaattccggcaagtacagccgccagcgtgcagctgcccggcagtttcagaacggtctgctcatgaatatacgcccgcagcggttcccccgcggcggtcagccgcaccagcaggtagacggcatacaccgccgccagcagacccgccatatagggcagcagcagccagaacggcgcataggcggtcgcgccgggcaccaggcccgccgccactaccagcgcggccccaccgccgcacaagacccaaagcccggccagtgcccggccgcgggattttgtacctttataatggtagtgcgcgccgcggtactggtagttgccgttcaggtctttttcaaagtcgtccagataggcgcgcttctttttgcggtccgccattattccagccccgtcaggtcgtagtggtccagccaatccttggcggtctcgcagacgccgcgcaggcagctttcctcaaaggggctgaccaggtcggcgtttttcagcagctcggtaaacacacggctgccgccctggcgggtgtaggccatgtagtggtcccatgcgttggcgcagtccttctgcatcagcgcccagatctgcaggctgacggtctgcgccaggcagtagtcaatgtagtagaacgggctctggtagatgtgcatctggcgctgccagtactcgcccgcaccatagaaggggatctcgccgtccaggcgcatccagggctggtagatggcggccagctccttccaggtctcgtggcgctgggccggggtcatatccggcttttcgtagacgatatgctggaagtggtccaccatcgtgccgtaggggatgaaggtcagcgccccggccagatggctgtagcggaacttgcgggcatccttgccaaagaagccctcggcccagggccaggccaggaactccatcgacatcgaatggacctcacagccctccatgctgggccatacggtggagtaggggatgcgcttgcggttcatataggcggcaaaggcgtggccggcctcgtgggtgacgacctcgacatcgtgctgggtgccgttgaagttggcaaaaatgaacggcacttcgtaatcatccaggctggtgcagtagccgccgcccgccttgccgggggtggagagcaggtccatcagctggtcgtccagcatcttgtggaagaactcggcggtttcgggggacagctcctcgtagaactttttgccttgagccacgatggcatcggcatcaccgcagggtttggggttgccgctgcggaacatcagggcgttgtcggcggcgttcatcgggtactgcttgcccaggcgcctggcctgctcgcggtagatgctgtcggccacggggacgagatatttcaccacagcagcgcggaatttttccacatcagccttggtgtagcagttgcggcccatgcggtagtagcccagggtagtgtagccttcgtaccccagttttttgcccatggtgtcccgcaggtggaccatcttgtcgtaaatggagtcgaactcctcctgatgctccttataccaagcaccctcggctttccaggcggccaagcggcgggcatcgtcggggtcgtttttgaagggagagagctggcttagggtgtagacgccaccctcaaaggggatctgagccgaggcgatcagcttgccgtactgggtggagaggtcgttttcctgggccatctcgtccaggatctccggcgagaaggctttctgggcgatctcggcgttgaggaacatcagctcgccgtattcctcgcccagctgtttgcggtagggggacgccagcagggcggcgctccaggtattctggcactcctggatctgcggggtggcagcgttccagaaattcatctcatcatcgtagaattcatcccgggtatcgatggtgttgcggatgctggccaggttggccagcgtgtccacgtgcttgttcagggtctgttcgtccagaaaggcggccttggcggcggcgtagtcaggcgcggcggcaaagcgctgggtcacagcagcaaactgcgccttgatctcgtccaggttcgggcgctgatagggcatctcagaaaatttcatgagcgtatttctcctttgtgcgttttgtaggcattataacatagaaacgaaaaaaaggcaaagatataaatagatacaaaaaagcctcccttgtgcaaagggaggtggcacggcaaagtcgtgacggagggattgtaaccttacgtggtagaccgatttgcaacgcagacaggacaatccccaccacttcgcggagccccctttacacaagggggtctttatgcgtcgttaaatcctgcggtatctccgcttcaaattctgcagcagcgtatgcttgggccggctgcggatcaatttccacaaaaagctgctcaacgcgcgctccttgcaggcatcgagagcctggccgccgtagacgcaacgctccagcagggcgcaggtagagtgccttttcctgctcggtggtgacggtaatcatattacgcttacgtataacatccggtccgtgatcccgcaacagaaaatctgcatttttcgctactttgtcttatacttcgccagttgtgcacatgtgttggaatttaacaatgccactttttagcaagttgccgcaaattttgaaaacgcacggttttcatgttttgcaaaacgccaatttatgcccacacaagcaattcaaaattgaccacagtaactgttatatggtagaatatgtctatatattatatgctgcaccagtgccatttttaggagggccttatgcagaaaaatttcaccctaaaacgtatcgtctgcctcctggcagccctttgcctggccgccgggctggtgggctgcgccgatatgcccgccagcagcagtgaggaaagcagcctgcccacgattttggtgggcagcgatgtctacccaccctttaactatattggcgaggacggcgcccccaccggcatcgatgtggagcttgccaaagaggcattccggcgcatgggctaccgcgccgagtttaccatcatcgactgggagcgaaagacccagctgctggaaaccggcgacattgactgcgtgtggggcagctttaccatcaacggacgggaggatgactaccgctgggccggcccctacatggccagccgccaggtggtggccgtaatgcccggcagcgatattgaaaccattgccgacctggagggccgcaccctggctgtgcagagcaccaccaagccggaggaactgtttctgaccgacgcctccctgcccgccctgcgggacctctactgctttgaggaccgggagctgatctacaccgccctgggcaagggctacgtggacgccatcgccgcccacgaagtctcgatcctgcagtacatgcaggactacaacactgagtaccgcattttggacgagcctttacaagtggtgggtctgggcgtcgcctttggcaaaaacgacgtgcgcgggctggaaacgcagctgaccgccaccctcgatgagatgcgggcggatgggactttagccgccatcatcggcaagtatctggcaaaccccgagaaatttttggaggtggacggccttgtcgaatagaaaagtatcttccttcaccgtccgctttttctggcccctgatgctctgcctggggctggggctgatggcgctggtggggctgatgtcctaccgcagtgacctgtacctggccagccagaacctcaccgatgccacccagtacgtcaaacagcagcgtacagcctacgaccggttcaacgatacctcgatgaccaaaagcctgctgcgcgtcatcgagaacgcccagcagatcgaccgcgagattcagtacaagattgccctgaccggcgaggccacgctgaacaccgacgatctgcgccgctatacctacgagcagcggctgaccggcatcatcctgatgaacgagcatggcgtcgtccagcgggagtacagcactgacgggctggactacgccgccctgcgcgggtacgtcaccatggacaccgtgctgggaaccgcccaattccccattaagacctacaccgcccgcatccggctggacgatggctcctacgtggacctggctgcccacggccgcaccgacgagccgggcgtgatcgtcgtttattatcatacccgcgccgaatatgccaccgactacaacctgatcatccagaacttgctggaaggctacgaccccggcaccgaggaaacgctggtggtcaccagcggcgacagcatcattgccgccaaccacgaaggcctggccgggcagaacgtcgacgacgtgccggtgctgcgcagcatccgggagaacgcccacggcggcgagatgacccgcgtgcgggccggttccggcgacggcgagtgggtctactgcatgctggagcgcgggcgggactactacgtctacgcctacatgccgctgacccgcgcgctggacaccacgcccaagaacctgctgttcacgctggtggcctacgccatggtgctgttcatcgtcatcatgatccgctggcggctcaagcatggctaccaggaggagcagctccgccgggagcagagctaccagcagcagttgaaagacgccgcccgcaaagccgagagcgccaaccgcgccaagaccgagtttttgcagcgcatgagccacgacatccgcacacccatcaacggcatccgcggcatggtggagatcggcgaccattacagcgaggacctggccaaacaggctgagtgccgccgcaagatctgggatgcttcgactctgctgctggagctggtgaacgaagtgctggacatgggcaaactggaatccggcgagatcgtgctggaaagctgcccgttcaacgtgatagagctaaaagacggcatccgccagacgatggagcgcgccgccgccgagcgcggcatcacgatgaccgaccgcaccgaggtcaaacacaccacactcattggcagcccgctgcacctgaagcggctgctgatgaacatttggagcaacgccatcaagtacaacaaggacaacggttccattgacctgacctgccgcgaggtgcgcagcgacggcaagattgcctggatcgagtttatctgcgccgacaccggtattggcatgagtgaggagttccagaagcacctctacgagccgttcacccaggaacacagcgacgcccgcacctcctacaacggcacgggactgggcatggccatcacaaaaagtctggtggagaagatgggcggaacgatagaatgccgcagtaagctaggggagggcacgacctactgcatcacgattccctttgccatcgactccagcgctgccccgcgggtagaggaaaccgccgccctgcctgccgccacgccggagggcatgcacgtactgctggccgaggacaacgagctgaacatagagattgccgtgtttgtgctggagaacgccggtgtcacggtgacaaaggccgtcaacgggcaggacgcgctggaccagtttgccgccagcgcccccggcacctttgatgccatcatcatggacgtgatgatgccggtgatggacggctaccaggccacccgggccatccgccagctggaccgccccgacgcgggcagcatccccatcctggccatgactgccaacgcctttgtggaagaccgccgccgtgcctacgaagccggcatgaacgagcacctgaccaaaccgctggagccggaggtagtgctgaggacattggcgaaatatcggagtaaataagcaggaaggccccctcacagagggagcctttaacgcaaaaaagccgcacatctgtgcggcttttttgcgtattatcattatttagtcccggctatacaaatctctcgtatacaccttcccggccacgtcggccagctcgggggcggcgcggttggcgaggatcacatcacactcggccttgaatttgtccagatctttctccacgcggtcgccgtagaaagtatcctctttcaacgtcggctcatagataaccagcggcatgccctcggcccgcaggcggcgcataacgccctggatgctggactggcggaagttatcactgcccgccttcatcgtcaggcggtagatgccgacggccttcggctcgcgggagagcacctgttcggcaataaagtccatgcgggtggcgttggagtccacgatggcctgcatcagattctgcggtacatcgttatagtttgccagcagctgcttggtatccttgggcaggcagtagccgccgtaaccaaaggacggattgttatagtggttgccgatgcgcgggtccaggcagacgccgtcaatgatgtcacgggtgttcaggccgcgcacctgggcgtaggtgtccagctcgttaaaataggccacacgcagggccaggtaggtgttggcaaacagcttgatggcctcggcctcggtcaggcccgggaagagggtatccacattctgcttgatggccccctgctgcaaaagccccgcaaaggtatgggcacgggcggcaagttccccgtcccccgccgggcagcctaccacgatgcggctggggtagaggttatcgtacagcgcatggccctcccgcaaaaactccgggctgaaaaggatatgcaggttgtggaattttttccgtaccgacgcggtatacccgacgggcaccgtggatttgatgacgatggtcgcctccggcgcatactgcccggctagcgtcagcacagcctccacgctggaggtatcaaaataattcttcttggggtcgtagttggtgggggtggaaaccacgatgatgtccgcgccggtgtaggcagcggcagcatcggtggtcgggtgcaggtccagctctttttcggctaaatactgctcgatctccttatcggcaatgggacttttgcgggccgccagcagggccactttctcgggcagaatgtctacagcccatacctcgttgtgctgggccagcagcacactgatgctaaggcccacataaccggtacctgcaacggcgattttcataaacaggcgctcccttaacagtgatatttattgtaagtataccatggtgcggggccagccgcaacggtttttaccggatttccttttctgtcctcttgtaccccggcccaaaatgcgatataatacctatgtttactttgagttttgagtatccccacggaggtttattaaaatatgaaacgtacccgtacccttgccctgctgaccgcgctggtctgcctgtgtgtgtcgctgacggcctgttcccccaaagaagtgctgaaaagcgccatcctgaaaaccaccactgccctgggtctgcgccaggaaaccagcgatgaggacgaggtcgacgatctgacttacgccaccagcggcggcgacgtgaccttccccgaaacgatggacaccactgcctccaagctggtgtccgaggtggacggcgacaccctgtatgtagcctttaacggcatccagaaccgcagtaccgactactttgtggcgggttccgacagcctgtccatcaccggctatgccaccactgagtccaccaacgagaacttccagactttcaagatcgccttgtgggagctgtccgacgacaagacttccaccagctatgtcatcggctccaccgtttactacaccaccgacggcacctgctaccagtacaatgtttccggcctgacccccggcaagcagtacaaggtctacatcagctatgactccacccgttactatatcaccggcgggctgaaggtccagggcctgggcagcgaggagctgaccaccatcgagaacgagaacaccgtccagtaaccacaaaacagcaccgcccgcgccgcgccaagacggtgtgggcggttttgttgtagaggaatttttagagggaaaagtaacgtaaaaggggaagtttatgccaaacgtacaattacgcaataccctgctgctgatgggggcttccttcatctggggcaccgcttttgtggcgcaaagcgtgggcgctgaccacatgggcccttacagctttctggcgggccgcagctggctggcctgtgtgtttctgctggggctgatggccgtgctgcgcaaagccggcaagaccaactccgccgccgagccgggcttttggcagaaccgcaaggtgctggtaaagggcggcatctgctgcggcatcgcgctgtttgcggcatcggctgcgcagcagatgggcattggcaccaccagcacagccaaggccgggttcatgaccgccttgtatgtagtgctggtgccggtgttcggcgtgttttttggccgccgccccggtgtaaagctgtggtgctgcgtggccgccagcgtggtgggcctgtatctgctgtgcctggccgggcacgacagcctggccctgaccggcggcgaatggcagctgctgggctgtgcctttttatttgctacccagattttgctggtggaccacttcagccccaagctggacggcatccagctgagctttgtgcagtttttgacggtggcggtcatttccaccgtgtttatgctgatttttgaacagcccaccatcgagcagttccgcctggcggcggtggccatcgcctactgcggcatcatgtccagcggcgtggcctacacactgcaaattgtgggccagaaagcgctggaccccaccattgccagtttggctatgtgcttggagagtgtgttcagtgccttggccggttggctgattttgggcgagacgctttccaccaccgagctgtgcggctgcggcctgatgtttgccgccatcgtagccagccagctgccggacaaaaagaaagtttaagtaaaggccccctctgcgagaggactcccgcgaagcgggtggggtagagactttcccaaggcgctctctctcagtcgcctccggcggcagttccctcccagagggggcctttaatgggagcatctatgaatgacttgcgcttaattttccgctatggcaagccctaccgccgggacctttgggcggctgccgggctgatctttattgaatgtatctttgagatggtcatccccgtgctgatgtccaccctggtggacgagggtgtgcccagccataacatggcgatcatcctgcggcagggcgggttgatggcactctgcgcggtgctggcactgatcaccggcctgctgtatgcccgctatgccgcccggttcgccaacggctttgcggccgagctgcgcctggccgagtacgccgccgtgcagaaattcgactttgccaacctggaccatttttcctctgcgtccctcgtcacccgcatgaccaccgacgccaccgtgctgctcaacgccatcaacgcaggcctgcgcccctttgtgcgcagcccggtcatgctggccatgggtctgggcatggcatttctgctcagccccaagctgacgattgttttcctcatcacaacgcctattctgaccattttgctgacgctcatcgtgtgcaaggtcggcccgctgtacggccgccagcaaagcgctgtcgaccacctgaacagccgcatccaggaatccctcaccgccatccgcgccattaaagcgttcgtgcgcggcgattatgaaaacgagcagttcaacgccgtcaacactgagctgagcgacgccagcaccgagaccttccgttacgctgtgctcaacctgcccgcgttccagaccatcatgtacacagccatcgtctgcatcatgtggtttggcggcgggttcatcctgcagggcgacatgagcgtcggccagctgaccgcctttttgagctacgttttgcaggtgctcaactcggtcatgatgttctccggcgcgtttttgcagatgacccgctcgctggccagcgcccgccgcatccgcgaggtgctgaccgagcagcccgacctggccaatgccgccgatccgttggagactgtgccgaacggtcagatcgacttcgagggcgtcagcttcaagtataacgctgcggcacaaaaaagtgccctgtccgacattacgctgcacatccccgccggggcgaccgtgggcatcatcggcggcaccggctcggccaagaccacgctggtccagctgatcccccgcctgtacgacgccaccgagggcaccgtgaaggtcggcggccacgacgtgcgggactacgacctgaccgccctgcgggacgccgtaggcattgtgctgcaaaagaacctgctgttctccggcaccatccgggacaacctgaagtggggcaaccccgacgccgccgaggaacagctgtgggccgcctgccgcgccgctcacgccgatgaatttttggaccgcatgcccgacggcctggataccgacttagggcagggcggcgtcaacgtctccggtgggcagaagcagcgcctttgcattgcccgtaccctgctgaagcacccgaaggtgctgattttcgacgactccaccagcgccgtggatactgccaccgagtccggcatccgccgcgccctggccgaactgaccgacgtgaccaagctgattatcgcccagcgcatttcctcggtacagagcgccgacctcatcgtaatcttggaggatggccgcctgcacgccgtgggcacccacgccgaacttctggaaaaagatacgatctatcaggaaatctactattcccagatgaagggaggcgaccccgatggcgagtaaaaagaaagtcaccggcggcaagcgcccgcagaacctgcgccgcacgctgggacagttcagcgcctatctgggccgccaccgcatcatgatcggcctggtggcgctgctggcggccatcagcgccctggccgcactgtttggcacctacatgatccgcccggtagtcaacggcctgctggaaaacggcagcaaagcctacctggccggggccgtgggccttaccgcctgtatttatatcattggtgcgctgtccaccctgggctatacccagctgatggtgcgcgccgcgcaaaaagtactgcaggagatccgccaggatctgtttgcccacctgcagacccagccgctgcagtactttgatacccaccgcaacggcgatttgatgagccttttcaccaacgatgtggacaccatctccgatgcactgaacaacagctttgctgtcgttatccagacctttatccaggtcgtgggcaccctgctgatgctgtttatcctcaactggcggctctctctgctggtggcggtgggttatgtgggcatgttctggtacatcaacttttccacccagcacagccgtacctactatgccaagcagcaaagcagcctgggcgagctggacgcttacattgaggaaatgatcgccgggcagaaggtcgtgaaggtgttcaaccaccaaaaggccgacctggccgagtttgccgcccgtaacgaaaagctgcgcctggccggcaccggcgcgcaaagctatgctgccacgatggtgcccgccgtcgtcagcatcggctacatcaactacgcggtcatcgctgtgctgggcggcctgatggtcatgaagggctggaccgacctgggcagcctggccagctatctggtgtttgtgcgccagaccaccctgcccatcaaccagtttacccagcagggcaacttcctgctggcggcgctggccggtgccgagcgtatttttgccgccatggagcagccgcccgaagtggacgagggcacggtagagttggtgaacgtgcgggagaacgccaacggcaccctgaccgcctgccccgaggtcaccggccgctgggcctggcgggattccgcccacccggacgtagcgctggagccattgcgcggcgacgtgcggttccataacgtcagcttcggctacacgccggagcggctgattttgcaggacctttcgctgtacgccaagccggggcaaaagattgcctttgtcggctccacaggcgcgggcaagacgacgatcactaacctgatcaaccgtttttacgatgtcaccgccgggtccatcacctacgacggaatcgatgtgcgactcatccgcaaaaacgcgctgcgctcgtccctgggcattgtgctgcaggacacccacctgtttaccggcaccgtggcggacaacatccgctttggcaagctggatgccacgcagaaggaaatcgagaaagccgcaaagattgccaacgccgactccttcatccgccgcctgccccagggatacgacacgatggtcacctccgacggtgccaatctgagccagggccagcgccagctgctggccattgcccgtgccgccgtagccgacccgccagtgctgattttggatgaagccacatccagcatcgatacccgcaccgaggcgctgattgaaaaaggcatggacggcctgatggagggccgcacggtgtttgtcatcgcacaccggctttccaccgtgcgcaacgccgatgcaattattgtgctggaacacggccgcatcgtagaacgcggcacccacgatgaactgctggcccaaaaaggcgagtattaccagctgtaccacggcatgtttgaactgtcgtaaacggacgcggcggtggtttctccagctttcccagcttttggaacacgccgcggccacgaggcccggatttttgaaaaaaattctgcaaacctgttgacatatgtccacggttgtgctattatactatagcactctgaagcacggaacatatatcgcggggtagagcagatggtagctcgtcgggctcataacccggaggtcgcaggttcaagtcctg

SEQ ID NO: 7796 - DNA, 25978 bp, Unknown
  gut microbiota DNA sequence
aataggtagatgccgacttctcttttaagcaaagcgccttatcccgcaaggggtagggcgcttttgctctttgtttcgtgatttgtgataggagatatggagatagtagggacgcacactatgcgtccgcatagcgagtgacaacgcaaatccgcaggtgaacaatgttcgtcccgacgatgtgcaattacgaaaaatgacatctattttaccgtgaatctctttacaatataaaattgccgatttataataatggcaatgtacgtgctgcataatttctccgagtttcacatttttgggctgccgaggtatctggaatctgcctggctttcaaatgtgggcagggctttgctttgccaaaatggaggaatacgacgatgattcgtaatacagccgttactgtatgtggcccgctaaatgtaaacaaattgggcgttacctatgtgcatgagcacctgatagtaaaaccccagctgccggatgagtattatatcccttatacgctggatgacgaggcggcttcgacggaggaaacccgcagtttttccgcagcggggggtgagaccctggtagagatgacgccgatcaactacggccgcaacgtaaaggcctatcagcgcattgcgcaggctaccggtgtgcatgtcatctgctgcacaggcttccacaagcagctgtttatgccgccttggtttggcgataaaaccgacggtgagctgtatgatattctgatggacgaagtgacgaatggcctggatgacaccgaaatccacccgggtgttatcaagctgggcaccagctttgaggaagtgaccgccgccgaaaagcgctccatcgaggcagtggcccgcgtacaccgcgacacgggcatccccatcagcacccactgcgacaagggcacaatgggcatggaccagctgcgcctgctggaaaaacacggtgtcgatccgaagaatgtgctgctgtgccacattgacagcaagatggatacggactatgccatccggctttgccgcgagggcgctaccatttgcctggaccatgttggccgagaactgcaggatcacgattcctatcgcgtgcggatgatcacggcgctggtggaggccggctgcgtagaccacgtgaccctggccggcgatatgggcaaaaagaactatctgcctgcctacggtggtaagcccggcttcacctatatcctgaccgacctgaaggcggaactgctgccttacatcggcgaagaaaacttccacaaaatgatggtagagaaccccaaacgaattttcgcctggaaatataacgactaacatagaaaaaggaggggcagcaatggccactctgactgaactgatccgacaggaagaccccaaacgcccctataccgatgaacaactggcccagatgttgcagctgcgccgcgaacaggtagtggaactgcggcggatcaacggcattcctaactcctggatgcggctgcgcccggcgctggtggtagagatgcagaaacttctggagcaggagccggggctttcggatcggtcgctgaccctgcggctgaacgcgatgggctacaatgtgtcgcgctatctggtaaaggaactgcacagcaatttgccagaaaaagaagccgagccgcagcctgaaccggccgtagaaatcaccacgcaagaggagaccgagggcaccaacgtgtttgccgggatgattggctacgacggcggcctgaaagcgcagatccatcaggcgaaagcggcggtatcttatccacccaacggcctgcacacactcattattggtccgtctggttccggcaaaacgtttctggcagagaatatgtaccactatgcggtgcagcagggcctgctggcgccggatgccccctttgtctccttcaactgcgccgattacgccgacaacccgcagctgctgaacagccagttgtttggctatgtgcgcggcgcgttcagcggcgccaacgccactaaggacggcctggtgcagaaggcagacggcggcatcctgtttttggatgagatccaccgtctgtccggggaagggcaggaaatgcttttctacctgctggacaagggcagctaccgccgactgggcgattccggcccggcacgtaaggtcaatgtgcggctgatcgccgctaccacctcttcgccggagtcggccctgctgctgacgttccgccgccgtatccccatcgtcatctcgatgcccggcatcgctgaccgcccgatggcggagcggtttgccgtgctgcaaagcatctttgcgggggagtacaagaagatcgaccgcaagctggtggtggaacgggaggccgtgcgcatcttattgcaatatgattgtcccggcaacatcggccagatgcagagcgacatccaggtctgctgcgccaacgcgtttttggagagcgtctccaagcaggaagacaccgtttacatccgtgccgaactggtgcagcagttgatctcggcgggcagcctgacccgttcgctggaagtggaaagctattatgatcggcagctggtcttcccgcaggtggaggacgacgccagtcaaacgctggataaaatgtactaccgactgaaagaaattgccgaggaagactgcacgcctgaagcgcggatgaaagccctgcagaccgtactactgggccgtgtgctgccgcagaacaacctgcacaataacaacacggcgaaatcgctggagcaggagcggcaggaagtgcgcaaggtcgtgctggctgtgctggccgagatgcgggacagcctgaattcctgccgcaaggattttgaggacgcgttagtgctcagcctgaccacggatgtgccccaaaacgccaacgccatcggcttctccatgggctgggacgagcccaacgagcgggtgttggagcgcgccatccgtctggtccaacaggtggatgaggggctgggctgcctgctgctggtggatatgggttcgctggcgtcctttgcgccggagatttccctgcgcaccggtgtcagcgtgcggtgcgtggcccgcgtggatacgctgatggcgctggacgccgtgaaccgggccagcttccgggataaatgcacgctggatgaactagcggatgcgctggaaatcggtcgtctgcacgccggattctccgatctggagcagcgtaccggtaagccgtctgcgatcctgacggtctgcatcaccggcgagggttacgcccgccgcatagagagcttcttgaaagccaccgtggtggagtgcagcgacatcaaaattgtggatgtgggcctgctgaaccgcgatgctatgttggcccgcgtggaagaactgcgccgggactacgacatcgtggccgcagtgggcaccatcaacccggaactgccgggcattccgtttttgccgatgaactacatcttctctggccgcggctcgatggcgctgacaaacctgctggaggcccactgccagcacaacagcggcatcggcgatctgctggacccgcagctgatcctttgcgatgcggatttccaggacaagaatgatgcgctggacaccatgtgcacgatgctgatggagaaaggctgcgtcaagccggaatttttgctgagcgtctacaagcgggagaacttaggcgtaacctgcctgccggggcatattgccatcccccacggcgagcctgcctacgtcacaaaacctgccatctgcgtcaccaaaatctgccatccgttggactgggcgggcggatttgtggctgaaattgtttttttgtttgcgttggacgaaaaatgccagggatttgtacaaaatttctgcgatattattaaagacgaaaacaacgtaaagaagttattatctgcaaaaaatgccaaggagatctacgatttcctaaaataggatcaaattctgccagaaagttggcacgtaacttgctacatatatgggtgtaagggttccagatcccttgcacccatatttttgtattggagcaaatgcagcactacggtacaagagaaaaggaggtgaactacacagatggctatgcgagatattcttttccctgaatgtgtgattacacacatgaaagcaaaaagtaaagaggatgctctgcaccagctgtatgaagttcttttgaaaaacgggaaggtaaagaccagcttttacgatgctgtcttggagcgtgagcgcgattaccccaccggccttgaactggaagagtacaatgcagcaattcctcatgtggtcccggctcatgttgaacattctgccatgggcattgcgatcctggatacgcccgttacgttccagcgcatggatgacgatgaagccacggtggacgtcaatgtgatcttcaacattgcattggatgttaacggcaagcagatcgacatcctgcaggagatcatggcgatcctggcggacaaggacgtgatggggcagttggtcaaggccgacaccccgcaagatgttatgaacattttaaagaaagaaggatgatttcttatgaaaaagattatggtttgctgtggttcttccatgatcacctctaccatcgctattaacaagctgaagaccgctatggccaacgctggcattgatgtcaagttcattcagtgcaagttcgccgaggtccagggcaaagtcaaggtcgagcgccccgacgttatcgtgcccaccggcgcactgaaggacagcctgaccgattccgttcccgttgtgcgcggcacctgcttcgtgaccggcgttggcgagaaagaggccatcgacgagatcatcaagatcctgcgcggctgattgcagaaagaaataggaaagcgcggcggtaccactgcccctgaaatggccgctgcaaaattataaaaccggaggagttataaaatgcaagttgttattgacgccttgaactggatctgcggtttgggtcccatgtgcatgatgcccatcatcatgttcgttatcggtatttgtctgcgtgttaagatcggcaccctgctgaagtgctgcatcaccaccggtgttggcttctgcggtgtcaacctggtcatcaacacctttgttgcacaggttggccccagcgtgcagaacatggtcgcccgctttggcctgcataccgacatcatggatgtgggttggcctgcccgtgccgccgctacctgggcttaccccttggccgctgtggtcgtattcgtcgtcctgggcatcaacatcctgatgctggttctgaaggctaccaactgcgtcatggtcgacttctggagctacaaccacttcatcttctgcgctgctatctgctattatgcttccggcagcgccatcatcggcctgatctgcggtgctatctgcgctatcgttaccttcaagctggccgactggacccagcctgtcgttgaggaagagttcggcctgcccggcgtttccttccccacctccaacagcatcagctgggcacctctggcttacctgctgaacaaagtttacgaccacatccccggcctgaacaagctgcaggctgaccccgagagcatccagaaaaagttcggcgtcctcggcgagcctctgatgatcggcaccatcctgggcgctgtgttcggcatcctgggcggcaacgatgttgccggcgttatgaccgttgctatgtacaccgctgctaccatggtcctgaccccgaagatgatgcaggtcctgatggaaggcctgattccgtttgctgatgccgttaaggagctgctgaacaagaagttcagcggcaataagttccacatcggtatcgatgctgccctgaccatcgccaaccccagctgcatcgccgttggcatcctgatggtccccaccaccatcatcctggccatggtcctgcccttcaaccgtctgctgcccatctctgatattgcttaccaggccatgtggctgtccgcttacccggtcgcattcagcaagggcaatgttgtccgcagctatatttcctgcgtgatcttcaccatcatcatgctgttcatcgccacctctctggctcctgtccacaccgcactggctgtggctggcggctatgacctggccggtgccgctctcgtctccactgaggatgccggtacccacctgctctcctacctgctgagcgttgttgcaggtctgttccactaagcaattccgctaacgaattccaagatagtgcaaagggcagttttgtaggccgtgaaacgtctgcggctgcccctttgcactgtatgttaggaggtttcccaatgaaaatttccggtattaccgtatatgaggtcaaaccccgctggatctttgttaaaatcaccaccgatgaaggtatcgagggctggggagagatgatctccggcaccaagaccgaaaccgtcgtggccggtgccaaggaaatgggcgagtatctgcttggccgtgacccgttcgagatcgagcgcctgtggcaggagatgtacaagtccttcttccgcggcggccctatcaacggcaccatcgtctccggcatggagatggccctgtgggacatcaagggcaaggcttttggcgtgcccgtgtatgagttcctgggtggcaaggcccgcgaccgcatcaaggtctactcctggatcggaggcgaccgccccgacgacgtggccaaggccgcgctggagcgccgtgccatgggttttgacgctgtcaaaatgaacgctaccgaagagctgcactacattgactccttcgccaagatccaggccgttgtggaccgcgttgcctccatccgcgaggcctgtggcaatgatttcggcatcgctgtcgacttccacggccgtgtgcataagccgatggccaaggtgctggcccatgaactggagccctacaagctgatgttcatggaggaagttgtcctgcccgaaaacgaggaaggcttccgcgaggtcgccaaccaggtctccaccccgctggctaccggtgagcgcctggtcagccgctggcagtacaagaacctcttccgtgagggtgccatcgacatcatccagcctgacgttgccctggttggcggcatcctggagaccaaaaaaatcgtcgccatggctgaggcctttgatatggctgccgcgccccacgccccctacggccccattgcgctggccgctacattgcaggtggatgtctgctctcccaacgtctttatccaggagcagagcttgggcatccactacaataagggctttgacctgctggacttcgtcaagaataaggacatcttccagtacaaggatggctatgtggatgtacccaccaagcccggcctgggtctggagatcgacgaggacctcgtcaaggaagtttccgccgagggcctgcattggaccaaccccaagtggcgtaactatgatggcaccatggccgagtggtaagcagaccagaaaggaaataccattatggatatgtatgcaattaccgcagagcacccgctgctgggcatcctgcgcaatgtcccgctggaaaaaaccatcgactatgccgatgccgctgtgcgcggcggcgtagcgttctttgaggtggccctcaacagcccccacgcgctggagcagatcaccatgctgcgcaagcactttggtgaccgctgcctggtaggcggcggcacggccatcaccaccgagcgctgccgcaccgcagtggacgccggtgcccagttcctgctgacccccggcacccctgtggacgtgctggagtactgcgccaagaacgatattgccctactgcccggcgtgctgacccccaccgatgtggccgtcagcctggagtatggctttaagaccatgaagcttttccccgctggcagcatgccgatgagctatctgaaggacctgaagggtcccttcgacgatacccactacatggccattggcggtgtgaacccgcagaatatccgccagttctttgacgccggctacctgagcgtaggtctggccagcagcctgatgcccaaggacgccgtggctgccaacgactgggagacatgcgaggcctatgtccgtgacctggtcagccgcatcggccgcaactgatttgccattaccgtaaaagcatccttcataaaaatcgccgatcggaacctatgaggctctgatcggcgattcttttgtaagtatttagtcaaagctggcggtcactgcttgcgttcaaacgcgccggggatgcccagcagcagccgatacttggccacggtgcgccgggtggtggtaatgccctgggccgtcagctgatccgccaactgtgcgtcagagagaggatggacgggatcttcctcctgcagcagtttatgcagggcggccagaacctcgctgcggctgtccggtgcagcgtccccgctgcggttgcctgccctcgtcaggaagtaggagaggggatagaccttggtgggtgttttgacatatttgcccttgatggcacggctgacggtggatgggttgacgcccatctgctcggccagcatatcagccgtcagggtgtgcaggggctggccttcggctaaaaaggcaagctgggtgttcaagatcagctgaccaagctgctgcagggtgctgcggcgcttctccacacactgcacgatgtagtccgcgtgacggtgctgctcctgcaaataggtgcgcagctccggcgctgcgtccgtgccggacaggtcgtagtagctgctgtagggcacgccgctgctccagcggtcctgcacgcgcacgccccactggccgtctttgcaatagaactccaaatctggcacaatgaaaccagcgctctcaccgccgccaaaggctgccgtcgggtacggctccagcgtgcggatcagagagacatagtgctgcacttcctccatcgtcaggccgtaggcccgcatgatggtgcggtagcgcttggaggctacatcctccagatgatcgaacaggatgcccagcagcgtcgggtctgtcatccccttgtggaatgcctgcagcaccagactttccgaggtcgtggccgcgcccacaccggcaggctccatctggtgcagccaggacagacagcgctcgaccacatacaagggtgcagccaaaatctcagccacctcttccacagtttcgggcagcaggccagtgccgggttcaaggaactccaccatgtggcgaaagacgccgcgctcggctttcgtggcattggcggggagctgactctccaaaaacaggtacaggtcctgcgccgttttgtccggggcagcccgctccgacagatcgccctccttatccggcgtctgtacgctgatgggccgctcgaccgtgccgtggatcttgtccaggtcgaacaggggattgtcgatctcctcttttttcagcatctcgtccagagcagcaccgtccagggacaggatgttcaaggcttgcagctgctgctgtgataagatttgccgctgttgtaattcttgtgtcggcatgataatttttcctttctttcagatttccggtgcgtttgctatcagtataccacaacatcgaaaaaacgacaattatcttataaaatcgggcatgcccggttacggtggaacgcagatgaaaacagtactgacgatcggcgagcccatggccaccgagactctcggttgacatcgagggcactcccacccggcaccaaatgcaaaccgctctgcagggcaggggagagatttaccgcggagttcgtcgtttgcaaaagtatataaacaaaatatccccctgctgaattcaccggcagggggagttgtttgtaatagggtcacacccagcggccaaagcggtattgcggcttggtcggctcgggtgggataagttcattacccaggtagacttcaatgctgttgcggcgcaggcggcgggcgatgggggttggcagcttgctgtacccggctttcaggtttggcgggcgggcgtcgatcgagtggcagtcggtgcaaagcagatgcaccaggttccattccagcaattttagcaaccagtgggccgtgcggccttcccgcaccaggccgctggcgttgatctgcgccagacagccctcgctgacccagttgtacagcagggtagggtcctcggtcacgaaaggataacgctccacatgggccagaatcggcgtatagccgcgctggcgcacagcgtacagcgtttcgtcaatgcctgcggggtggcaggtggtagggaattcgataagaatgtagtttgatttggcaaaggccagcgcgcgcaaatcaagactgggcagagccgttgtaaagtacacctccgcacccaacttggccgccagcggcaggccggtctctttggcggccttggctacctgtaaaaacgcggcgcggcgctttgcggcaaaatcctctaccgagatacgctcataatggaagtgtggggtaaatacaatgccagccacaccgtcctgaatttctttgcgcaaaagcgccatggaaatgctcaggtcccgggcaccatcatcgatgccgggcaggatatggcaatgcaggtctaccaaattctggctcattcgttgctgctatcctgttttgtgtcgtagtaaccataagagtacgcgtaggagtagccgtctttgcggccggtctttttgacattatagccattcatcacgacgccgagaatgtgggcgtcaacggcttccaggttctttttgctcagctgggcaccctgaatggtggtgacaccggggcggacaaccagcagaacaccatccgatacacggctcagaacggcggcatcggtcaccaccgagacaggcggcgtgtccacaattacatagtcataggtctgctgcagagccgtaaaaatccgctctacaataggggtggagaggagttctgccggattcggcggaatggcaccaacgggcagcaccgtaatgccgctgtctttcaggcgcagcagtgcatccgggagcttgcttacgtcccgcgccgtaatgacgcttgtcagacctgcatggttgcggggaatgcgcagataacgggagatggcgcttttacgcatatcgcagtccacaaggactacccgcttgttggaggctgccagcgtgatggccaggttaatggccacgttgcttttgccctcctccggcaccgaggaagtaatcaggatggttttgcagttacttgtggcggagagaaactccaggttggtacgcagggatttataggcttccacgaactggaacggcgcgtctttgctgacaacaaataattcgcggtgagaagtccgggactttttgtcttttgcactcatttctttttgcccctctcgtattcaggaatgacacccacaacggtgagatccaggtatttcgcaacatcttcttcgttattgagtttgttatccagcagaacctgcaggaaaatcacaccaaggcagagcaccagaccgatcataccgcccagggcagtattctttgtggtgttgggagaaactggggtggcagcaagagaagcgttggaaatgaccttgacagaaccggcttctacagcctccagaatcacgtcgggggaaacctcggtgattttgttgcagacctgctgggcccattcaggattgttgctgcggacggtaattttcataacctgtgtgtcgtccacggcatcaaccgttacgcggttcttcagttcactgtaatttagggaaaggcccaggtcattgataacctgctgcagcacggtatcacttttaataataatactgtaggtggaaaccagcttggttgccgagttgatctggtcgctggtaacattggaagtggtatcctggcgtgtgttgacaatcatcagggccgaggactcgtactggggtgtcatggcgaacttggagacagcaaaaccggcaatggccgctgccagggtgcaaaggatcaggattgccagatgctgccggactgcattcaggacttccagcaggtctatggtatcgtattcttcgttttccacgggtcgggtcctcctcaggtgttattttggtatcggcgcttcagctgatgacgcgccacgaacataaagcccagcagaatagcggccacgagggcatatacaaccgcaaagatgcccaggctgccaagcatactgcgaagataggtaagaaccagtgcccggatagaggcgggctccagcgaaaaattgtccagtcccagcaggggatacagaacggtggcacccagtgcgcacaaaattgcaccggccgtaaaggtgaaggtcaggcagcgcacaccaagacgggagctgcctgccagacgtagcatcagcaccagcgaaacagcacaaagcagcgccgtaacaatgacacccggcagcgccagacgatcaaccttggtaatggccgtgtacaactggcttgccagaggaatggcaacgtagtttgcataatccagacggcaggcatcggccacaatctcaacagcggacgctacatcctcggtcacatccttaccgcggctgttcaggtcagctaccagaacagcattgaggtcggttttgatattctcacgggcattgacagccgtattgcctgcatacaggtctgacacagcctgttccatatccgtgttaatctggtcgcgggaaagggtagaggtcatcacatcggcatcaaaaccggtggatgcaccatagctgacatagttatcatacaggtagctgtaggcataatcagcaaagctgctgcgcgttacctgcttgcgcatgaatccctcgctgcatatagtggtcagaagcatcagaaaaatggccagaatcgccaacagcagcgtggacagccaggacaaacccagtgcccagccgacactgccgcgtttcttttttacattatttttttccaaacaatcgcccccttagctgtttctgtccagcacggggccggagatataccgtgcatacacaaagaagcggtccggggtaaagcccatagcatcaaacgggtagcaggtatacagaatcagattttcatcctcgcgggagaagtcgtaagcggacgagtcctgataatccaggatttttgtctccgtaacctcataggtgtacacaccgtaatgggtggtaatggttacagtggccccttcttctgcatgctggagatcattgaagaaagtgttgttgtggccggacagcagaatcgttttcccttcgccgggcagaccggcgctgctgttttccatataggtgccgacaccctggttcaggattcggttggtatcaccgtaatataccggggcgttcacgttggtgccggaaatcgtaatatcagcatagcggtcacccaacgtggggtaggtaatgctgctgaagggaatcgtctccggctgggcagcggcttcccctgccgcaccgccgtcaattaccgtaccggcttcagccagcaggtcctgcggctgagaagcagttgtgttgtcaaagaaccagcccagcatcatctggtagggctgcagcagcacaaagctgagtgccgccagcagggctgccgtgacagccgccagcgccaaaggcacaacaacataggccagcggactgttgcggatgaaagacctttttttactatgtggcaagtttttaacccctcctgagccaggacgcagacaccagccgcgcccggctatccgtaaagtatctatctgaaacaggcaagcacactgcctgaaaagaacctacaaaacgggcatcaccgaagtgctgcccgtcctccgattaagacaagctcatcggatgctgcattggcttacagagccagcgcactctccttgcggacagccaggccgaggataccaacaacagacagaacgatggtagcaataaccatagcgctgttgtcaccggtagccttgatgactgccgaggaagaagcggtgagcgggttggaagcagaagcaaccgaaccatcagtagccagcttccactgggtggtgccagagacaccgttagcggaagcagtcggcacaacggcaacctcgctgccggaagcaacgacatcgatgttcaggctgatgccggcatcgcggaagatgccgccaacctggctgagagcagtgctgacagcagtgcggacatcggcctcggtcttggcgccgttcagggcgttcttggcctgggtcagggcgttgcgcagggcaacggaattatcacgcagggcacgcagctgggtctcgttcaggctgttgacaacaccgtccatgccgtaaacaccggcgctggtcagatagccgttcacttcggcgcgggcagcactcaggttctctacgtaatcggtagcgaacacaccggtagcaaagacgcaagccatgacaacgctgaccagcaccgcaacgagcttcttgaacttgttcatgatttttgtcctcctttcttcaaaggtgcatcgctgcgcaggcagttatgcgcttataaagcacagttgaaaaactcccctttataagtattttcattctatcatagaaccagatgaaatgctatatattttagccgaaaatgtcgaaaatggtcgttttacccaaaacacccccatatataggttggcttgtttgcgtcttggtcattccagtagggcacgaaaatgaaaaagggctcgcacccgtcctcctgcaggtgcaagtcttttgttatatgcaaatatgcaattttataatattccgcagatcatcactttggccagaaagaccccatcctcatagcgacaggaagtggagaccctggcccacatgcgtgccgaggaagcgggcgtggagttcatctgccgcacctcctgcctgcagctgaaatacccctgcctgctgggtagcccgctgtacgtaaagcaggtgctgctgaacatcgcatcggcatgggtgccaggctgggcatagccatcgtaaaaacgctgctcgagcgtatgcacggcgcgattcgcattgaaagaaaagtggacgttggtacggctgtttatgtgacgcttccctttgccattgccgagcaggtccctgtaaaagaggcccctaaaaagccgaaatgcagtctgagcggcatgagtgactatctctccaaaccgctggacatccccaaactgaccgaagttatcccaaaattccgcaccacccccaccgacaacggcgggctggtggggtgaacaaacaccccctgccttgtacaaaagcaaggcagggggtgtttgctggttgggcttattcagggggcatagggcaggggagagactgccgctattcagggggtaaacttatccaggggcaaaaacgtgttgttctcggcggtgtaattgccgccgcccatctgtgggcggacgaagggcacgccgtcccgcgcatagaatacattgtcggcaatcagcgcgtccgggttctccgaggggctgatggtgcctcctaaatcgtcaaaactgacgttgtggcggaaggtattgtggatggcttcctgcaggcagaacatcacgcagccaccctcgttctggcggctgaagttgtactcgtacaccgtgccgtcgccggagtcggcatcataagccatgctgtcctggttcaggcgggtgtcggcggcttcgttgcagcggaacagtgcatccttgcatttccagggccagatgcccgccgccactttgccggcgcggtcgccggggtgggaatacacgcggtcattgatctcacaggctacggaatcagcggtgttgtgctccaccagcgggcgcagggcgtacatcacggtgatgccatcgccgccggccagctttacgtagttgtcgcggatggtcacattctcgtggccgtacttgaggaacggggcttcttccagcgccgccccctgaaagtgagcgtgggcgtaggtgtagcccaccgccaggccccagcggctgacgcggtagaggtaacagccctccaccagcacatcggcaaagcgggccgggccggtggcggcttcgtcggcaggggacagggcagtcatgtagatgccaccgttgttcatgtgcttgtcgtagacgttgccgttcacatcgtggatggcgagatcgcgcagcgtaatgccgcggcatgtgcctttgtccttggccaccacagccacgccggtgcgctccatcttgtcgggctgggagtaactctcgcccaaaacggcaccgctgtgattggtaatttctaagtcctgcacggtcacatacgcggcatcgtacagcagcacggccgaggaaacatagccccggtacacatgggtggggctgtccaacgggcagccataatcctggtaccagatgccctgcccgtcggcgtcaatgcgcggggcagggccgtcgccgtaagcgcccaccacaatgggggcatctttgctgccgcaacaggtcaggtgcaggtattgccccgcaaacacactgccgcaggccagccgtactcggtctccgggctgcaaagtcaggcgattgacagcacgcaggctggcaaaagcggtggcctcgctcaggccgtcgaaactgtcgcggccggtttcagcgttgacgtaataggtcttgcacaagggcatcatacgcctcctctcgcagccgtttttcaatgatctgctccacgtcctcataggggaagctgtcgccccaatagcgggtaaagagatcaggattattgcgatagtacgcctgtttctgttcttctgtgatgacagggcagacaggcagcgctcggatggctgccgtgggctgggcaaagtccagcttaaaacgggtcaactcatattgcaggtacatggccggggtgtactgccgcgggccgtaaaacaccgtgccggcggcttgcagccgggcattcgcggcatttttggcctgacggcgggcttccagcgcttcggggctggcatcgttgataagtcccagctgtttggccagctgcaattgcaccagcgcattttcccactcggcaggggagagacagacatcacgtgcggtcatttgactgcacccgtaatgccgttggcaaagctcttttgcaggcagaggaagatgatggcagtgggcagcgtgcagatgaggacacccagcatcagcatgccgtaatcgacgctgtagccgctcttcaggttggcaaccagcatgggcatcgtgatagaggcattgttttggaagatgatcttcggccagaggtagctgttccaggcattcatgaaggtaaccgtcatggccgcgccgtaggtggagcgcatgatgggcacgaacatacggaagaagatgccgatctcgctcaggccgtccagacgagcagcctcgataatatcattggggaaggacctcgacgcctggcggaacagcatgatcatgaacggggtcgagatggagggaagaacaaacgccgcccagctgttaacaaggccccagtgggacatcatcttgaacagcgggatcatgatggctacgaacggcagcatcatggccagcagcagcacgctcatcagggcgtccttggccttgtcgtggtagatctcaaagccgtaaccggcgatggagcagaccagcagcgtgatgaaggtcatcaggatggcattgcggaaggagtttgccatggccagccccaaattctggttggcgatcagcgacttgaagttttccatcaggtaggtgccagggatcagtttgccgcgcacgacgtcaatgctggggttggtagcgccgcacaacatgtagtacagcggaaagaccgacaggaaactggccagaatcaacacggcatgggccaaaatctttttgcctttagtcacgtttgtcacctactttcatctggatagcagacaggacggccacgaccaccaggataaacaccgacagcgccgccgcgtagttgaacttgggcgtttccacaaaggaaatgttgtagatgtaatgcgtcagcgtcatcgtcgccttgccggggccgccagccgtcaggttgacggactcatcaaacagctgcagcgtgccggaggtggacataatagccgtcagcagaatggtgggtttcagcaggggaatggtcaggtggataaactgctggatgggggacgcaccgtcgatgcgggcagcctcgtagatggagtagtcgatgttctgcaggccagccaggtagaacaccatgttgtagccggtccagcgccagatcagcgcaataacgatgacccagcgggccgcccaggcgttctggaaccaatccacggttgggatgcctacagtggacagcacccggttgaccagaccatcgttggcaaacagcgatttgaagatcatcgagtaagagaccagcgaggtggcgcagggcaggaagatcatcgtgcggtagatgcccttgcccttgatgtcggggctgttgagcagctgtgccagaatcagcgccaggatcagcatgatgggcacctggatcacgaagtagaagatcgtgttaaacaagcactgctggaaggtggcgtcctttaaaatacgtgcatagttggcaaacccggccggctgcacggcgctgccggtacctttctggaaagaaaggatcagcgcctgcaccatggggtaaaagcaaaatacaaaaatcaggatcgaggccggcagcaggaaagcccagccggtgaggttgcgcttctgctccatgttcagcccttttcgtttgttcatggtaactctccctaatttgcccatgtgttttttcataaaagcaagggcacggcttgcaaaaggggtatctgatgcaacccgtgcccttggcggacgttcaattgtgtaagaggtacgcgtcaggcgcggtggatgttagccagcgatgttgaactcaacggtatcctgggcgttttgcatctcgctgtcgatgtcggcgttgttctgcacaacgttggtaacagcatcggtcagggcgctgcgcacgtcagagtagtaagcgccgcagtcgaaagcgggaacctggccagcaaactcaacgatgtccttgtaaacggtctggccgccgtagaactcggaaggctggttataaacatcgctctcagcagcaggcaggtagctggagatagcaccggcgttgggcagcaggtcgtcgtacagttcaacactggaaccgaaggtgctcttcaggaagtcgaaggccagctcggtgttcttgcagttggaggaaacggcccagcttgcgccgccgcagtttgcgtagttggtagcaccatcgatgccatccagcttgggcatgttaacgatagcccacttgccggactgatccgcggcagcctggacactggacatgatccagcagccgttgataacgccggcagccttgccgtcgttcatggaggcaatgtactgatcccagtcggtgtactcggccaggatgcccttgtcgaccatatccttgtaaacggtcagggcctctttcagggcagcattgtcagcgatcttgacctcgccgtcaacaacaggggaggcaccagcggactgcatcatctcgatgatcagctcagagccgccggaggaagtcagcatcggcacgccgttggcgtccacgaccttctgggccttctcctcgaactcgctccaggtcaggtccttgaagtcctcgacggtcaggccggcattctcgatcatgtcagaacggacagccatgacagaagcgccgttgtcgaagggcaggccgtagtggtggccgtcgacggtggagtcagccagcttgccgccggagaactggtcccaatccaggccggagtcggtcaggtcggtgtagatgccggggaagttggcgaccatcttgtggtaagagtaatcctgcatcaggaagatgtcgggcagggtgctgtaatcctcgctggtggcagcggtgatgagcttggtctcgatgtcgttgtagacgttctcttcaatgttcagcttgaagttggggtgatccttctggtagagggcctccgcctgcttcagggcgtagatgttgaagttggggtcccaggcccagacggtcagggtctcgtcgccgtctgcagtggtggtctcagcttcgctctcggcgacgctctcagcgggggtggactcggcaggggtggaggcagcggagctgctggcgctgctgccgcagccggcgagcatggaagccgtgatggcggctgccataagggctgctacattcttctttttcatggatttgtcctccttaaaaatattgtttctccatcttttataaaatacggcccgcaggcgcggcccataaattatcgggtcttactctgtatcgtcgacccagcgcatctcacgcggggccagggtcagctcacggataagcttgcccttgatgtacaggtcggtcttttgctcggactccgagttgttgatgacggcaatgcgcttcgtttcggggaataccgtcacctcggtgtccacgttggtcacgtagtagtgcttcatctcctccggcataccggcggcgtagtagatggcccgcagcaaaatgcggcagttctggggggagtagggcaggcccgcaaagtaaacgctgtggcccttgccgtactcgttcaccaccagctggctgtactcgccgtcctgcgccaggatctggtaatgcttgccttgggcgtagatgcgggacgtaccctcgccaaagtcgatcttgccggtaaaggattcatcttcgaggatgaagtggtggggatcgcaggtgttgtatttgtcggtgctcagggagaagcccatctcgcggtcaacgcccatcacatcggacagctggaagtaccggccctggtgctggcaggcggtgggctcgcccacaccgatgaagccgccgccctcgtccacaaacttgcggatagcggtcacgaccttctcgtcgatccagttctcagcgccgctgaaggcggtgtaggcatcgcctacattgatgataacgccgatgtccttggggatgccgctgcggacatcatcaaagttgatgaactccacatcaaaaggcatgccgctcagacattccagcacgccctcggccgagtaggtctcgcggtggtaaatggagtggtgcacctggttgctcatccacttgcgctggtggccccagcagttcaggatggccactttgaacggtgccacgtaggacttggtgccctgcatgttctcgtggatctggcggaactcgcctaccacgttctggatttcgtcgataaagccgggccagttgctggccagtttcaggtaaccgccgtagccgatgcggtccagcgggctgcgcagcaccgcgcggcgggctttcagccagttggtgcgggcctcgccgatgggatcgccgcccgggcagaacacatcggggaagaagtagggcagcaagcggccctcagtgtacttgacgccctcaatgtcggagatcatgcgcagcgtaacgccgctgcccacggaaccaaccacggcgtccagtccaatagacttgaagtacttgccgtaaggctcggtgccgatccagtggtcgcccaggaacatcatggcctctttgccgtaggagtggacgatgcccaccagctccttggccagggcgcagacttcctgctgctggaactcgataaaatctttaaattccttgctgggcacgcggaacatcgtattgtggtagccctggtccacaatgaactcagggcggaacttgtacccggcccatttctcgaacttttccaaaatgtaggggctgacgctggcactgtagccgaaccactccacgaacttttcgcgcttctggtcatcaaacgtcagcgtgaactggtggaagaaggtggtaaagcgcaccacatcgatatgggggtttgcctcgcaccagcggcgcagcttttcttttacgtaagcctgcgttttgggctggcgcacatcgtaggtcagctggtggggcgtgtccttccaatcattggtcaggaagttatacatatgtacggggtcccagatcaggaacgccaaaaagctgacagtgtactcgtggtaggggatggtctcgatctccacctcgccggcggcctcgtcaaaggaccacttgtcggtgggtacgacctcgccggtcgtgcggtcgatgacctcccaccagcgcttggggtcatccagcgtgttgactttcaactgctgggtgtggaacccgtccatcaaatggatgcgcagcgtggtgctgcgggcggtgtgccggtcgctgatgaggtactcctgctggatctcgtcggggtttgcctcggcccaggcgttatctttgcgggtggtgtaataggtggcgtatttcttggcgggatcctgcaaaagggcgtccggcatctcggtgccgtcgcagtcacgcagggcgtcggcccccagcaatgctttcagccgcagggtctcctccacaacatcggcatcagtgggcaatgttaatcttccggtctgctccatttccctgttcccttcctctcacaaggggtgcctctacagcaccctgtctttcttgacggtatcatcataccctgttttagggcaaagaaacagatacttttttgagcagtattttagaaatcttgctatttttgcgctccttttagtctttttgtggcggtgaccgaaaagttgcacaaaatatcgacgtattctttgtatggtttgacaaaattcgctttttatgtcataattttgtaattttttgtaaaatcgtcccacaaatctgcacttatgttacgtgtcgtgccttgccaatcgacgtaggaataagtataataagagcaaaaaacgatatacgtctttagaatcaagagaaatcttgcccttggctttagataaattgcagtttaagcactaaaattttgcaaaattcagaaaggagtgcccggcagtgaatacacggtacgatctgaacatggaggtccccccgcgagaggcggtgcgccttttgtacatcagcaaaagccgcttcggcggcgactggcgcagcgtgccacacacccacgcctgcaccgagatgttctactgcgtcagcggccgcgggcagttcaacatcgagggcaagctgttcgatgtggcgccggacgacctcatcatcgtcaacccccgcgtacagcataccgagctgagctaccagacctacccgctggagtacatcgtgttgggcatcgacggcgcggagttcctttttaatgagaaggacctgggctacacgatgctctcctgcggcatgatgcgggaggaactgctgtttttgatgcggatgcttctgcgggagatcgacagccgcgccgacggctgcgagatggtctgccaggacattctggaagtgctgctggtcaagatcgtgcgggaggccgccgtgtcgatgcgcatcgtgcagccgccgtccaagagcaaggagtgtgccgccgccaaacggtacattgacgaaaatttcagtgagaacatcacgctggacaagctggccgagatcacccacgtaaacaaatactacctttcccacactttccagcgggagtacaacacctcgcccatcaactacctgctcaaccgccgcattaccgaaagcaaggccctgctgaccagcaccgactttagtctgactcagatcagcgagcagatgggtttcagctcgcctgcctacttttcccaaagcttccgccgctttaccggccaaagcccgctggaataccgccgcaaaaaccagcctggcaaaaagtaaaccccaaaccttataaaagcaaaacaccgccgccccggcaggcaaaccggggcggcggcaatttgtttaatagcatccacataaaccgccagcctgtggctgaaatcattggtgccgccgatgccttagttgcgggctgcggtcgttcctgcatgattgcaaagagtcgccaagggctgccaactccttagcctcctctgggaggggactcccgccgcagcgggtaggggagagaaccttcgggctaataagcgctaaaggcactgtctctccctccggcccttcgggccgcccctatactaactgcctaacaaaaactgcccacgcgggaaattctccgtgtgggcggtttgctttataaaatcactcgatgaccagcagcaggctcatcttgaacttgccctgcggggtgacgctgtgcaggccgttcttgtcaaaacggaagctttcgccagcgttcagctcgtagtccctgccctcgtaaccgatgatggccttgccctccagggcggtcaggatagcgttgccgggggcgcggtgcggggtcaggccggtaccctcgtcaaaggccatcagcacaaacttcatgttgtcagcatgcacaatgtccaggttggcgatgctgccttcctcgtaggagatcaggtctttcagggcggtgggctgacccgctttgatgatgttgttcatggtaaattgctccttttttaaaatgatttcggtgtagatcatgccggcgccgtcgctgtcggccagggtgccgcacagcgttttggagggcagtaccagcagttcaccgggggcaaggggtacgtggcgggcctccgcgcccagcacaaagcacccgctgccctcagcccccaggtacagggtggtacaatcatagctttccggggtgatggaggtgccagcgcccattgaaaaccaggtcacaggcacttccgcacccaggcgggccgggcgtgagatggtcatggcctcccggatgggacgcatttgcgcgatggtaaagggggtgttgttcatacagcgtctcctcgcagggccgggggtacaatgccgcggatcgagcggccctcatacttcaactcatccacgatcacctgcacatcgaacgagtaggagatgttctcctcgttcagaatatcagcagccggacttcgtctgccacactcatagcattggtcggatagtgggtatttatgatggcgctgattccttcttcgcgggtcaggcgctttatcatatccagtataaggatttgattgtgaaagtcaagccctgtttcggtctcgtcccggaacaggttcggatacagccctgaacacctcttgcggccgtacatcggaatgacccgcgtttcctgcgcggtatttcaggtggtcctccgcactgccaaactcaaaccagcagcggcgctgcaggtcctccggcagggcagggaagggcttgtcttccaggctgtcggccatctggcggcgcatgctgccgtaggtcagcgccttaccggcggcgataaagtagggcttgatggcgtcgtcatcgcaccacatgacctttttcagcgtgccgcccttggaccagtacaggctcttgatggccaggtacaaaaacggaaccatgatgcggcgggtgcctttgccgatttgcgcgaactgcccgccgtcaaaaaatacgtgctccaccggcaggtgagtggtggtcaaaaagtccatggccaaatcagcaccaatggaagacgccaccaccagcgtcagcctggttgcaccctgtgttttagaaatgcttcgacctgccgtacctcgtcctgcttgccttggtaaacctgcccggcgcagtagacggtctgcagcatcgtttccggtacgccggaaaggttgatcgtttcactcatggggaagcccctctcttttttgattctgcgggaatcggccgcaggttagaagatgctaacccatgccgtgtaaaaatgccgccctcacggcagccgctttattacacgaaagaagaatcgctctggctttattgtagccgtgccgccccgccttgtcaagccgcgcgggggccggatggagacttacagcgcagaaaaggttgtattttggcgtttcctgcggcacattggttataaatcgctgactgcaaaggcggaaaatacccctgtgcgggattccacgccggaatcgctgatggatcaaatggaaatcaccactaaaggtgcccgcagaaattgcagtagcctctttttgtatgggcttgtgtcagggcatgacttgcgttataatcaaaagcaagatagattgttaaggatggattccatgaaccgcacgaccgatgatttactggacgccctggcgtgccggggttccgc

SEQ ID NO: 7797 - DNA, 10077 bp, Unknown
  gut microbiota DNA sequence
cggcgtgttcgccatctttgcgctggcggtgggactggcttccttcagctccttctccaactttgtggtgggggccacagtccttctggggccggtggggtgctatctttttgcctttggcctgtttaatatccgcacccggtgtacgctggtggagcggtttcgccatacgaagcaatatcctttttactgcgtctgcgtcatgctcagctggctgctgctctgctttttttgtaatgttcctgggcgtaggcgtattcgacagcaaaaagtaaaggcagtgtaagaaaagccgaggtgattggtttgcaggacagccgatggttccgcatcgtgtatactttgctggacacgggcaagtgcaccgcgtcggagttggcggaaaagctggaagtctcggtgcggacgatttaccgcgacctggacgctctcagcgcggcgggcatcccggtgtatgccacgcaaggcaagggtggcggggtctccctcctgccggagtacgtgttggataacgtactgttatctggcgaggaaaaagagaaaatcctgatggctttgcaggatttatccgcagccgatgaaacggccggggaattgcttgtaaaattgggagcgctgttccagacccgggccgcggattggatagaagtcgacttttcggactggaaaaagagcgcacaggatcaggatgtgttcaacgccatcaaaacagcaattttcaagaaagttctggttactttttcctattttggcagcagcggcggctatacgcaacgaacggtcgagccgctgaagctggttttcaaaggcaaggattggtatttatacggattttgccggttgcggaaggatttccgcttttttaagctgacccgtatcaagggccttgccattgggaaagaaacttttatgcgggatgttcccactgatttgccggttaaagcacctcttcacgccgaagatttagttgctgtaagcttaaagtttacgcccgaagccgccttccgcgtgtatgatgaatttaccgatgccgtcaccacagacgcacagggaaacttgtatgtatctgtcactttgcccgatcatggtgtgctgttcagttatctgctgtccttcggcgacagtgtggaggtgctggagcctgccagcgtgcgggagcaggtaaaggaaaagcttatttctatgctgcacatctataaaacttgacagttgttgtcaggtataaagtggtatgctgtctgcgaaaggatggtgtacttcatgaaatatgagtggcgaaaacagggcaaggctctttatggggccaggacggccccagccctgaaaactgtccccgcgcaaaactacatcaagatagacggcaggggagacccgaacggggccgatttctccaaccgcgtgggtgcgttgtacgctttggcgtatgcggtcaaagcggcctacaaagcggcgtctttgcaacaagaaatcgacgacttcaccgtctgcccgctggagggcgtctgggcacaaatcagtggggatgatttggaaaaagacaagctggaatacaccctgatgatccgtcagccggattttatcagcggggagctggtacggcaggcgcaggaacaggtgcagcgcaaaaagccaaatcctctgttgggagaaatcacctttggtgcgatgcaggacgggctgtgcgtagaaatcctccacatcggttcctatgacgatgagcccgcctcgtttgcaaagatggcccagttcgcggcggcgcacggcctgcggcgaacgggagattatcaccgcgagatctacctgagcaatgccaaccgcgtggaaccctgcaggcgaaaaacaatcttacgctgcccggtcgagcccgtttctccgggcagcatggaaaaatagcagacaaaacggcatggcttcggctgtgccgtttctttcgtttgtgcgctggcagggctgatcggcctgctttgcgcgggcagctacagcgatttgaagatatggtctgtcgtcagcctgatcttcggcggcatctgtgccatcgctacccggaagcagaaataaacgcataggaacgtcaaaaaagcgtcatccatggtatttgcactatggctgacgcttttttacattttgtattttattttataaatataacactttgttctgcacttttaattgttactgcttatctttttcctgaaacaccttatttaaaaggtacaaccccagcaccagcacgcccaggaccaggaaaatccccgccatcccggcgcacagcatggtcagcgtggtgggcaataatgcaaacgacataatcgtacctccttacacgtacccgttcatcagggtcagaatcaacccgccggcaatgaccgacgcgatctggcccgaaacatttacgctgatggaatacatcagcaggaaattctggttatcctcggccaggcccatctggttgaccacacggccgctcatcgggaaggccgagatgcccgccgcgccgatcatggggttgatttttttgccttcgggcaaaaacaggttcagcagcttggcaaacagcacgccgcccaccgtgtcgaacacaaaggccaccaggcccaacgccaaaatcagcagcgtgtcaggctgcacaaatttgtctgccgtcatctgcccggccaccgtcaggcccagcacgatggtaataaggttggccagtacgttctgcgcagtctcggacagggcgttcagaacgccgcactctcgcagcaggttgccgaacatcaaaaagcccaccagcgccacactggccggggccaccagccccgccagcaccgtgaccacgatagggaacaaaatcttcgtggtcttggttacgcttccttttttataaggcatgcggatgagccgctcttttctggtagtacacagtttaatgaccggcggctgtacaatgggcaccagcgccatatagctgtaggctgccaccatgatggcccccaggtacttgctgcccaggctgttcgccacaaagatcgccgtcgggccgtcggccgcaccgatgactgcgatggacgcggcgtcgggcaggtcaaagaacagccccgccagcaccagcgtgatgaagatgccaaactgcgccgccgcgccaaacagcatcagccagggcttttccagcagcgggccaaagtcgatcatcgcgccgatgccgatgaacagcagcagcggaaacagctcgttggacatgcccgcctcaaacagcgccgagatcggccccacggtgtccccctgggtgatggcacccgacagcggcaggttgacaagaatcgcaccgaagcccatcggcagcagaagactcggttccatctttttgacgatggccaggtagatcagcagcccgccgatcacccacatgaccaccatctgccaggtgaggttgccgaagttgctgaacaacccggcaaaagtttgtaagatctgcatacagtacctcccaaatactgggcggcagggtataaaaatagagacccctgccgcagaaaactgcggcaaaagtctcagtgtttacagtatgctccggggccgcgcggcccgtggtgacgaagcgatacagcgcggcggaccgcgtcccttactcccttttaccttgcccatagtatagcggatggcgggcaaaattgcaagggaatttttacaaaaagcgcacagacgcggcaaaatgttgcacaggcaaaaaagctgtgttatacttttatggtaaaaagcacaacgaaaccgaggaacctgccatgattaaaattgccattgtcgaggacgaagccgcggtacgcgaccagttgaccgactacgtgcgccgttacacccgccagtacggcaccgagtttgaggtgacctgctttaccgacggcgacgaaatactggaaaactaccgtcccgccttcgacatcatctttctggatgtggagatgaagcgcctcaacggcatggagaccgcccagcgcatccgcgagctggacgacgatgtgctgctcatcttcatcaccaacatggcgcagtatgccatcaaggggtactcggtgggggcgctggattacgtgctcaagcccgtgccgtactttgcgttttcgcagcagctgcaaaaggcggtcaaccagctggcccggcgggcgcggcattacctggcagtcccggtggacggcggtatgcgccgcttggacaccgccgccatctattatatggaaagtgacggccacaaggtctgcttttacaccgaggatggcgacttcatcgcccccggcgcgctgaaagcctttgaggaaaagctggcgaaccgcccctttgcccgctgcaacagcgggtatctggtcaacctggcgcaggtgcgcggcgtgcagcaaagcgaggtccaggtcgggccgcacaccttacagatcagccgcccgcggcgcaaggcgtttctggccgccctggccgattacatcgggggtgagggcgtatgaccgcagtaccggacatcccacgcctgtacacggccctggccgagtgcctggctactttattatatgcccagcaattgacgccgcgctattcggccagacacagcaccttcaacagcctgatctggatggccgggctggcggtgtttatgcagctgaccggctcggtgccgctggtgctgtggcttccctgcatggtggccgccatcggctcgatgtatctatttttgtggcgcacctgcgagaccaccccgctggaagccgggtattactgtgcccgggcgtttattttggccgagctggccgccagcgtggagtggcagctgcactgtgccctgtggccccagcgcaccgggcgcgacccgctggccgtgctgctgcttgtgctggtgtacggtgtgctgtttaccgccgtgtactggatggaaaagcgtcgcagcacccagcccgccaagctgcacattacgccgctgggcatgttaatggcggtcattatggccatcacggtttttgcggtaagcaatctgagttttgtaaataataatgaagctacgatgagcatccgctatatccgcacgctggtggacctggcgggcgtgctgattttgaccgtccagcacgagcagctgcgggaaagtgccctgcacagcgagctgaccgccatggacgatgtactgcgccgccagtacgagcagtaccgccaaagcaaggaaaacatcaagctcatcaaccggcgctaccatgagttaaaggtgcagatcgccaccatccgtgccgagcgcgatcaggccaagcaggatgccgccctggccgccatggaaagcgacatccgccgctacgaggccgagaacaagaccggcaaccccgtattggacacgctgctgaccgccaaaagcctgtactgccagcagcacggcatcaacatgacctgcgtggccgacggcaagctgctggattttctttccaccggcgagatttgcaccatcgtgggcaccgcgctggataacgccaccgagagtgtggccgccgagccggacccggagaagaagctgatccgggtagccatctacgcgcagaacggctttgtgatgctgcggttcgagaactactgtgcccagcccgtagagcttggccccgacggcctgcccctgcgcagcgcccacggcggctatgacctgaaaagcgtccgcgccgccgccgaagcccacggcggcacactgaccctgcattgggagaatgagtggttcaccctgcgggtactgctgccgcagaaataagcagaataggggagaggacctgcacctctcccttttttgctgccacagcaacatgcacaaataggagcggctttgctttgtgcaacatccacatcaatttttgatacaattttgcaacttttacagattatgccgcaaaaacggcagtttgtgcattttttgaaacaaatccttaacagtatggtaacatagtaccagttcaacaccgtacttctataaaacggtgaaaagataattgaggaggaaaacaatgaacaccctgcttcttaccctggcaaacatgggcgtcaacctggacgacgttgccgatgtggtcaataactgcatcccgcagctcatcttctttggcattgtggttgccgccgccattatcgtactgatcgctatggcggtcaacaagaaactggccaagcccaccaaattcatggtgcgcgcccagtccggcctggccgtgctgctggctttcggcatcatgctcaacctggttgcctttggccccatgagcaccatgctcgacctggtcaccggcaacggcactatcaccgaggaatccagtgacgaggccaacgccctgtgcaccgagattgccgaggaaggcatcgtcctgctgcagaacgatgacaacgaactgcccctcgcttccggcagcaacctgaacgtctttggctgggcatctgtcggccctgtctacggcggcaccggcgccggcgcgatctctgccgaccgtcccaccgtcagcctgctggatggcctgcacaacgccggcatcaacaccaacaccgagctgagcgatttctacaccgcttactgcgccgagcgcccggcgctgggttacagcaaccataactggaccctgcccgagcccaccgccgccagctacacccaggagatgatcgacaacgccaagtctttctctgacactgcaatggtcgtcatcagccgcgttggcggtgagtttgctgacctgcccaccgatatgagcaccgtcaactacaccgacaactccaccgagtacaaggacttcgaggacggccagcattacctctccctgagcaagactgagcgcgacatggtcgacctcgtctgctccaacttcgacaacgttgtgctggtttacaacgctgccaacaccctcgagctgggcttcgtcgatgagcacccccagatcaagagcgttatctggtgccccggcaccggccagaccggcttcaacgccctgggcgagattgttgccggtgaggtcaacccctccggccactctgccgacactttcgtctatgacctgaccgcagctccttacttcaacaacatcggcgactttacttacaccaatgcggattccgttggttacaccgctgccagcctgtttggcggtgatgcaacgctggttcccccgcacttcgtcaactatgttgagggcatctacgtcggctacaagttctacgagactgccgccgccgagggcctgatcgactatgacaagaccgttcagtatcccttcggccacggcctgtcctacaccacctttacccagaaaatcgactccatgaccgaggctgacggcaccatcaccctggatgtcaccgtcaccaacaccggcagtgtggccggtaaggacgccgtgcaggtctacttcaacccgccgtacaccgatggcggcattgagaaggcttccgccaacctcgtcaccttcggcaagaccgactccattgagccgggcgcttcccagaccttgaccctgaccttcaacaccgaggacatggccagctttgacagcaaggacaagggctgctacgtgctggaagaaggcgactatatcatcagcatcaacgaggattcccacacggtgctggattccaagacctacaatgtcgcttccaccatcgtctatgacgagtccaacccccgcagcaccgatgccgaggctgcaaccaccaagttcgacttcgctgacgataagctcgtcaccctgtcccgtgcaggccattttgccaactatgccgaggctgtcgccgttccctccgacttcaccatgtctgaggagagcatgaacaccctgtacaacgaccacaactggaaccctgaggacttcaacgatcccaacgatgagatgcccgttaccggcgccaacaacggcctgaagctggctgacctgcgcggtgctgactacgacgacgagcgttgggataccctgctcgaccagatgaccgtcaccgagatggacgacctgatcgccctgggcggctaccagaccaaggccgaggccagcgttgacaagtacgcgaccatcgactgcgacggccccgctgccatcaacaacaactttaccggcgtttcttccattggcttcccgtccgagatcatcatcgcttccaccttcaacaccgacctggcccgccgctacggcgagagcatcggccgcatggccagcgagatgaacgtcaccggctggtacgcccccgccatgaacggccaccgttccgcctttgacggccgtaacttcgaatattactctgaggacagcgtcctcgccggttacatcggtgccagctccattgccggtgcccagagctacggcgtctacgcttacatgaagcactttgccctgaacgaccagcagatcaaccagagcgagatgctctgcacctgggctgacgagcaggctatccgcgagatctacctgcgtcctttcgagatcagcgccaaggtcggcggctgcaaggccgtcatgtccagctggaactatattggcaaccagtgggccggtgcctgcaatgcactgctgaacggcgtgctgcgcggcgagtggggcttccgcggtatggtcatcaccgacggcttccatttcactgactacatggattccgatattgccatccgcaacggctgcgacctgatgctgaagaactacgatgttgccaccaaccacctgaccgataccaccagtgctaccagcgttaaggctatgcgtcaggcttgcaagaacatcatgtacaccgtggtcaactcccgcgtttacgaccccgctaacactgtttccacccccatctggcgtaccgctatgatcgtggtcgacgtgctgctggctgtactgctggtcgtgctggaagttctcaccttcaaaagctacaagaagaaaaaggcacagtaaagcgtaatttgtaagctgtgcagctgccctgcggttcatcgctgccgactttgcgcggttgtgcggtgggccgcaaggctgtttttaagaaaaggaaccaccttatgcaaaagaaacaactgcaagctttgacgcttgaacaaaaatgtgccctgctctccggcggggggacctttaccacccgcgcactgcccaaagccggtatcccgtccattaccttgtccgatggccccaacggcgtgcgcaagcaggccggggcggcggaccatctggggctgaatcccagtgtgccggccacctgcttccccacggctgtcactgtggcatgcagctgggaccccgcccttggtgaggagatcggcaaggccatgggggacgaagccgccgcgcaggaagtcgccgtactgctggggccgggcctcaacaccaagcgcagccccctctgcggccgcgacttcgagtacttctccgaggacccttaccttgcgggcaagatggccgcaggctatgtgcggggcatccagagcgaaggcatcgccgcctgccccaagcacttcgccgtcaacagccaggagctgcgccgcatggcgtcggactccgtgctggacgaacgcaccctgcgggagatctacctgaccggctttgagatcgtggtgaaagaatccgcacccaaaaccatcatgtccagctacaatttggtcaacggcacctacgccaacgaaaatgcccatctgctgcaggacatcctgcgcagggattggggctttaccggcgctgtcgttaccgactggggcggctccaacgaccatgcactgggcgtaaagaacggctccacgctggaaatgcccgcccccggcggtgacgccgtgcgggaactgctggccgctgtcaagtccggcaagatcaccgaagccgatgtggacgcccgcctggacgaactgctgacgctgatttacgacacccacgccgctgtgcagaaccacagccgcagctttgacgccgacgcacaccacgcgctggcccgccgcgccgctgccgaaagcacggtgctgctgaaaaacgaggacaacctgctgccgctggcggcgggcacgaaagtggccgtcatcggcgactttgccgagaccccgcgctaccagggcgcaggctccagcgcggtcaactccatcaaggtaga

SEQ ID NO: 7798 - DNA, 510 bp, Unknown
  gut microbiota DNA sequence
taccgaggccgatgtggacgcccgcctggacgaactgctgacgctgatttacgacacccacggcgctgtgcagaaccacagccgcagctttgacgccgacgcacaccacgcactggcccgccgcgccgctgccgaaagcacggtgctgctgaaaaacgaggacaacctgctgccgctggcggcgggcactaaggttgccgttattggcgactttgccgagaccccgcgctaccagggcgcaggctccagcgcggtcaactccatcaaggtagattcgctgctgggctgctgggccgaaagcgggctggaacaggtaggctttgccgccggtttcgaccgccagggcaagcccgacgccgccaagcaggccgaagccgtggcgctggcccaaaaggctgacgtagtgctgctctgcatgggcctggacgagatcaaagagagcgagggcctggaccgcagcgatatgtgcgtagcatcgaaccaaatcgagctgctgcgtgcgctgcaaaa

SEQ ID NO: 7799 - DNA, 607 bp, Unknown
  gut microbiota DNA sequence
cctgctgggctgctgggacgaaagcgggctggaacaggtaggctttgccgccggtttcgaccgccagggcaagcccgatgccgccaagcaggccgaggccgtggcgctggcccaaaaggctgacgtagtgctgctctgcatgggcctggacgagatcaaagagagtgagggcctggaccgcagcgatatgtgcgtagcatcgaaccaaatcgagctgctgcgtgcgctgcaaaaggtcaaccccaacattgtggtggtgctcagcgccggcgcatcggtggagaccccttgggcgaaccactgcaaggcgctggtctacggcgctttgggtggccaggccggggccggggccatgctggacgtgctgaccggcaaggtcaaccccagcggcaagctggccgagagctgggccaaggcgtattcggatacccccgcccgggacaactttgccggcgatggccgcaccgtgcagtaccgcgaggggctgtacgtgggctatcgctaccaccagacggccggggtcgctcccgcttatccgtttgggtttggcttaagctacaccacctttgcctatgctgacgtaaaagccacgccccagggcgtaagc

SEQ ID NO: 7800 - DNA, 50571 bp, Unknown
  gut microbiota DNA sequence
ctttggtggaactctgggccaaccccagcagcctgtacgaccccgccgtggccgcgcaggacggtatcgaaacggcccgcgcccgcattgccaaaacgctgcactgccgcagcgatgaaatttacttcacggcctgcgggtcggagagcaacaacatggccatctacggtgccgcgatgccccgccgccactggggcaataagatcgtcgtcaccggcttcgagcatcccagcgtgcagctgccgatccgcgctttaaaagaggaaggcttcaccgtcgtggaaatcgccccggagcgggacggtcatatcgacaccgagaaattcctcgctgctgtggataaaaacaccgtcctggccgcctgcatggccgtcaacaacgagaccggcgcacgtcaggacattgctgccctggccaagggcatcaaggctaaaaacagccgcacccacttccatgtagacgcggtgcaggcctggctgcgcatccccatcgacctgcaaaagtggcccggcgtggacacgctgtccgtttccggccacaagatccatgcccccaaaggcatcggcgcactcttcgtgcgggacagccagcgccagacgctgcacccgccctacgtcggcggccatcaggagcgcggcatgcgccccggcaccgagaacacgccctatatcgtgggcctgggcctggcggccgccaaaggcgcccagcgcctgcgcaccaagggcgaccacctgcatgccctgaatcgacagctgcgcaccggcctggccgagctgcccggcatcacgctgaattcccccgatgacgccgtggatgaggtggtcaacttctccaccggctgcatcaacagccagaccttcatcaactacctcaacgggcggctggtgttcgtctccggcggcagcgcctgcgataagggcgagcccagccacaccctgcaggccatgggctgcgatgacctgaccatccgcaccgcgctgcgtgtcagcttctgcgccgacaacacccccgaggacgtggacgccctgctggacggcctgcgcgccggcctgcgcgaactgcagcacatttaaatgtaaaagcgtaacacccaccaacgaaaggcgtttttgtataatgaaagagatcatcctagcataccagggcgaaatgaccctgaaaggtctgaaccgcggcaagtttgaagcacgcctgtccaagatcatccgctggcggctggagccgctgggcaagttcaaagtctaccaggcccagagcaccgtctttatcgagccgaaggaagagggcctggacatggacgaggccttccgccgcgtctcccacgtgttcggcatcgtcaagatgagccgcgcggtggagtgccccaaggacttcgacgccatctgcgagaccgccgaagcttacctgggcgagacgctgcggggcatccgcacctttaaggtggaagccaagcgcgccgacaagacctacccgatgaagagccccgaaatctgccgcgagctgggcgcctacctgctggacaagcaccatcacctgcgggtggacgtgcacaacccccagctggaagtcatggtcgagatccgcgaccactccgcctacgtccacggccccaaagtggaagccgccggcggcctgccggtaggcaccagcggccgtgccctcaacctgctttccggcggtatcgacagccctgtcgccgcctggtgcatggcccgccgcggcctggcgctgcatcacatccactttgccagcccgccctacaccagcctgcgcgccaagatgaaggtgcgcgacctggcccgggaactggtggagtacaccggcaactgcacgctcttcgtcgtgccctacaccaagccgcaggagtatatccgagataatgcccccgacgtgctgttcaccgtgctgatgcgccgcagcatgctgcgcatcgccaaccgtgtggccgccaagctggaactgcaggcccttatcaccggcgagagcctggcccaggtggccagccagacgatggcggccctggcctgcaccgacgccgcccaggacctgcccgtgctgcgcccctgcatcggcatggacaagaccgagatcatcgctatttcgcgcaagatcggcacctttgagacgtccatcgaaccttacgaggattgctgcaccatcttcaccccgccgcaccccaagaccagccccactatggaggaaattttggcggctgaggcgggtatgcccgacctgctggcgctggaagcggaagctgctgaaaatgtcgagaaaatttacatccgtatgggtggagaagaggatgatctgctgtgaccgctgaaatcatctgcgttggcaccgagctgctgctgggcgacattttaaacaccaatgcgcagtttttaagccgcgaactggccgagctgggcatcagcgtgctgcaccagcacgtcattggcgataaccccgcccgcctgcgggagctggtgacccaggctaaaagccgcagcgacctgctcatcttctccggcggcttaggccctaccgaggacgacctgaccaaggagacagtggccgaggtctttggcgatacgctgcattttgacgagaccgagtgggacaaaattctggctttctttgcccggacaaatcgccgccccaccgagaataaccgcaagcaggccatggtgccgacaaacggccgcaagatcatcaacgaccacggcaccgcccccggcgcctggtttgaggatgcccagggccactgcgccgccctgatgcccggcgtgccccgggagatgaaggccatgtggctggagcaggtgcgcccgctgctgctggcccgccagaactgcactatccacagccatacgcttcgggtgctgggcggcgagagcgccatcgccagcaaggtggccccgctgtttgaaagcaccaaccccactgccgccatctactgcaagaccggcgagtgtgaaattcgcgtaactgcgcgggaaacaacccccgaagccgccgaggccgcctgccgcgaacggctggaggagttccgccggattttgggcgctgccgcctatgatgtggacgtgcctgcgctggaatacaccgttgtgcgcgtgctgcgggaaaatggcctgcatgccgccacggctgaaagctgcaccggcggcatgattgccgaacggctgaccaatgtgcccggctccagcgaggtgtttggctacggctttgtcacctatgccgaggccgccaagcaaaagctgttgggcgtcccggcagagacgattgcacagtacaacgtggtttccggccccgtggctgctgccatggcctttggtgcggcgaaagaatccggcgcggagctggccgtgggtatcactggcctggccggtcccggcggagaactgcccggcaagccggtgggcacggtctacctggctggcgccgacgcccgcaccaacacgggctgcctcatgcggctgaccctgggcggctatcgcgagcgcagtgtcatccgcgcccgcgccgccatgtacgcgttggatatgctgcgccgcatggcgctgggtctgcctgtgccggacagcctggccatcaccccggataccccggccacaacaatggatatttgactagaggttcaacatggtaaacacagaactgagaattttgcgcgtcttcggccccacggcggcggaagtttcggcggtgctgcgtcaggcacgagccgatggctgccccggcctgcgcctgctggaacgtgacggcgagtttgccgtctgcgtgcaggtcagtgcgcccaaccgcgccatggccgagcagtactgcgaaaaatgggtgcagcgcctgcgcgccaaatttggcgatgatgtgtttgccaccggcgagaccagcctggcccaggctacgctggacaccctgctggaaaagcgcaagctgctggtggcggcggatgaaactacgggccgtttggttggtgcgctgctgcagccgctgccccacagcgaagctgtgtttgactttggcaccgagagctacgctgaccccgaaaagcaaaagcagatcacggtgccgccccagctgttgaaaaaattccccggcgatgtggtgcaggccgccgcaggccgcgccctggccgccatgcaggccgcaggggcggactttgccgccgtgtacatgcccgctaccgtgggccagtgcccctttgtgctgatctgcgataaccacggtgctgccgcctgcgcgctgccgccggatctgaacgatgccaccatcggcaaccaaatcttggacctgctgcgccgccgcgtgctgggcctgcggttgaccgattcctgcatcatcttccgccctgggcgggagcggccgctgctgatcgtgtccgaggccgggcgtgagcggggcaacacggtgcggttctcgctgcgccgccgcacaccgcctaccaccgagccggaccgcacggcagactttgagccgatgctggactttgacaccgccgagccggtggccccgccgacgcctgaacctgccccggcggaatccgctgaccccggcgcgacccgccacctgaatgtgggccgcacccacaccgcacccccggcagtgtccgaacccaccggtaccatccggtttgaatcggaactggacgaggaaaacgcggcagcccccgccgcggctgcaaacactaccgacccgctggacatccgtaccgccggcccagaagccgcccgtaccgcccgcagtctgcgggtgaaccgccgtgccccggcccccgaagtggacggtgaaccgtttgccgcccccgaagctgagttgcccagcatcagcggccataccatccgccgcagcccggcaccgtccattctggacgatgatgtgccggatttctcggcagagcttgaccccgaggccctggctgctgcccaggcggcggacgaagccgatgccgccgcaggccgcgccaccagcgccgaggactttaccaaagccgccagccgcctgtttgatgacaacgacagcgacgacacagatacggccccgccgccgcgccgccgccatggggacaagccaggcgcggaaaacagcatccgcagccacagccttgccatgatcgaaaagagcgagaagcgccgccgccgtatggtcatcaccgtgctggtggtgctgacgctggtcatcgtgggtggcgcagtggcgctgtggtggttcttcagcaatgacctgggtgcacgccccgctgccaagagctacggcacagccctgtacgacaatactgccgagagctacctgaccaagggcaccgagaagctgcccggcgtggtaggctacctgggcttccccggtatggagggccgctttgtctacgcggctgatactgccactgccgaaaacgctgacggcgaaactgcccagacccgcttcgccacagccagcgcgctgaacagcaccgcccccggcaacacggtgctggcttccaccgacgccctgctcaccccgcttaccaccgaggagggcatcaaggccaacagtggctttaccctctacctgccgggccgcacctaccgctttaaggtgctggccgtttactactacgaccccgccgagcagggcgacggtgctttcgacctctacggcagcaccgacctgtccagctattacgattacctccgcttcgtggcgggcatccaggcccgcagcctgtgggataccgaggtggaagtgggggacgcatcccgcttcctgaccctgacagcccccagcgaggacgcgggtgtgcagctctgcgtcaccggccgcctcatcgaggacggcgaggccgaggtgctcaacgcttcggccatcacggcggcggatgacccgctgctgaccgccgtgcagtaccagagtaaaaaccagccgatgcccaccgtcagcgccctgctgggtgccagcatcgaccgctacgccaagcaaagcgccgctactgccgccaaccgcggcagcagccagacggccagcgacagcgctgacaccagcaccgacctgagccaggccgccagcgagatgcagcagcgcactgacgcgctgattgccagcgccgacaagctgatggcgggcctgaccgatgtggcaggctcggccaacgccaccgagacagacctgaacaagggcgccgagggcagcctgcccgagcagaccgtgacggtggaccagatcgccaacgccaaccccacgcccgccccggcggacagcaccgtcgacggcagcgacagcaccgaaaacggcgataccacgccggatacgccgggcaacagcggcgacaacaacaccaacaatggcggcaccagcgccgagggcgagaccatcaatgtgacgatgaacggcaccgcccagacgatggacctggtgcgctgcctggccatggtggcccagaacgagcttggctccagcgcccccgccgaggcctacaaggcccaatgcgtggccacccattgctggatcctgagccagtcgggttacccctccgtactgggggccgagccgggcgctgccgcgctggccgctgcccaggaggttgcccacgtgctggtgacctacaacggtcaggtctgctttacgccctacttcgcctccgccagcaccggcacggcctcggctgccgaggtctggggcaacgaccgcgcctggctgcaggccgtggacagcccctacgaccagcagatcgccaccaactggaacaccaacggcaactccagcggcacggcccgcttctcccgccagacgctgcaggaccgcattaaagatgtgatggacatcgacctttccggcgtggaccccaacagctggttcaccatccagtccgccaaccaatacggctgggtggccaagatccaggtcggcccggatgccagcgtgggcaccgtcagcggccgctggttccgcgagaacctgctggcccgccagagcgtggacggccgcagcctgcgcagccagtgcttcacggtcagctacaacgccgatctggactgcttcatctttgatgtgtacggctacggccacggctgcggcatgagccagtggggcgccatcggctatgcccgcaacggctggagctaccgcgacatcctgacccactacttcgtcggcacaacgttgacaacctactaaaacagaaaatccccctgcggagctttccgcggggggattcgtcttgttgaaaactttacgcgccggcccggggcgcgaaggagaccgccgccaggtacaaaaagtacagcaccaggcaggccgcaccctgccagcggtgcaggcgacggcgcagtagcggctcggccagcagcaccagcgccatggcagccaaaatgggcacctcataggcgcggaactgtgcgcccaccggcaggcggtggcggtacatcaagctggaaataggcagcgccagcgttaaatttagaatggcactgttcaacagctggatgggcagcgtgtcagcagggtagaagcggcagcgggcgtcgaaccgcttccaaatcgagccgaaagggtgactcagtgcttctgccagcaggggcaggcagaagccaaagctgatgagcgtcgccgcccacaaggcctgaatggtaccggtcaaattggcaatggtggtggcactgtataccagcgcccgcgccccgacggccagcagcgccagcccacccactacaccggccaggtttttcagcgagttgcgcaggttcatcacggggaaggccattgtgcgggcggtgtagccgtaatcctgtgctggggggatggcggtgcagccgtcggtagagatcggttcgtaccgctcgccataaataaactggtgctggtagacgatgctggacaaaacaaagatgacgaacagcagcatcagtagtccggtgccggtgtagcttagggtgccgtcccgcacaaacagggcgatgaccccgcaggaaagcgccagcagcaggcatttgcggcaaaactcctgccggtcggccaccacaggctggccgttgccgcccagcaggcagagtgccagcgccagccctacattggtaacggcaccggccagcgccgtgcctaccgccaggccggtgatgcccatgccggcggccagcagcgccagcatcagctggggcaaagccaggcagaacggcgcaatggtgccgcccactacccacatgggcaggcccagcagggcacagcaccaggtggtgcagcgccctgccaaccggctgccgacggccgccagcagcagccccagcatatacaaccccaatgttaaaaccagcacagacatgatacttttcaccgatacagaaaaagcggcgctttgcggcaccgcttttatttttacgaattagtaggcaacgccccaaacgaccatcttctgggcgggcttgccgcagacggggcaaacgtcgctcagatgctcctgggcaaagggcatgcagcggctggacagaccagcctgctccttcatggcttcctcgcaggccaggtcgccgcaccacatcgtcttgataaagccggtatgctccttggcgatctgtttgatctcgtccatggtggtggcgctgtaggtgcgcttctcgcggttttccagggcgcggtcgtacaggtccttagccagggcgtccatggcggcgggaatagcagtggccagctcgtcaaacttgacgaactgcttctcgcgggtgtcacggcggaccagcacgcactggccgttctcgatgtcgcgaggtccgacttccaggcgcacgggcacgcccttcatctcccactgggcaaacttccagccgggctgcttgtcgctgtcgtccagcttcacgcgggcatacttgccgatctcggcagccagctcgcggcacttgtccagcacgccgggcttgtgggcggcaacaggcacgatgactacctgcacaggggcaatggcagggggcaggatcaggccgtcgtcatcgccgtgggtcatgatgatcgcgccgatcaggcgggtggaagcaccccaggaagtctggaacggatactgcagggtgttgtcgcggccggtgaaggtcacgtcgtaagcacggctgaacttatcgccaaagtagtggctggtgccgctctgcagggccttgccgtccttcatcatagcctcgatggtgtaggtggcctcggcgccggcaaacttctccttgtcggtcttgcggcccttcagcacgggaatgcacaggtcatgctcggcaaagtcggcgtagcagttcagctgctgctcggtctcggccttggcttcctcggcggtctcgtggatggtgtggccttcctgccaccagaactcgcgggtgcgcaggaacggacgggtggatttctcccagcggacgacgctgcaccactggttgtacagcatgggcaggtcgcggtaggagtgcagcacatggctaaaatggtcgcagaacatggtctcgctggtggggcgcacagccaggcgctcttccagcgggtcgctgccgccggcggtgacccaggcaacctcgggggcaaagccgttgaccagctcgccctctttcttcagcaggctttcggggatcagcacgggcatagccacgttctcgtggccggtagccttaaaacggctgtccaggttcttctggatgttctcccagatggcgtagccataggggcgcagcaccacaaagccctttacgctggagtactcgaccagttcggccttggtgcagatgtcagtataccactgggcaaagtcgacctcctgtgcggtgatcgcttcaaccatttttttcttatcgtttgccattattctatatcctcacacaattttaaaaccatcggcatcggcggacatgcgccgacgatgccgatacatctagagcaaaaaagtgcatttttgtgtcgtcaggcgcgaaaatgtgcttttttgcgacggggtgaatccaaaggaggggtgcaggagcgtggcgcagccacaagcgacgaaccccttctttgagctttttacattctgtcctcgagatagtttaccacgtcgccgacggtgtggaaagtctcgatgtcctcatcggggatctccacgccgaactcgtcggacagggtggtgatcatatcgatgacgtccaggctgtccgcgccgaaatcgttgacaatgtcgctgtccggggtgatcttttcaggttcaacttccagctggtcagccagataatcacgaatacgtgcaaaaacttcggaatccatacgataactcctttaaaacagatattcatttattatatagcctattaccggggggttgtcaaggattatttttccttttcaccctgtgcccccggcagcagggttacaatatcccgcagcagcaccagcgggttctcacctttttgcacccgcaggctgaaatacggccgtcccagcgcgttatacagcacgcggtgggggtactggtccatcagcggggccagctgctttgggcccacgatgtcggagtacaaaatcagctggtcgccccgctgcacgatctcggcaatgcctacgcgggcggcggtcacgcggatcagcgatacatccaccagcccctgcacactcttgggtgggctgccgtaacggtcgatgagttcatcaatgacatcatccgcgtcggcggtggtctcaatggccgcaatgcgcttgtaggcttcgatgcggcctgcggcatcggggatgtaatcctcgggcaggaaagcgtccaccgtgatgtcgatgaggcaatcgctcttgtctggcgcgggggtctcgccacgggcggcggagatggcctggctcagcatctttacatacaggtcgtagccgaccgactccatatgcccgtgctggctgtggcccagcaggctgcccgcgccgcgaatctgcaagtcgcgcatcgcaatgcggaagccggagccgaaggaggtaaactcccggatggcggaaagccgcttggcggcgacctcggtcagcaccttgtcgcgggtgaaggtaaagtaggcataggccttgcgggacgagcgccccacacggccgcggatctggtacaactggcttaaacccatgcggtcggcattttcaatgataagcgtgttgcagttgcgcacgtcgacgccggtctcgatcagcgtggtgcagaccaaaatgtcaatttcattgtccagcaattgctgccacaccgaggaaatctgctcctcggtcattttgccgtgggcgatgcctatgtgcgcgcccggcaccatcttgcctacgcgggcagcacattcctcgatagtgtccacgcggttgtgcaggtagtagacctgcccgccgcgggccagctccttgcggatggcctcggccacgatgccctcgtcgtactccagcacgtaggtttccacgggctggcgctcaaagggcggctgctccagtgtggacatatcccggatgccggacagcgccatgttcagtgtgcgggggatgggcgtggccgacagcgtgagcatatccacgccgatgaaagcctctttcagcttctccttgtgcttgacgccgaagcgctgctcctcgtcgatgatgaccagccccagatcatggaactttacatcgttggacagcagccggtgggtgccgataacgatgtctactgtaccgtcttttaggccgcgcagcgtctctttctgctccttggcactgcgatagcgggagagcagcccgatgcgcacggggaatgcctccatgcgggcaatggcggtgttgaaatgctgccaagccaaaatggtggtgggagccagaatggcgcactgcttgccacccatcacgcacttgaacgccgcgcgcagagcaacctcggtcttgccaaagcccacgtcgccgcacagcagccggtccatgggccagggctcttccatatcgtgcttgatgtcggcggcgcaggtcagctggtcgggggtctcatcgtaggcgaagcgctgctcaaaatccccctgccaggtgtcgtcgggcgggaaagcgtgacccttggcctgcttgcggcgggcgtagagttcaatcagctctttcgccatctgctccgtggcggccttgacctttttgcgggtcttggcccagtcgctgccgcccaggcgggacagtttcacgttgtcgctgtcgttgggggcggtgtagcgggacagcaggtccagctgggtgaccgggacgtagagtacgtcctttttgtcgtactcgatgcgcagataatccttggtgacgccctgcacggccatccgctggatgcccgcatagcggccgatgccgtggttctggtgtaccaccaggtcgcccacagcgatttcgcttaaactgttcagcgcgtctttattgcgctttttctttttctgggtgctgctgatgccaaacgcccgcgccgtgaacagcgcgtacttggcaaagggcacgctgcacccggcggaaagctgccccggcagcacctgcaccagccctgcgccgggggcggcgtccgggtccgtggtgaccagcagccccttggtgcgcaggtcggcggccaggcccgcggcggcacgctgggtgcccgccaatacggtgacggctgcgccgccgttgcaaagcggctgcagatcctccaaaaggctggtcacctcgccgccccaggcgggcagcgtgtgggcgggcgcgttgacgatgtccttcagtggaatgtccggcatgctgcgggcaaagttctcggcgcagatcgtgcggtggttcgcggcctgcgcccagaggtagccattctcggcgtacagattgtccagcccggcggccagcacgccatcctgcaaaagggcggaaatttcctcgccacgacggtaggtggtggcgcgctcagcctcccgtaaggaggccggttcctccagcaccagcagcggatcatcgaaataatctagcagtgtggcgggctggggatagcgcaccgcgagatatttgtccatattcacaggcagagcaccgccgtccagctgggccagctcggtggccaggcaggcctctaaggcagtgcgctttttgccgcggaattttttgatgaaagcccgcagaagctcggcagcttcagcaggggaaccaaacagcacctcccgcgcggggctgacgtaaattttttcgatggggtcctcacggcgctgggtggccaggtcgaaggtgtgcatcgtgtcgatctcgtcgccccaaaattccatacgcacgggcagcttcatatccggggcgtacaggtctacaatgtcgccgcggatggagaactggcccggcccgtccacctgggcgcggcgggcgtacccggcgttgtacaacagagcggtcagctcggtgcggggcacggtgtcgcctgggtgcagggtgcgggtgttgttacaaaactcggcgcggggcgtggtatactgggtcagcccctcgtccggcacacagacggcctgcagccgcccacccacgatgtcgcccagcacgctcaggcggcggtactcatactcgcgggccgtaccttcaatggggcgcagcacgtaatctcgggcagggaaaacagcagtggggatgcccagggcgttcaggtccccggcaaagcgagtggcctcagcctcgccgggagtcacgatgcagagaaagcgcccggtctccttcgccagcgcggcgtagaccatcgcccggccggaaccgggtaaaccgaataaggcgcatgcccccggtgcggagagcgcatgcgccagtttttcatattcggctgttttagcaaaaagtgaagaaaacagcatagttacaatgattttataaggttactggttcaggaactcgaccttcagccagccgtactggccgcctacctgcacgaccacccagctgccgtcgctgttggtgcccagggcggtcacggctgtgccggcgggtacgctggtcaccttgtcaaagtcggtgccggggccggcgcgcaggttcatgctggcatcggcggtggtggtgtagctgggctgctcaccctcagcgaacacggtggtgggctgctcggccaggccgtcaaagttggccggggtcggctctggggtgggctccggcgtcggttcgggggtgggctccggctcggtggattccacaggctcggtagattcgggagtatcggcctccacgctgtcgcttacggagggcaggctgtcggcattggagcttgccgaagaagacgtgccgtccagcttgccggtgatcagcaaaaaggaaaacacgatagtggcggccagcatgataacgcagatcacgatgcggatcagggcttgtttacgaagtttgctcatggtgtacatcctcttaatggttgaacttgttctgagcgtattgcaggttgccgtccatcagcagcttgcaggcgtcctcaatgtccgggtagcggtcggtcatggccttgcggtccgcggggggcagcttgcccagcacccaggcggccaggtcgtactgcgggttgggcttggcgccgatgccaatgcggatgcggctgaaattctcggtgcccaggctggcgatgatgcttttcagcccgttatggccgcccgccgagccgtggggtcggatacgcaggtggcccgtctcctgggtgatgtcgtcgcacagtacgatgacgtggtcggcggggatcttataaaagttggcggcgggggcaatgctctggccgctcaggttcatataggtcagcggcttcagcagcacgaccttgtggtcgcccacctgggtggtgccgtacaggccctgccacttggctttggcaatgtcgcagtgccactgcgcagccagataatccagcgcctcaaacccggcgttgtggcgggtgccatcatatttcggttcagggttgcccagtccggcgatcagccagtccgccccggaggtcattcctaacattttaattcctttacttgttctttttgtcggcttccaatttctgtttttttgcgatgtacttttgcagcttgttctcgccccagttgtcgatctcggtctgcttggcgcgctcgatgctcagggcaccggcgggcacatcgtggccgatggtggaaccggcggcggtgaaggcatggtcgcccacggtgacgggggccaccaggttggtgttgcagccgatgaaggcatagtcgccgatggtggtgtgatacttgccctcgccgtcatagttgcaggtgacggtgccgcagccaaagttgcagtacttgcccacggtggcatcgccgatgtaggtcagatggctgacggtgttgccctcggcaaagtcggcgttcttggtttcgacgtaagcgcccaggtggcagccttcggcggtcttggtgccggtgcgcacatgggtgaagggaccgatcttgttgttggggccgatgtggctctcgtagcactggctggcgttgatggtggtgccggcctcgacgacggtatcctccagcagggtgttggggccgataacgcagttctcggcaatcacggtcttgccgcgcaggatgcacccgggcaggatgaccgtgccgggggtgatgatgacctccggctcgatatagacgttatcgctgatgaattccacgccgttatccaggtggcgctcaaaggtggcggcatagcgctgccgggccagctcaaatttctctttggcagtagacatagggagatatgccctccttactatacgtttataatatgctgcccgtaattggggcaggggataggtttacggatatttctattgtaccccacccgaaaggatttcgcaaggtggttgagaaagttttgcaactgcggaaaggccccctctgcgaggggactcccgcgaagcgggtgggagagaccttacctagcggcattttatgaaaatgtctctccctcagtcagcttcgctgacagcgctccccctctggcacttcatgccacctcccccgtatcgggggagtctgtctcgcagagggagcctcttaagtggcaactatttttaacttgcttgtaggggccgatgtgtaaagcataccgtgccctgattagtgtacaaaaaccgaccgataaatcccgactatttttgtatgatattgacgaagtgtgtaactttcctgtttcagaacttgcaatccctacaaaaatggtatagtatacatgagtagagcaaatactgcctgccgggggcatttttccccggtgattcacttggaggtgtttttccatgagcagcccgctgctggaagttaaagatttacaggtcactgtcggtgaggaaaacaaagtccttctcgacggcttgaaccttaccgtgaaccccggcgagacccacgtcctgatgggccacaacggcgccggcaagtccactttgatgagcgccctgatgggcgatccccgttacaacgttacccgcggccagatcatcttccgcggccaggacatcacccacgaaaccgccgatgtccgcgcccgcgccggtatgttcctgtccttccagacgccggaggaaattcccggcatcacgctggaaagcttcctgcgcactgcgcaggctgccgttaccggtaagcccgtcaaggtcatgaagttccgccacgagctggccgcccagatggaagctctgaacatggatcccgcctacgccgaccgttacctcaacgtcggcttctccggcggcgagaagaagaaagcggagatcctgcagctgctgatgctcaagcccgctttggccctgctggacgagaccgactccggcctggacgtcgacgccgtcaagaccgtggccaacggcatcaaggcttaccacaacgacaccaatgccctcatcatcattacccacaacgccaaaattctggaaggcctgcaggtcgactacgtccacgtgctggacgacgcccgcatcgtgcgcaccggcaacggcgaactggtgagcgagatcatcgaggaaggctttgccgccctgaaggaggacgaagccaaatgagagcctttgaaactgaaaagaccgacgtcgccgaagtagaccgcagcatttacgacatcaaagatgcagccaacgcggcgttcgaggtcagctccggcctgacgccggagatcgtggaaaagatcagtgaggaaaagcacgacccggaatggatgcgcatcttccgcctgaaagcactggaaacctacaacaagatgccggtgcagaactggggcccctccatcgccggcctggacatgagcaacattgtcacctacgtgcgccccaacaccgagatgcgcggcaagtggagcgaagtgcccgacgacatcaagaacacctttgaacgtctgggcatcccccaggccgagcgcgccagcctggccggtgtcggtgctcagtatgactccgaggtggtttaccacaacgtcaaggctgaagtagccgcccagggcgttgtgtacaccgatatggaaagcgccctgaccggcccctatgccgagatggtgcgcaagcatttcatgaagctggtgccgcccaccgatcataagttcgcggccctgcacggcgctgtgtggagcggcggctccttcgtctacgtcccggcgggcgtgcatgtggagattccgctgcagtcctacttccgcctgaacgcccccggcgcaggccagtttgagcataccctcatcatcgtggataagggcgcgtacctgcacttcatcgagggctgctcggcccccaaatacaacgtggccaacctccacgcaggttgcgtggagatcttcgtcggcgagggtgcccgcgtgcgctactccaccatcgagaactggtccaagaacatgtacaacctgaacaccaagcgcgccaaggtggaaaagggcggcaccattgagtgggtctccggctccttcggctcccacaccagctgcctgtaccccatgagcatcctgcagggtgagggtgcccgcatggagttcaccggcatcaccttcgccggtgcgggccaggacctggataccggtgcaaaggtcgttcacgctgccccccacaccactagccacatttccaccaagagcatcgcccgcgacggcggcatttccaacttccgttcgtctgtcgtggtgctgccgggggccgagggcagcaagtccagcgtcagctgcgaatccctgatgctggatgaccgcagccgctctgataccatccccgaaatggacatccgctgcgacgccgtggacgtgggccacgaggccaagatcggccgcatcagcgaggatgccatcttctacctgatgagccgcggcatctccgaggaggacgcccgagcactgatcgtcggcggctttgccgagcctatcgccaaggaactgccgctggaatacgccgtggaaatgaacaacctcatccatcttgagatgaagggcagcattggctgagaggggaggaacatagcatgaatatgaacatgaaccgcctgccggtgcctacctggaaccacctgggcgtaaactttgccccggataaggtcgccctgccgcaggtccccgccaatggctggggaactgccgctgccaccgccgccgtgcctgcgggcatccgcaccaacggcccggagactgaaatcttcgagacctttaccgagtccggaatgggcgtcgccgccgatgccttcctggccgccaacgccaacgtgaaagagcatctcgccgtgggcgagggcgctgccatcgagacgcccgccgtctttgaggtaaagctggacgaggcccacccctgcgcgctgagctgcctgaccatcgacgccgccaagggcagcagcctgaccgtcgtgcaggtgctgcgcggcgatgccgaggacggcgtggccgcttctctcgtgcgcatcaacgccgccgagggtgcccatgtgaaactggtacaggtgcagctgctgggcaacaacgccagccgctggggtgctgttgccatccagcaggccgccggttcccgggtggagcaggtgcgcatcgagctgggcggcaaggtctccgtctgcggcacccgcacgttgcaggaccacaacaagagcgagtacgacctggacgccgtctacttcggacgcgacaatgacgtgctggattacaacgatgtctccgtccagatcggcaaagataccctgtgcgagatgcacaccgccggtgtcctgaccggtaatgccgacaagatcctgcgcggtacggtggatttccgtcgcggcgccaagcgcggtgtgggccacgagagcgaggacgtgctgatgttcagccctacggcccgcaaccgtaccgccccgctgatcctgtgcggtgaggaggaagtagaaggccagcacgccgccagtgtgggacgtctggatgagggcaaactctactacctgcgttcccgcggcctgagcgagagccaggcgcgccgcctgatggtggacgcccgctttgccccggctattgagaagatcccgctggaagagctgcgcaccgaggtgcgcgaaactgttgcacggaggcttgatgatgaacaactggacggctgatttcccgatcctggcggccgatgaaaacggcaaccgcctggtttatctggacagtgccgccaccacccagcaccccaagcaggtgctggacgccgtggtgaactactataataaggataacgccaacccccatcgcggcgtgtacgagctggccatgcgtgccaccgacgcccacgagggcgctcgccatacggtggccgagttctttaacgccgaggatgacgagatcgtctttacccagaacaccaccgaggcgctgaacctggtggcctacagctacggcatgcactttctgcatgagggcgatgaaatcgtcatctcggtggctgagcatcactccaacctggtgccctggcagcgcgtggccgaagccaccggcgcaaagctggtgtatatgtaccccggtaaggacggccgcctgacgctggacgaactggataagaaaattaccgccaagaccaagctggtcggcattgcaatggtctccaatgtgctgggcctgcgcgcccccgtggaggagatcgtcaagcgcgcccacgccgtgggcgctgtggtggtgctggactgcgcccagagcgcaccccacacccccgtagacgtgaagaagctggacgtggatttcgcagcctgctccgctcacaagctgtacgcccccatgggcgtgggcgccctgtacgcccgcgccgagctgctggagaagatgcccccgttcctgagcggcggcgatatgatcggcgctgtgcatgagcacaaggccacctgggccgaaggcccccgcaagttcgaggcaggtacccgcaacgtcggcggcgaggtcggctttgccgccgccatcgagtatatgaacaacatcggctgggaggctatggaagcccacgagtatatgctgctgaaccgtatgctgtccggcatgcgtgccatgccctggctgaccgtttacggcgagccggtggccgatggccgctacggcgtcgtcagcttcaacgtcaacgatgtgcatccccacgatgtggcgaccattctggatgcgggcggcgtagccgtgcgtgccggtcaccactgcgcccagcctttgatggagtacctgggcatcggcagctgctgccgcgccagcgtggcaatctacaacaccgccgaggatgtggatgccctgctggaaaatcttgaaaatgtacgaaaggtgatgggcctgtgaacctgaacgaactgtatacccagatcattaccgagaacagccgcagcaaagaaaaccgccatcccgtgccgggtgccacccacagcctggagggcgtcaaccccagctgcggcgatgacatcaccctgcagctgcgggtgaaggatggcaagatcgaggatgccggcttcatcggcagcggatgcgccatctcccaggcatcggcttcgctgatgatcgacctagtcaaaggccgcacggtcgaggatgcccgccgcctgatctccctctatttccagatgatcaagggcaagatcacccccgaagaactggacgaccttgaggacgtggccgccctgcagggcatcgcccacgtgcccgcccgcgtaaaatgcgcggtgctggcctggcacaccctggaggaagccctggacggcgaaggcaagaccgacaaagtcaccaccgaggatgccgagtaaatttttataatgacataaaacaagcggcagagcgtaaaaactctgccgcttgttttagcttgtgggtaaaaatgcgaatgtcacatgtaggggtcgatccttgcatctgcccctacagcagccatgcgatgagttactgatttccaaacacgccgttctggtaatcgctttccgaaatcatccagctccggtccaccagccacatgccatcctgccatacggcctggatggtgtagtaatccgtggcggtctctacctcgccggtggtgtcgttcacggcctcgtagttggcggcggcgttcacggtcacggtgttgtcgccgtacgcaatgtgttcggtatcgcacaccatgtcggacttgtccagcgtaaaggtcaccgcgccggtggccccgctcttgatgccggcggacaggctctggctgtgcagctcggtcacatagcgcagctcggcgggggcggcggcgttggcggcacgcaggtaggcgcggtagtacaccgtcagcatggcgtccagatattcctcatcgggcttggcgtagccgtctgcctcgcatggcacaaaagtgccaaaggcggcgttctcgttgctgggcttggacaccagcgccagcgccgtgcggtagccgtccccctcgggcgaaaccacccgcagcagggtgtcggtgcgggtcagggcactgcgggccatgtagtagcggccggtgtcgctggtgccgtgtggctgctctgcgccgtcagccgtcagcgtaaaggtgatgttggtgggcaggttgtccagataaaaacggtcggcttcgtccagcaccagcccggcggattccggtgtggtctcggccgggacctgaacgtctgcgggcagggtgacgggcttgtgcagggcaaagtacacgaccaccaccgccacggcgcaaagcagcaccacgggcacccatgggggcagcctgcgccgtgccgcgccggttgggccggacagcggattgccgcagaccgggcaggtcttgcggtcgggctgggtgataggcgaattgcagtgcgggcagcgtttcatagcggtcccctccttttttacgttggccgatgccgcaaactttgcgcagcatggctgtttgtaccccgagtatatcgactgagagatgctttgtcaaccgtcttttttggaaaaaacacacgggcacgggcgtataaatttgccccgcagacgggtggtgtgatataatagagaacacattcaccctgtgggggccgatgcttgcatctgcccgcggacacattacctatccgcccgtgtgttattataaatttaaaggagactcccatgcccaaccgccgcttttttaccgccaaccagctcaaggctatcgccctgttctgcatgctgctggaccacatgtgggccaccatcgtgcccggccgggaatggatgacctgcgtggggcgcatcgcgttccccatctttgccttcgagctagcccagggttatacccacacccacgacctgcgcgcctacgccaagcggctgctgttgctggccgtcgtgtccgaggtgccctttgatatggtggcgggcggcacgtacttttacccctggcatcagaatgtggcctggacgctgctggccgggctgtgggcctgccattgcgccgatcgctgccgtaccgcacccactctgccggaaaaactaccgcccctgttgggtctgctggcggccttactgctgcccggcctgctgctgacggattacggcacagcgggagtcgtcatcatcctgctgttccggctcacccgcgggggcggctggcgcagctgcctcgcccaggcagtgggactgttcgtggtcagccagtacatgctcatcggccaggtgtatctggtcggcccctttgagatccagcaggagtgcttcgccctgctggcactgccgcttatctggctctacaacggccagcatggccgcaaaaacaaggccatgcaacacgccgcctacgcgttctaccccgcgcacctgctggtgcttggcatgctgtttatggcaaagtagggggaaatccacccttcctgcattaaagactcccccccccaaggggagcttttttattcgcgcttactttacccgctccatgtactctctcaccactgcagcatcctcaaacgggacttttctcccgtcacggtcgattgttgtctcatgccctttgcctaataccgcgagaatatccccttcacgcccaagccccagggcgtacagcagcgcatcacggcggttggagatctccacgcacgccgccccgttctgcacccggtccatcccggcgcggatgtcagcaaaaatagcttccaacggttcgccccggctgttgtcctcggtcacgatgcaaagatcggccaggcgggcgcaggcttcgcccatgccggtgcgccgcaaacggcttcgcccgccgccgcacccgaacactgtgatcagccgccggggatggtacgcccgcagggccgtcagcacgctttctgccgccgcggcgttgtgggcgtagtcaagcaccaccgtaaagggcgcggggcagggaaccacctcgcaccggccccgtaccaccgcgcctcgcagcccggcctgcatagccgccaccggcacgcccagcacgtccgccgccgcaagggctgccagtgcgtcctgtacgctgaacgccccgggcatcggcacggtgaaatccgccatccgcccgccgggcagccgcacggtgaaatcggtagccagcgcatctgccgtgcgccgcggcgtaaaccccggcagggccagccaatccgccggcgcggcgatgccataccgtaccacccggcagctgtggccttccaaaatggcgggcgtttcccggtcgtcggcgttcaccacgcctactttgcagcggcggaacagcacgcttttccaggcgcggtactcggcatagctggcatgctcgccgggaccgatgtggtccggcgacaaattggtaaacacacctacgtcaaatgcaatgccgcctacccggtccatcttcagccccaggctggaaacttccatcacacaggcgtcgcagccgtcgtcggccatgtcgcgcaaaatatgctgcagatcgcagctttcgggggtggtgtaacccagtgtgtgccgctgccccggccacaccgcgccgttggtgccaatgcatcccacccgccgcccagctgccgtcagcaccgctgccagcaggtgggcagtggtcgtcttgcccttggtgcccgtgatgccgatcatcgtcatccgccgcgcgggatacccatacagccgcgatgccatcagcgccagcacccggcgagccttgcccggctccgcctgcaccagagctgggctgcaggaccgggaaaattcaaaattggggagtgtgccctcaaacaccagcaccgccgccccggccgccgcggccgcgtgggcaaagcgtcggccgtcggtgtgctgccccggcaggcagacgaatacgcacccgggcgtcacagagcgggagtcacagcaaatggcgttcacctcgatgtcgctgcggccctgcacaagggtgcagtccagatcttccagcaggcggcaaagcatcatagggcatccctcgctttccctccatactatgcacaattttgccgttgtaaccctgggttgcaggtttgccaagcccgcttgctggactttttgcaccctgcctgctacaatagttgaaaaaaggaggtggccgccatgacactgggccaaaacttgcaggctgcccgcaaggccaaaggcctgagccaggagaccctggccgaacagatcggcgtcagccgtcaggcgctgggcaagtgggagaaggacactgccctgcccggcctggacaacttgcaggccgccgcccaggtgttgggcgtgtcggtggacacactgttgggtaccgagaccgccggtcctgccccggcggtcacgctggacgccatgcgtgacctgctggccgcccgcgatgccgagcagcgcaagcaccgccgcttgtggggcctgctgggggccgctgcggttgttgtggtggttctgttgctggtggtgcaaaaccttgcgtatcagcgcaaaatgcaaagcctgaccgacagctacgccatgctgcaatcccagttaagcagtacgaccgccgatttgagcacccgcatggacgaattgcaggatgctgtgcggcaaggcaaatccaccgtgctggaatggcactgggtaccagttgataaactgcatagggacgtgcaaagcagctggatgcctgtgctggtgcaggtcacgcccagtgagagtaccacaggcatgaccgcacggctctcggtcacctacggcgacaccaccgagctgcacgatatggacgtgctggccggagacatctatcaggcgcagctggtgtttaccgtgggtcagacctacgacctgaccatacagtggacggccgccgacggtgccgctgccaacgaaaaactgggcaccgtggactttactgccacccagaccgagccggagctggcctggggcagaacaggcggcaccctggactacggctattacatcaaccgcagcgacaataaaaagtacctgcaattgagctgctaccccgtggaagtggaactgaccgtgcctaactggatgaaaatcgacgatgtaacgctggaactgcgcacgggcgaggaaggcgaaccactggccgccgcccagctggccgcagacggctggtacagctctggtgaggaaaccatgatacacgccgtctggaacggtaccttttataaagacgatggccccaatgaatggttgtacgccgacggacagcctttctaccgcgccatcgtgaccgacgccaccggcaccacctggacctttgagatgccgttgcaagaaaaataggacggcctgaaataaatatcagaaaaaaattgaaaaaagttgttgacaaatgcgcccctgattgctataatatcatacgcagcgtgccccgtggacagggcaagaaccgctatgcgcccgtagctcagctggatagagcaactgccttctaagcagtgggccgggggttcgagtcccttcgggcgcatttatggtgcctatggcgcagttggttagcgcgccagattgtggctctggaggccgagagttcgaatctctctaggcaccccaccaaagaccgcacagtgatacacgctgcgcggtcttttctttataatgggccgtcgccaagcggtaaggcagaggactttgactcctccatccgtcggttcaaatccggccggcccaaccacgcatccccataaaaaggggatgcgctttttattatgattttttgtttgcaagggatatttttaggccggatttgaacagcccgcgccccgtgcataccccgcccaccagccgggcatactacgggcggaggtgttttgtatgtcttatctggattgcgcgcagtatgattgctgccataacaaggcgggctgctgctgcttgaacgacatcaaggtccatcacaccggcgagagtgatgccgtctgcagcagttaccgcaacagcgagggctatggcaacgttgccactgacaaccagcccgcaagccccgagaccgagattgcctgcgacgaccgcggctgccgccaccagcaggggctttgctgctgcgccagccatgtcagcgtggacacctgcagctgcggccccgcctgcgctacacgggcgccaagataaccgcaaactgcgcaaaaaggcttcccttatggaacggggaagcctttttgtgtgcttttagttgcgaaacaccgcatttcgttgtataataagacgatatagtaggttttgtgcgcccatgcgtgggtgctgtactataaatttgacgaagcgaggcgttttattatggctgcacagcccatcaccgtgccttttgtctctttccgccccatggagagggaactggatgccgatctgcgcgcggcttttgcccgcgtgctggacaacagctggtatatcgagggcaaagaagatgccgcttttgaagccgcctttgccgattactgcggcgcaaaatactgcgtcggctgcggcaacggcctggatgccctggtgcttattttaaaagcgctgggcatcggcccaggagacgaggttatcgtgccatccaacacctttattgccaccgtgctggctatctcctacgccggggcaacgccggtctttgtggagccggtgctggccagctacaacatcgatcccgcctgtatcgaggcggccatcaccgagaagaccaaggctattatggctgtgcacctctacggccagtgcgccgacatggaccctattttggagatcgcccgtgcccacggcctgaaggtcgtcgaggatgcagcccaggctcacggtgccacctacaagggccgccgcgcaggcagtttgggcgatgccgccgggttcagcttttaccccggcaaaaacctgggcgccctgggcgatgccggctgcgtgaccaccagcgacaaggccctggccgagaagatccgcgccctgggcaactacggcagcgactacaagtaccatcatatttataaaggccagaactcccgcctggatgagatgcaggcggctttcctggcggctaagctgccccacctggacgcgatgaacgcccagcgccgcaccattgccgcccgctattttgccgagatcaccaaccccgccgtgaccctgcccactgtgatgccgggctgtgagcatgtgttccacatcttcgccgtgcgctgcaaaaaccgtgatgcactggaaaaacatctcaacgaacgcggtgtcggcaccaacaagcattatcccacgcccatccatctgcagggcgcctacaaagaactgggcatccccgccggtgcgctgcccctggctgaagaaatctccgccacggagctgagcctgcccatgtactacggcatgaccgaggagcaggtaaccgctgtcatcgacgccgtgaacagctttaaggagtaaccatgcccaaggtaggaatcgttatctccaattacaacggctggcaggatacgctggtctgtctggacagcctgcaaaagcagacgtacaaggactttgaaattatcctgctggacgatgcttcgccaaatgactcggtagcgcaattgcaggataaactgcctgccaacacggtgtttctgccgcaagagcagaacctgggctttgccgccgtcaacaatgtggggatgcgccgtgcactgaccgatggctgtgactatgtgctgctgctgaacaacgacaccgccgttgcccccgatatgctggagaccttgctgcgggagaccccggcaggcgccgtgagctgcccaaaaatgttgtttatgaacccgccggacgaaatctggtttgcaggcggcacgctggatcccgctaccggtaaggtgaagcacctgggcggccacgctaaggacggtcccgcctttgcccaaaagcagcaggtgagctttatcacgttctgctgtgtgctgctgccgcgggcggtcattgaacaggttggttatctcgacgagacactgtttatgtattgcgaagatgtggattactgcatccgtttaggccaggccggtgtgccgctgtggttcctgcccgatgccaaactgtggcataaggcaggcggcagcgcgggcgggatgctgtcggtctactacatcacccgcaacacgctgtacctgacctgcaagggaaaatcccgcgcctacgcgaagaggaaaaccgtgctgccgattctcaccggcgcggcccgctatgcgctgaccaaggcgctgggccgcaaaaagggccgcagctatggcgcctaccgtggtgccgtggacttttggaacggcaagatggggcggatggaaccgcccaaaacgaaggagaattgattttggcacagacgctgtcaatcattctggcacaatattacccagacaaaatgcagctgcgccacacgctggactcgctgctgatacaggatacctacgattttgagctcatcatcgccgatgatggctcgccggaggattactgggatgacacccgcgcctacctggcggcccacggatttaccaacgtaaaactgtccaaaaacaaggtcaaccagggcacggtcaccaatatgctccacgcggtggagctggccagcgggcagtggatcgccggtatctcgccgggcgactatgtgtacgatgcctctactgtccgctgggtgctggacatgctgcgcagggacgctccgcaggtggcctttggaaagtccgcctactaccgacaggaggccgatggcacgctggtgcagctgcccggtgagaccccctttgaccgcactccctacgaggccgcccactacgataacaaagctatccgccgcaatgtgctgttgtacgatgacggcatcagcggcattgaaacaatgtacgagcgcggaattttcctggatgcgctgcaaaagatgaatggccgtgtccgctttgccgaggactttgccacccggttgtttgccgtgcagggggttccgatccgctgctatgatcggattctgcgctggtacgagtacggtaccggtgtttccaccaacgagaaggcccgcgccaggatggaagccgattggcgcgccatgctgacgctgatgcgggaattgtatccccaagaccggctggtacggctggcgtgggagtattaccacaacgaccgccacaaatcccgcctggtgcggggattgatcggccgtctggttgtgccgcagaactgtgcgttcaaaaaggcgcagcacagctggcagccgccgattaacggcgatatggctgagttgaagaaaatctacgcctatgccgaggaggacacacacgcatgacaactttgcagagcggggaagatgccctgctgcgccgggtcagggcctttgattgggcccgcctgaaatggtgctttgccgcaacggcgctgtgtatgctgctggcgcacggctttgcatggtttaacctgttccccagccatgacgcgaccatcctgttttttgatgccgatgttgttatgctgcagttgggtcgctgggtgcagctgccgtattaccgctttctgcgcggcaaaatcaacatgccctggcttaccggtatgttcagcgtgctgtgggtgtcgctttcggtgtacctgatcagcagtttgctgcagctgcgcaaaaaatccatggccgctgtggcggcggtgtttggcacagccatcagcgttacgctgctgaatgctacttataacgataaagcagatcttttcacctgcgccatgatgttggccctcttgggagcctgcgccgtgcgtcgctgccgccgcccttggttgggcgtgctgctctgcggcgggtgtctctgcctctcgatgggattgtatcagggctacattgagttcgctatcggcctgcttttgctgtgcatgctgcgggattgtctgacgacagatctgccttggaaagactatctgcgccaaggcatcaccgccattgcgggcctgctgttgggcggcgtactgtatgctgtatcgatgaaagcggtgctggcttataagcacctggaactgatcgacagctccaacggcctgcagcagatgagccgtgccggggtggcggattacctggcccgcctgcccggcgcgtacaaacaggtatttaccaccctgctggggtatgatgtctggaacaaccgtggcatgcggttggcaacggctgtctgcctgctgctgggtcttgcctgcctggtactggccctgtgtaaaaagccactgcgcgccgctgtgcaggtgattatcctgttagtgctgctgccgctggggctgaatgtggtgtatctgctgtcggaaaagcaccccacgctgttgatgctgtacccggtgtatctggtgtatgcgttggtgctgctgctgactggactggagccggacaccatcccccgcagcgccgccttgctggcttgcctgctgtgcgcctttattgccgtgcaaaatgtgatttatgccaacggcgcttacacctaccgcaaactggtctacgagaacacacgcgcccaggtgtataccattatggccaaggtggaggacctgcccggctatgtggaaggagagaccccggtggttttctccggtgactttacggattccaacttcacctaccacaacgacctgatccgcctgtatgaggaaggggagaccggcctttccggctccgccattacctatgatggcaccatcaagtggtggttcggcaatatcatgggcagcagcgccaaagtggtcaacacacaggcggaactggatgcctgggccgaaaatcctgctgtgcaggccatgcctagttaccccgccagcggctgcattgccatggtggatggtgcggctgtaattaaactgtccgattaacatgccagaagaaaggcagatacaacaatgattattcaaacgatccgcatgaaaagcgtcaccgccgagggtatgggcaccctctcggtctttgaggccgagcacgatgtgccctttgccatcaagcgtatctactacatccacaatgtcccggcgggcgtccagcgtggcggccacgcccacaagaagctgcgccaactgctgtggtgcccctatggcaagatcttgatcaagctggatgacggcttcgagaaagcggaagtcctgctggacagccccgacaaaggcctgatcgtggaaagcaacatgtggcgcgacatgctgtggcagcaggacaattccgtcctctgcgtcgcggcagattccttctatgatgcggacgattacatccgcgattacgaggcgttcctgcgtcatgtgggcgcagaggaccccgcaaaggagtaaagccatggattgggcaggaatcgatgaatggatctaccgccgcctgacggaactggtggatgtgctgccaatgcgctttgtcaaactggtagcacacaattataccgatgcccgcgtgcgcaagctgtattggcgccgcctggggctggaaatgggagagggcacctatgcaaatctgggcctgacgctgctttctgatgattatacaccgcgggtgcatatcgggaaccacgtttccatcgcagccaatgtgacctttgtgccgatggcctcagccaataatgggcaggagatcaacacctacccgtatgtgagggaccacctgacaaaggcagctgacatagttgtagaggatgaagtctggatcggcgcagatgtgacgatcctgcccggcgtgcatatcggccgctgtgcggtcatcggcgctggcagcgttgtcaccggggatgtggaggcttaccacatttatgccggtgtgcctgcccgcaaaatccgggatattcgcaccggcgaacgggtgcagtaaaacaagcaggggagaagtatggaatttacagtacagccttatactgcggatcaggaagccgcctgggaccgctttgtgatgcaggaaagcggcaacggtacttttttgcagacccgcaactttttaaactatcatccggcaggccggtttgaggatgcctcgctggtggtcaccaacgagcgcgatgccatcgtggccgtcgtgcctgctgccgtgcagcagcgagatggaaagcacacctttgtttcgcatccgggcagtacctacggcggcccggtcttgcgggaggcgtacaatacggctgcgcgggcgattggcattctgcaggccattgatgcgtatgtagctgcccactacgaggccgccattttccgcccgaccgtgggtctgctggaaaaggaagaaaaccagaccctgctctacgcctttacctatttgggctatacccagtttaccgagctgaacacctgggtcccgctggcgggtaaatcggcagaggatattctggcgtcgttccggcaggataagcgccagaatgtccgcaaggctatgaagcatgacctgacgttccgtgggctggagacccaaaaagaaatcgagacgttccacggtctgctggcccaaaacctggagaagtacggtgtccagccggtgcataccgctgacgaattatgggagttcaagtccagccgcctgcctgaaattgccgagttttacggcgtgtttgagggggagcgcatggtggccggcggtatgactttctacttcgagcaggctaatgtcgttcatacccagtacctttcggcggacctgagcatccgtaagtacagcccggcggcgtatctgtattatcaggtgctttgcgctgctgcagcaaaaggctgtaaggcactgtccttcggcatttcgaccgaagataacggcaaagtgctgaactttggcctggtggaaagcaaagagggctacggtagccgccatgccctgaatttgagctttgcaaaggatttttaaacaggaggaaaccgcatggcacagcccaaggtcagcatcctgatctctttttataatctggcgccgtatgtggatgaaacgctgcaaagtgtactgaatcagaagacagactttcccattgaggttctgtgcgctgatgatggctctgcagataatacggtcgaaaagctgcgccagtgggagaaacggtatccagaaactgtgcgtgtatttgtgatggattttatacccggagaaaagcgaccaccggatgtccgtattaaacgactcaatgcgatccgcagccgccttttccgtgaggcccagggaacatatatctgctatctggacggcgacgatttttataccgatccgtataagctgcagaagcaagcggatattttggatgcagataccgagaaaaagtatgttgcctgcggccataacggctgtttctattggcaaagtacaggaaaaacgcgacccattgaaaagcccatccgggaatgcagcctgacggctaaggagtattggagctttttgtatatccatacgaatgccttgatgttccgcaatctgcgcttgcaggaaatcgacccatttgccagcggtgttaccattgacgataacctgttgacagcgcagtttttgccctatggcggaatctactatctgccagattgtatgtttaactatcgccagacagaaaacagcacctttcacctgcgcagccagtaccaaaactttatgctgggctgcttcatgatttatgaactgcaaaaagtagacaaaagtatgttcccgagcagcctggtacgtatgatttacgaatatacagaactttacaaggcccgcaaagacccgcagctggcggaagaagcgcagatttttatgccgcgtttccgcagttatcatgctggccgtctctgccgcctggtcaactacagctgcgaagccctgccggcgcggctttggtgcgaggtggaaaataaattctggttctttatgaccaaggtgttccgccattttatctggaaacccaaagtacgagccctactggaagaagcccgcatcaagctggaacagcagcctgctgctcaataattacctctctcccaaaaagaaaggattgccatgccaacgatcagcgtaatcatcccggtttataaagtggagcgctacctggacgcttgcgtggccagcgtggtggggcagacctatcccgatttggagatcattctggttgatgacggcagccctgacaactgcccggccctgtgcgatgcctgggcggcgaaagacacccgcatccgggtcatccaccggtcgaatggcggtttatctgcggctcgcaacagcgggttggacatctgtactggtgaatatatagccttcgtggacagcgatgaccgccttgagccggaaacgctggaacgcgccttgcgtgcccagcaaaggtccggtgcagatttagtccttttccactacctctgcactgatgaaaacgaccaacccctgccggaccgcactccggcggatcgtgaggaagaagcgttgacgccgtcgcaattctgggaaaaattctttgccagcggtgatgcctgtacctattatgtggtggcatggaacaaactgtacagagctgagctgttccacacgctgcgctatgccgagggcaagcggtatgaggatatgttccttttgccgaatttgattgggcagtgcaggaaaatcctctgcctgaatttccgcggttaccgctatgcccagcgcaccggcagcatcatgtcccagggcgaccctcgcaactacctggaccgcagtgaatacctgctggaatggaccactaccttcgccgccaggggcgacactctgcgggccgaggggcttttgaacgacgcaattgaaaatctggccgagaaagaccgcttcgacctttccacccccgcccaacagcagcgctaccgcacagcctgccgtgcctgcgccgatgcctaccgcgaccttgcccagcgcaccggccggcgcagtatgctgttgcgtgccgcactgctgcggttgggcctgccggtttaccaggctttcctcaaacacaaagcgtaaggagctttactcatggagcaaacacaacccaaaaagcagtaccatgtgcattacggccctgccgggggccgcacccgcgtggattttgatgaactgtggcggtatagggatctgatctggctgtttgtcaagcgcgattttaccgtgctgtacaagcagacggtgctgggcccggcgtggattttaattaacccgctgctgtccatggctatgtacacggtcatgttcggcacgatcgccaacctgtccacaggcggcgtgccgcagccgctgttctacctggcaggcacggccgtatggaccttcttctcctcctgcatcaacaaggtgtcgggcacatttaccaccaactccaacatcttcagcaaagtgtattttccgcggctggccatgcccatttccacaatgctgtccgggttcatcaacttcctggtgcagttcgtgatgttcttctgcttactgctgttttacgtggtgcgcggcgaggtggcccccaactgggcggctatgccgctgctgcttcccatcgtgctgcaggtgggcctgctgggcctgggctgcggcatcatcgtgtccagcgtcactacccgctaccgcgacctgatggtcgttgttactttcggtgtgcagctgtggatgtacggtacgccggtggtctacccgctgtcgatgatcgccaacccgctgctgcgcgcggtgatgatcgccaacccgatgaccgccccgatggagagcttccgcgcggtctgcttcaactccggcgaggtatcggtgctgatgtgggtcatctcgctggcctggacggttgcgctactggcggtgggtgtttcgctcttcggcaaggtggaaaagacctttgtcgatacggtctgacgggaggtacagcatggaaaatcaggaattgatgatccgcgtgcaggacgtcaagaagcagtatcgcctgggccagatcggcggcggtacactgcgcggcgatctgcaaagctggttggcccgcaagcgcggcagggaagaccccaataccttgattggcaccgaccaacggctggtgggcaccacctttatggcgctcaacggcgtcagctttacagtaaacaaaggagaggccgtgggtatcatcggctccaacggcgcgggcaagtccacgctgctgaagctgctgacccacgtgacggcccctacctccggcgatattgacctgtacggccgcgtggcctcgatgctggaagtcggcaccggtttccaccccgagatgacgggccgcgagaacgtctacctcaatggtgccattctgggtatgacccgcgccgagatcgacgccaagatggaccagattatcgagttttccgaggtcggagacttcatcgacaccccggtcaagcgctactccagcggcatgtacgtcaagctggctttcagcgtggcggcccacctggacagcgagatcatgatcatggacgaggttttggccgtcggcgacatgaagttccagaaaaaatgcctgaccaagatgcgccaggccgccaagcaggacggccgcacggtgctgtacgtcagccacaacatggccaccatccgcgacctctgcgaccgctgcatcgtgctggacaaaggcaaggtcgtctttgatggtgatgttgacgaagctatttcaatttatttggcaactaagtctcaggcaacagcctatgtggattattccgatgttaagcgggacaactggttcaagcgggataatctgcggctgcagacggtgcaatttgatgtgccttcggtagaagggatggaacgcatcgagccggtgaaagtaaagtatacctttacagcaaaagaagcagcagaacatgtcggacttttgttcgaggtgcgcgatgagcttggtaatccgctggcggcatcctgcctgtatggtttgcagctgcataagggtgaaaaccacgtaacagtggcttacgacttttcagttctgtcgccagggcagtacagcaattattttacaacgatttcttttggcgatggtggaagttatgctgtggaggactgggtacctggtattcagttcaaaattgtagatacaaaagcaaatgaaaatagactggaatggaacgcaaaagatttgggcataatccagttaccggatgcctgtatgtgtgaggagggctgacagaatgaaaaaagtggcagccctgtatatgtgcacgggacaatacctgaaactgtggccggaatttctagcaagcgcggaaaagtacctgctgaaacagtgcgaggtacattacttcgtatttacggatgcagaccacttggagggagaagaatccaattcccgtgtgcatcgaatctttcaaaaaccgcagccgtggccctatacaacgctgaagcgttttgaaatctttttgcagattgaggatgaattaaagaaatttgattatatctatttcttcaatgcaaactgcgagttcaaagcccccatcacagaagaaatgtttttgccgcgtccggaaaagcacgagaagatggtattcgttcttcacccgtgtttttacacttggtataattacgagtttacctatgaccgtaatccccgcagcaaggcatttatcccgatgggggtaggacgtgactatgtgacaggtgcggtgaacggtggtgaaacggaagcgtatctgaagttttgccacctgctggataaacggattaaccaggatttggcgaaaggtgtcattgccctgtggcatgatgagtcgcatatcaactggtatgcgttgacccatccacactataggcttctggatgccagcttctgctattttgaagattacccgctggacaagccgatttatatctacctgagattaaagtcccattatttcgatgtggatacattcaagaaggatccacctaaaagccaacttaccccgcgagaggaaaaatttaatgccgtatctttaaaattggcgcaaaagattcagcgccacatcccatggcttccccgtaggaaagaaaaataaaccaaggagcacagcctgtagaggttgtgctccttggttatttttaccgataatcgatccccagcgtgggcaggccgttcagggtccaatcggccaggttgccgtcctggtactcgtagtagccttgggcggcgatcatggcgccgttgtcgccgcagtatttcagctccggcaaaaagacgcgggcacccagtttttgggcaccgtcgttcaccagctggcgcaggcggccgttggcggcgacgccgccggccagcacgacctgcttggcaccggtatcggaggcagcggagagcagcttcttggccaagatctggtcgatgcgctcctggaagctggcggccatgtcggccacattgaccggctggcctttctgctcggcgttgtgcacctcgttgatgacggcggtcttcaggccgctgaagctgacgttgtacttgccctctacatggggcacgggcagcttgtaggcgtgggggtcgccgtcgcgggcggcggcggccacactgggaccgccggggtagggcaggcccagcgtgcgggctactttatcgtaggcttcgccggcggcgtcgtccaccgtgcggcccagaactttgtagcggcaccaatcctccaccatcacgatgtggctgtgcccgccgctggccaccaggcagagaaacggcggatgcaaactttggtgggtcagatagttggcggcgatatgtccgcgcaggtggtgcaccggcaccagcggcttgcctgccgcataggccaggcccttggcaaagttgacgcccaccagcacggcaccgatcaggccgggcgcaaaggttacggccacggcatccacgtctttcatggtcatgttggcatcggccagggctttgtccacggtggcactgatatactcagcatggcggcggctggcgatctccggcacaacgccgccgtatagggcctgctctttcacgctggtggagatcacgttggagatgaccttgcggccgtcctccacgattgccgccgcggtctcatcgcaggtcgattcaattcctaaaacatacatttcaatcacccttattgtgactcttgaactgccagaagcactttgtaggggcgaacactgttcgcccgtggccgtttggcaggcaagaaactttcccgaaaaagtgcggcctcatcaagcaggcgggcgagcactgctcgccccctacacctctgcgcagaaaactttaatgcgcttccagccaggtcttgccggtgcctacctcggtggtcaggggcacgttgtagtgcaccacatgctccatttcctcctgcaaaatgcggcgcacggtgtccacttcgctgtccggtgcctctacgatcagttcgtcgtgtacctgcagcagcaggcgggcctgcaatttctcatcccgcaggcgctgccacacatgcaccatggccagcttgatgatgtccgcggccgtgccctggatgggcgtgttgcgggccatccgctcgccgctggcgcgtacctggaagttggaactggccagctccggcagggcgcggcggcggccaaacagcgtttccacgtagcctttctccttggcgtgggcaatgcagtcctgcatgtagccgtccaccttggggaaggtgtcaaggtaagtcttcaggaaagcgtctgcctctttcaccgagacgtccagatccttgctcagcgagtaggcacccttgccgtacatgatgccgaagttgatggccttgctggccgagcgcagctgcggtgtgacttcgctttcggggatgtggtaaattttggcggcggtggagcggtgaatgtccgcgccgttcaaaaacgcctgctgcatgtgctcgtcgccggtgatgtgcgccagaatgcgcagctcgatctgggagtaatcggcgtccaccaactgctggccgtccccggccacaaagtagccacgcaggcggctgcccagctcggtgcggatggggatgttctgcaggttcggttcggtggaggagatgcgcccggtgcgggtctcggtctggataaaggtggagtgcacccgaccgtccgccgcctgcgccgccagcaggccatccacgtaggtagacagcagtttggcgtaggtgcgatactttaagatctcatcaatgaccgggctgtaagggcgcaggctttccagtgtggcggcgtcggtggagtagccgcgggcgtttttcttgcgcggcggcaggcccagcttgtcaaacagggcttcgcccagctgcttggggctgttcacgttgaactcgtagcccacctcagtgtagatattctgcaggatgccgtccagctcgccccgcaggctgtcgccaaaggcgcggatgccgtcggcgtctaccgcaaagccgatgcgctccatgtccgccagcacgcgggccagcggcagctccatctcatcgtgcagtttgcgctggccgctggcgtccagctcggcggccagcctttccagcagcgcggccagcaccccggcatcgggggcggcttcgcagtggaacgccgccgccacgccgtactcggcagccagagactttaccgcatagctggtggcggaaggattgagcaggtacgcggccagcttgccgtcaaaatgcagggctttgccaatatgcccctgctccagtgccaggcggtagaggggcttcgcgtcaaaggcccagatttcggcatcgctgtccagcagggcggccaggcggtcggtgtctggcaggtagacttcctgtccctgtacggcgtaccagccgccgtcggcgttttgggccacaaacaggcggccttccaccagcagcggcaggggggccggctctacttcttccggcggagcagcgtccacgggggcggcagcggcgccgccctcctccagaccccagcggtccaccatcttatgcatttccagcgtggccagcagctgggcggctgcggcgggatcgccggactggcggatataggcggcggggtccgtctcgatgggcgcgtccttgcggatggtacccagcatgtaggacaggtccgccttatcgcggttggcagaaagcttggcccgctggccgggcttgatggccttgtcctcgaggttcgcgtaaatattttccagcgtgccgaacttcgccaccagggccagggcggtcttttcgccgatgcccggcacaccgggaatattatcggacgaatcgcccatcaggctcttgacgtcgatgagctgctgcggctccacaccatacttttcgcggatggcggcggggtccatggaaatcgtctctttgttggtggccagcagaacggtggtgttgtcgtccaccaactgcaggctgtcccggtcgccggtggccagcagggtggtgccaccggcggcctcacaggcggcggccagggtgcccaaaatatcgtcggcctcccagccctcactgcttacctgcacaaagcccaggtcggtcagcaattctttcagtacgggcatctgctgggccagctcctcgggcatgccgtggcgggtggccttgtagccgtcgtaggccttgtggcggaacgtcggggcgcgcaaatcccaggcaatggccacagcatcgggcttgtgggcggccagcaggttgagcagtatattctggaagccgtaaatggcgttggtatagcgaccgtccttggtcgtcaacagcttgatgccgaaaaacgcgcggttgaccagactgttgccgtccagtaccatcagtttcatagcgttgctcctttttaaatcggatgtaaacaatctatcttttagtataccacaaatgcgggatttatggtagaatagaatctgaaattcaaatagtaaaagcggccgcgcaaaagcccccttggagggagccaaaggcggcgctacaagagaggaactatgcagttacgcaatttgcagatccctgctggggcggtgtttgccccgatggcgggcctgacagacgctgcctgccgccacctgatggccgaccacggtgcagcctggaccgtcagcgagatggccagcgctaaggccctgaactttaacgaccaaaagtcctttgctctgctcaaagatgcccacccccacgggctgtacgctatccagctgttcggctgtgagccggaagccctggaaaaggccattttgctggtgcggggaaagggcatacggtttgatattttggacatcaacatgggctgccccgcgcccaaaatcaccaacagcggtgcgggcagtaagctgctgctggacccacccctctgcggacggatggtcgctgcggcccgccgcgccctgggcgaggatacgcccctgacggtgaagatgcgcatcggctgggacgccgaacacatgaccggcgtggaggtggcgaaacagtgcgaggccaacggcgcggacctgatcgccgtgcatggccgcacgcgggagcagatgtacgtgccacccattgatgccggtgcaattgccgccatcaagcaggcggtgtccatcccggtgctggccaacggcgatattaccactgccgagggggcacttaccttattgaaagagaccggctgcgacggcgtgatgatcggccgcggcgcactgggcgacccgtggctgtttgagcagatccgcgcggccctgctgggcgaggaagcccccgctgagccgacgctgaaccagcggatgaacgccctgcgggcgcaaatttacgaaatgtgcgaggaaaaaggcgagtggctcgccatgcctcaggcccgcagccaggccatgcactatatgaagggcctgcggggggcagcctccctgcggcgctactgctccatgttggagcatttcaccgatgtggacaagctcatcgatgcggtgtatcggctgcaggagtgatcaaaaccttcctctcgtcagctcatccagattctgcgtatagcacggcagcatgtgggtgatgaaatactccgcttcggggcagtccattccgtgcagggcggccagctgctgctcccgcgcggcttcaaactcccgattgccgctctggcactcttccaaacacttgattaaggccgagagccggtccgctgcctttaaaattttccgctcggcgtcatttagcacgcggccggtcaaaaattcctcggtctcgctgcgcagggcttcgggctgcaggctggccatcagccgggcactttcctgctctaccgccttgtaggcgctgcgcagggcttcatttttgtacttcactggggtgggcatgtcgccggtcaaaatttccggcgcatcgtggtacagcgctgccgtggctaccatttcgggccgcaggtcggctccggtgcccaagcacttttggccaattaagcaaagcgcgtgggccagcagggcggtgtctgccgtatgctcgctcaggctttcggcgcggccgctgcgcatcaggctccagcgggtgatgtacttcatacggcccagcagggcactgaagggataagttttcatcttgcacgatcctctctgtggtgttactatcagtataccatgattttaccaaaaacaaagtcccatggttcggactttcagcggggtttgttatgaaattgcagcttcccggcaaaaaaacaagatactggcaggtgttctggctctgcctgctggcggcggccgccctgtttgcgccccactgcctggtggatgccgtcgcaggcggcgggtacttccattacgcgggcgatttcaatgaccagcagatcaacttttaccagtacgccaacagcttcatcaagcaggggggcagcttcagttgggctaccgatctgggcagcgggtttgtcaattcctactcgttctacctgctgggcagcccgtttttctggctgacgctgctggtgcccgcgcggttcatgccgtggatgatggtgccgctgctctgcctgaaaatcgccctggccgggggcggcggctacctttgggcgcgccgctgggtgcgggacgaggattggagcatgctggccggctgcctgtatgccttctccggctttacggtgtacaacatcttcttcaaccactttttggacgttgtggcgctgtttccatacatgctggcggcgctggatgatgcggtcatcgatggcaaaaaaggtcgcttcccgttctgggtggcggtgaatctgctcaacaactactttttctttgccgggcaggcggtctttctcatcatctactttttctgcatgctggcggggcatgcctacaaaatcggcccccgcaagtttgcattgctggcaggggagaccctgctgggctgtgccatgggctgcgtgctgctgcttcctgccgggctgtcactgctgcaaaacccacgcaccatcgacccattcaacggcatgggctacctggtctacggcaaggcccagcagtacggggccattttttacagcgcctttttgatgcccgacgccccctactttaaggatatgttcagcgaaggcatcctcaaacataccagcatgacggcctacctgccggtggtgggcattgcgggcgggctggcgttctgccgcgggcggcgcagccacccgttcacctacattttaaaggtgtgcgtggtctgcgcctttgtgcccatccttaacagcctgttctatgccctcaattccagctactacgcccggtggtactacatgccggtgctggtgctgtgcggggccacggcgtcgctgctggcacggccccacctggcccggcgggaactgccccgcgcctggggtttgacgctggccgttactctctcggcggcggcgttcggcctggtgccatataccgatgatgacggcgtgaccaccctcggcgtcaccgaggaacccgcccgcttctgggccatcctgggcgtatcggtgctgggattggtgatcttcggcgtgctgtggcacttcttccgggatcgccagcgttggcctaccgtactgttggccgccgtgctggtgttcagctttgtctatggcagcgtgcacctttcgttgaccaagtacgcccagtgggataccgatagcgacctgatcgcggaaacgtatgattctgtgcaggaggtcaaggaagccctgccggacgatgcgttctaccgcatcgatgcctacggtgcccacaacaatctgggcctgtggtttgacaaaagctgtttgcagtttttcaattccacggttgcccccagcatcatggagttttatccggaagtgggcgtcaagcgggacgtcaactccaagccggaggtccaaaactatgccctgcgcgggctgctcagcgtgcggtacacgctggtggctaaggatgccgatagcaactggcagggcgaggacatggacggctgggacctggtaggcagcaccagcgcctaccagatctacgagaacaaaaactgggtgcccatgggttttgcccagcagtattatgtcaccgccgatcagctggatcaggtagacgaggacagccgcgcccagctattgttgcgggcggtgttgctggacgaggaccaggtcgccgcctatggcgacctgctgcagcctatcccggacgacaggctgaccaactgcacgcaggacacctacgccgaggattgcaccgcctgccgtgccgaggccgtggaaaactttaccgccacccgcaccggctttaccgccgagacggactacgacaccgaccggctggtgtttttcagtgtgccctacgacgacggctttaccgccgccatcaacgggaaaacggccaaaatcgaaaaggtcgataatggcctgatggccctgcgcgtcccggcggggcagacctgcatcacctgcacctaccacacccccggcctgcgcaccggcaccatcatcagcctggccgcgctggcggtgtatggggcttatttggtggtgctgaaaaggaaaaaatgcctgtaatttgccggttcctatgatattgttgaacgctcgtgtaggggccgttgcaagcatccgcccctgcaggcaggtagccaatttcttatccgatcctataaaactgaaagtgagtatcccatgtctgattatgcacagcagcttgctgccgaattgaatctttctgctaaaaatgtccagggcgcgatcgacctgatcgaccagggcaatactatcccgtttatcgcccgctaccgcaaggaggtcaccggctcgatggacgaccaggtgctgcgtgacctgggtgaccgcctggaatacctgcgcggcctggataagcgcaaggaggaggtcacttcctccatcaccgagcagggcgccatgacccccgaactgactgccgccctctccaaggccaagacgctggccgaggtcgaggacctttaccgcccctacaagcccaagcgcaagacccgcgccagcatcgccaaggctcgcgggctgcaacccctggccgatgcgctgctcaagcaggacgctgcctttgaccccaacgctgcagcggcggactatatcaacgaggaagtccccgatgccgccgctgcgctggccggtgccaaggacatcatcgctgaggctgtttctgacgatgccgcctgccgcgccgaactgcgccgctactaccgcgccttcggccgcatcaccagcgtcaaggccaaggatgaggacagcgtctacgctcagtattacgactacgccgagccactgaacaagattcccggtcaccgcgtgctggccctggaccgcggcgagcgggaaggctttttgaaagtcagtattcaggtggatgccgagcgtgccgggggcatcgtggcctggatgttcgcccgcaaaaagaccggcggtgccagcgcccagctggtggaagaagccgctctggatgcctacagccgcctgatccaccccagcctggaaaacgaactgcggggtgaactttcggacgccgctgctgagggtgccatccatgtctttggcgacaacctgcgccagttgctgctccagccgcccatccgcggcaaaaccgtcatgggtctggaccccggctaccgcatgggctgcaaggtggccgtcgtcgaccccaccggcaaggtgctggataccaacgtggtataccctgtgccggagttcaagcgcgttgaccaggcaaaaaagaccatcaaatcgatggttctcaaaaacggcgttgaggtcatggccatcggcaacggcaccgccggccacgagaccgaggaattcgccgcccaggtcatccgggaactgggcgacgagagaaatctgcacttgcagtacatggtcgtcagcgaggcaggcgcgtcggtctactctgccagcaagctggctgccgaggagttccctcagtacgatgtcaacctgcgcagcgcggtgtctatcgcccgccgtttgcaggacccgctggccgagctggtcaaaatcgaccccaaggcagtcggtgtgggccagtaccagcacgatatgccccaaaagcgcctgaacgagacgctggacggcgtggtggaggactgtgttaactcggtgggcgttgacctgaacaccgccagtgcgccgctgctgcgccgtgtggcgggcgtcagcgctgccacggccaaaaatatcgtcgcctggcgtgagggggagggggctttcacctcccgtgcccagctgaaaaaggtcaagggcctcggccccaaagcctatgagcagtgcgcgggcttcctgcgcctgcccgaggccaagaaccgcctggacgccactgctgtccaccccgaaagctaccccgccgccaaggccctgctggatgcctgcggctacaccactgccgagatcggcagcgacaaactggcgggtctgcctgccgccgtcaaggctaagggcaccaagaacctgtgtgagacgctgggcattggcgagccgacgctgaacgacatcgtggccgagctgtgtaagccgggccgcgacgtacgcgacagcctgcccaagcccctgctgcgcagcgatgtcatgagcctggaagatctcaagcccggcatggagctgaccggcaccgtgcgcaatgtcatcgacttcggtgcgttcgttgatctgggcgtgcaccaggacggccttgtgcatgtctcccagatcagcgataagttcatcaagcatcccagcgaggtgctgaaggtgggcgatattgtcagagtgaaggttttaaacgtggataccgccaaaaagcgcattgccctgacgatgaagggcctgcattgaccctttgcatggaaaagaaactaaaaatttgtacatctgttgcaatgcagaaaaatctgccgcctgtttgttgtgccgaacagcaaacaaactgcgcaaaaataagcgaaaatattgtaaaactataaaagcagatgggcaaaaacataaaaaccgtgtaagcatagcggcgaatctgttaaaaccgtagcaaagtcaccaaaaccacaaaatgaagatttgacgtttctgtgcaggaaatggaaaaaagcggttttgtgcatgttacacaaaccaaacgggaacaattatgctataatgcacaatgcaaggacgagagaaccgagctggatacccagccgggcgcccttaccgccgcgccatgatgggtgcggtggggatttatgtttggaggtcattatgatggtgaaacaagtcaaggtttccaattttactgaggtaaaggggatcgtgtctgctgccgccaagtgctataacgatgtcggagttcacgatatgaagggcagcattgccgatgccaagagcatcctgggcatgatgagcctggattacagccaccccgtcaagatcgtctgcgagaacgagcacgatctgaacagcgttgtcaacgcgctgaaacagtaaaataaggaaagcgccctcagccgccaggctgggggcgtttttatacgaaaaatagcatgttagaaaacacgagaaaacaagagcatttgcgagaattctcgagtatgccaggaataaattaaaattcttgcgaaaaaccgttgactctgccgcccaattctgctataatcacacttgcgcgaaaaagcgccgccaaggcgctgttaaataccgttataagacggacgtgttaattcttcaatggaggttcctactatgagcacgactctcgctaagcccgctgaaatggctgaccgcaagtggtatgtgatcgacgccgccggcaaacccctcggccgcgttgctgccaaggctgctgtcatcctgcgcggtaagaacaagaccacctttactcctaacgttgactgtggtgaccatgtcatcatcatcaactgcgaccaggctgtcctgaccggcaagaagatggagaagaagttccatcgcactcactccggctggatcggcggcctgaaggagacccagtacaagaccctgatggctgagaacagcgacaaggctatgacctacgctgtcaagggcatggttccctctaacaccatcggcaccaaggctatgacccgcctgcactgctacaaggctgctgaccacgcacatgctgcccagaagcccgaagctgttgagatttaagtaaggaggcaatagaatatgtacgagacgaaaccttatttctacggcactggccgtcgtaagcattccgttgcccgcgttcgcgtttacaatggtaccggcaaggtcaccatcaacggccgcgacatcaacgattactttggcctcgagaccctgaagctgctcgtcaacagccccctggttctgactgagaacgagggcaagtttgacgttgttgtcaacgttgttggcggtggctgtgctggccaggctggcgctatccgccacggcctgtcccgcgccctgctgcagttcaaccctgagctgcgcccggctctgaagaaggctggcttcctgactcgcgatcctcgtatgaaggaacgtaagaagtacggtctcaaagcagcccgtcgcgctccgcagttcagcaagcgataatcgactgctcagactatatcaaaatggttcaaaaagcc

SEQ ID NO: 7801 - DNA, 1189 bp, Unknown
  gut microbiota DNA sequence
gctaatgaaatgtacgagcatacaaagaatgtgaatacatattattttgcggagattgctgtggatgccgatcatgacggcaacatatacgaatgccgcaagcggggatttgaatcgcttgaatctaaccctgattttctgcaaaataccgtcagaaaaggcagctatggtgaggattggtcactgcgtaaagtcctgcgccgttttatctggcatgaccgtatccacgcaagagccatgtatcgaatggcgataaaagtgttcggggcggagaatgtggtaaatccgttttgcttttgattggagaagactatggacattgaatttgtaaatccgggcgttgattatatgattcagcggattatggacgttcagaccgaagccgaatcagccttttggtctgaacccctataccgtttctatccgcagcttgataaagcctatgctatcagtttacctttctccgaaaggaacgaatacattgagcgaacaatgcgagccgtttatgccaagttagaagatacgatcaacgaaaaggtggctttatatattcgccattggaacgcttgtaagccacagattacagcagctttatcggatgcttttggcgtggattgtgctaacttatttaacgacatacggtgcaatgtgagcttgaatcccattgagccacggtttctaaaagaacgctgttatgatactttctatctgaacagcgaaagaggcgctatcggtggtggaatacacgagatcatacattttgtttggttccatgtatggaatgggttgttcggagacagttacgacgaatatgaacgcccatcactcaaatggattttgagtgaaatggtggttgagtctgtgatgaaggatgaacgactcagttccatcaatccctacttccccagagagaacggcggctgcatctacccctattttttcgatatggtggtggatggcaaaccaattttggacacgctggatgccatgtaccagagtcagagtatcgaggattttatgcggaatagttatgcttattgcaaagaacacgaagcaactatcagagagcatattcaaaattcggagggcggtatctttgccggataacagaaatcgcaaacgaccgatacaggtcaaattctttgtagacgaaaaagagcttgctgccatcaagcagcgaatgatggag

SEQ ID NO: 7802 - DNA, 5274 bp, Unknown
  gut microbiota DNA sequence
cagataatactttgtgtattatcgagcattttggcaacgcaggtgccgtgccgcagccgccggagcggcgcttaagccgtcaggcgggaattgtgcggtattgccttagatagataaggtgattataccatacttttaaagaaaggggaagtaggcgcgtaccagcccacagcagaacatcattcggcaacattactaaaacaaaacatctggcattgtgcaaaataccggttgacaccaccggcaaaatccgctagaataatctcattaattcaaatgcaaagatggggagaaagccatatccactccgttgcagagagccgtcggttggtgcaagacggtgcggcagatatagcgtcactggccccggagcagctatgctgatagcgtttcccgctgtaggcatggccggcacctgaccgttatcacgcaggagcgattcgccgtttgcttgttttacgcaaactcgctgatcgtgcagagaggtcgcatcagcgacaatgagagtggtaccgcgggtacagcaactgtaaatttgctcccgtctctcaaaggcaatccgcctttgggggacggtttttctttacctcctccaatggcttcacagctttgaaggaggcatttttattatgatggacgcaaccaagtatcatgtagggtattatccgccaccggtcgagcccggccatgtgtatgagtggaccaaaaaggaccacatcgaaaaggccccggcctggtgcagcgtggacctgcgcgacggcaaccagagcctgatcgtcccgatgagcctggacgaaaagctggaattctacgatatgctgatcaagatcggcttcaaggagatcgaggttggtttcccggccgccagcgagactgagtacgagttcctgcgcaagctcatcgacggcaaccgcatcccccaggatgtcaccgtccaggtgctgacccaatgccgcgaccacatcatccgtaagacgtttgaggccgtcaagggtgcgccccgcgccatcatccatttctacaactccaccagcgtcgcccagcgcgagcaggtgttcaagaagtccaaagaggagatcaagcagatcgccgtcgacggtgccaagctggtcaagcagctcagcgaagagtatgagggcaacttcctgtttgagtacagccccgaaagctttaccggcaccgagccggagtacgccgtggaagtctgcaacgccgtgttagacgtcatgcagcccacgccggaccgccccatgatcatcaacctgccggtcacggtggagatgagcatgccccacatctacgccaaccagatcgaatggtgttccaaccatctgaaatatcgtgacagcgttattctttccacacacccgcacaacgaccgcggctgcggcgtggcggatgccgagctggccgtgctggccggtgcccagcgcatcgagtgctgcctcttcggcaacggcgagcgcaccggcaatgtggacgccatcaccctggccatgaacatgtacagccacggcgtggacccgcacctcgatttcagcgacatgcccaagatctgcgagatttacgagcgcgtgacccgcatgcacgtctacgagcgcacgccgtatgccggtgccctggtgttcgcggccttcagcggcagccatcaggacgccatcgccaagggcatgacctggcgcaaggaaaagaaactgcatgagtggacctgcccctacatccctatcgacccgcacgatattggccgtacctacgatgccgacgtcatccgcatcaacagccagagcggcaagggcggcatcggcttcctgctgcagcagaactacggctataacccgccgccgaagatgcgcgaggatctgggctaccgcgtcaaggatgtcagcgaccacgagcaccgcgaactgagcgtgaaggaagtgctgtacgtctttgagactgcctacctcaaccacaacagcccgctcaacatccccgaagcacacttcgtccagaacgcggacaacacgatcaccgccaacatcacactgtcggtcaacggcaaggagaccaagtgctccgccacaggcaacggccgcctggatgccgtggcgaccgccatcgagcagcagaccggcatgcacttcaccctgatacattacagcgaacacgcgctggattccgacactgactcccgtgcctgctcctacgtcggcctgaaatgggcctctggtgaggagacctggggctgcggcacccataccgacatcatcgtagccggtatcaaggcgctggtgagtgcgatcaataataaataagggcttttaaaacggagggaacaccatgggaatgaccatgacacagaagatcctggccgcgcattgcggagaagcagccgtgaccgcgggccagctcatcaacgcccagctcgacatcgtgctgggtaacgacatcaccaccccggtggctatcaacgagtttgagaaggccggttttgactcggtgtttgaccgcacccgcgtcaacattgtgctggaccactttgtacccaacaaggacatcaagagcgccacccaatccaagcagtgccgccagttcgctgacaaatacgacatcctcaacttctacgatgtgggtgagatgggtgtcgagcacgcgctcctacccgaaaagggcatcgtaaccgcgggcgactgtatcatcggtgccgacagccacacctgcacctacggcgcggtgggcgcgttctccaccggtgttggctctaccgatatggccgccggcatggccaagggcgtggcctggttcaaggtgcccgccgccatcaaggtcgagctgaccggcgccatccagcgccctgtcaccggcaaggacgtcatcctgcacctgatcggtgagatcggcgtttccggcgcgctgtacaagagcctggaattcgtgggcgagggtgtcaagagcctgaccatggaagaccgcctctgcatctgcaacatggccatcgaggctggtgccaaaaacggcatctttccggtagacgaaatcaccgaagcctacctgaagggccgcagccagcgcccctgggtcaagtacgaagccgatcccgatgccgagtacgagcgtaccgtcaccatcgacctgaccacgctggagcccaccgtcagctacccgcacctgccggagaacacccacctggctaaggagggcaaggacatcaagatcgaccagatcgtcatcggctcctgcaccaacggccgcatcgaggatatgcaggccgcctacaaggtgctgaaaggcaagcacatcgccaagggcgtgcgcggcatcatcatccccgctaccatggccgtgtacaaggagtgcatcctgcgcggatacactgaggcgttcgtcgatgccggctgcatcgtctccacccccacctgcggcccctgcctgggcggctacatgggcattttggcggcaggggagcgctgtgtttccaccaccaaccgcaactttgtgggccgcatgggccacgtggactccgaggtctacctggccagccccgccaccgccgcagccagcgcactgaccggctacatcaccgatccgagggaggtttgagccatgaacgcaaaaggacctgtttttaaatacggcgacaatatcgacactgacgttatcatcccggcccgctacctgaacacccagagcgccgccgagctggccagccactgcatggaagacatcgataagacgttcatcacccgcgtcaagcagggcgacctgatggtgggcggagagaacttcggctgcggctcctcccgcgagcatgcgcccgtagccatcaaggccgccggcatcagctgcgtcatcgccaaaagctttgcccgtatcttctaccgcaacgccatcaacatcggcctgccgattttggagtgccccgccgccagcgaggccatcaacgagggcgacatcgtcagcgtcaactttgacaccggcgttatcaccgacgagactaccggccagaccttccaggcagccccattcccggagtttatccagaacatcatcaaacagggcggcctgatgaacagcttgaaagattgaggagtcatccatgaataaaaacattgccctgatctacggcgactgctccagcccggagatcgtgacccaggcggtgcgcgtgctggacaagattgctgccaagcacggccacacctttagctacacccgcgcttacatgggcggcgaagccatcgataaattcggcgacccgctgcctgctgccgagctggaaaagtgcaaacagtccgacagcgtgctgctgggtgccatcggcggtcccaagtgggagggcatgcccggcgaccgtcgccccgagaagggcttgctacgcctgcgcgcgggcatgggcctgtacgccaacaaccgcccggccaagatctggccccagctggcggatgcctccccgctgaaaaagtccatcgtggaccagggcatcgactttatcgtcgtgcgtgagctgattggcggcgtctactttggcgagcataagaccatcgagcagaacggcgagaaggtcgccatcgacacgatgccgtactctgagcatgagatcgagcgcatcggccgcatcggctttgagacggccatgaagcgccgcaaaaagctgacctgtgtggacaaggctaacgtgctggacaccagccgcctgtggcgcaccgtcatgcaccgcctgcaggccgagtaccccgaggtagagtacagcgagatgttcgtagacaactgcgccatgcagatctgcaagaaccccgcgcagtttgacgttatcgtgaccgagaatatgttcggcgatattttgtccgacgaagccagcgaaatcaccggcagcatcggcatggtgccgtcctcctccctgggcgagggcacctgcggactgtatgagccgatccacggctctgcgcccgatattgccgggcaggacgtggtcaacccgattgcctgcatcctctccgcggccatgatgctgcgctacagcttcgatatgcccgccgaggccgacgagatcgaggcggctgtcaacgctgttctcgacgagggctaccgcaccgccgacatgatggccgaaggctgcatcaaagtcggctgcaccgagatgggcgataagattttggagaatatttaacctacccctgccattcacttagggagagtcttgtttaaagttcttttgctccttttctttcaagaaaaggagagcccccgctggattgtgcgaactgaagtgacccccaaaagttagacaatatt

SEQ ID NO: 7803 - DNA, 6599 bp, Unknown
  gut microbiota DNA sequence
acctgtaaatagtaggctttatagagcttttcatagtccatacttgtcatcacctccttcagcttcataggttagacggagaaatcggaatttcgttacaaagaagtttgaaatttttatacctttacgctactcttgctttctgcggactattggtagacgcgcattaacggcaagcaaagagattgctgtgtcagcttgatatgttcaaatgctaattaagtatagcatacagctatgaatttttctattgcgttcccctgacttcggaatagtggcagggctggctgtctttgttttgctttgtgcttctctaccgtacatgagcattagcgcaggggatgttcccagcagaatacacggccagaggagcttcccatgaaagcgaatattccgcaggcgaagccgcagaacgcttttgcccgtgcagagatagcggatgacaaaaccggcggacacaccctgtgagaggatggtcgccaggggcgcgccctgaacacccatatgaaaaccgtttatgaatagcgcatccagcacaatgttcgtcatggcgcccacagctacattatagggcggaaacagggaaagcggaagatagggggcggtttatgagttactcatagttttcatagtggcaccgatttgtttcctgtacatagggggcctttttagcggtccccttgcttttgccccgtacctatgctacaataacgcgagtatgcgaaaaaaaggagaggagaatcccccgactatggacggaaaaaagccatcctccggcaccacggatctgaccaccgggcggccgctttggcgtattctggtgtttgcgctgccgctggtgctgggcacggtgttccagcagctgtacagctttgccgatacggtcatcgtgggccgctgcctgggcaccgacgcactggctgctgtgggcagcacctactcgctgaactttttgattttgggcttcatccagggcgcgtgtgtcggcttcggcatcccggtggccgaggccttcggcgcgaaaaaccggggcgatctgcaccgttacctggccaacggcgcgtggctctgcgtggcggtcagtgtggtgtttacgattttaactaccctgctggccgcgccgctgctgcagctcatccacacgccggacgatatttttgcggacgccgtcaagtacgtccgggtcatctttttgggcatcccggccacggtgctgtacaactactcggccagcgtgctgcggtcgctgggcgattccaagcatccgttctactttttgctgggggccagcattataaacatcgggctggactgggcgctcatcgtgccggtgggcatgggcgtggacggcgcggcactggccaccgtcgtcagccagctgctcagcggcctgctctgcacctggtggttcttcgccaaggtggagggcatccggtttaccaaagagaacacccgcctctcccctgcccactgcaagcggctggcggtcatcggcctgcccatggggtttgagtattcggtctccgctatcggagcggtcatcatgcaggacgccatcaacctgatgggcagcgtggtggtggccgcccagacggcgggcgaaaaaattcgccagatgttcaccctgccgatggaaagcgtgggtatggccatggccacctacgtgggccagaaccacggtgcgggccgcaacgaccgcatcaaacagggcatccgggacggctgcctcattcaaattgtgtacagcatcgccgcctggttcgtcatctggcttatcaaaccctttgccgtcggcctggtgctgggcgatgccgacccggccgtaacggcgggggcgctggactatctggcggtcatcagcacgctgtttgcgattctgggcttcctgatgatcttccgcaacacgctgcaaggtttgggctacagcaccatggcggtcatctccggcgtgggtgagctgatcggccgcagttttggcggctggctggccctgcacgggctgggctttttgggcatcagcctggccaaccctatcgcctggggctttgcgctgtgctactgcgcgtttatggtaacgcggatgctgcgcaaagaggataagcaggcggaaaaataagtaataaaggctcccctggaggggagctccgccgtcaggcggtgaggggtggctgctttagcgtataactgctaggaggccacccctcagtcaccttcggtgacagctcccctggaggggggcctttgcatccaccgcacctattttgcactgcccaaaaactactttttggccccttatatactataaaactagaaaaacaccccagtgtttttaactgcttataactgtttttacagttataaaaacagttaaatataacttagatatgtaatttatataactgtttatctagttttgcagttatataaaggggcgaatacaccccctgcaaacacccaccgcaaaaaatatgcgccctgccagttacggcaaggcgcttttgttttgcttaggggcttatcagcttcattctttggtggggcggaccttctcggcgatgacgcacagcacgatggtcagcaccatgtccggcagggtgtagcctaccggcgtgtccacgcccatcagcaggcggtaggcgatgaagcccaccagccagatgaccaggttgcgtgcatcggccgccacggcaaagcggtcgcgctttaagataaagtggtcagcgatctgcaccgcaatcatcggcgcaaagaccgagccgatcaggtacaagaagccggtgatgtcgtccatcgggaagaggatggccccggccacgccgatgaccgtcaccacgatggcggtctttttgccgttcagtttgggggtcaggctctcggccgagatgcccgccgaccaggcgtccagaaacgtggtggtcacggtggagaacaccagaatcaccagcgcggcaatgcccagcccggccttgaccatgatgacggcaatgtcatactcgccggtgaagatcgccgcgcccatgccgatgacgtacatccagcaggacaccagcccgtagacgatgacgctgacccaggtggcctgggtgggcttctcggcatcgcgggtatagtcgctgatcagcggcagccaggataggggcattgccacggccagctccaccgctgcgccaaaggtcaggctctcaccgtccacagcgggcatcacattgccggagaagaagatgaccttacacagcaccagcgtgaggataaacagcgcggccatcgtgattttgttgatccagcccaggtcggtgatgcccacagcgatccacagaataatcagtgcgccgatgaccaggcaccacacccagcggccaatgtcgaaaatgccgcccacagccagtgcgccatcgtaaatcatgatggccgtccagcccaccagctgcagcacgtttaaaaaggcaaacagcaggccgcccttctggccaaagctcatcttgacggtctccatggcgctgcggccggtacgcccgccgataaggcccgccagcagcatcatggcacagccgatgatgtggccgatgagaatggcggcaaagcccttggccatgcccagcggcgcaaacgaggtgccggtcagaatttcggccagggacacgcccgcgccgaaccagattaaaccgttctgaaaggtagaagtctttttcactgcacgaacttccctttcagctcaaacatgtggtccatggggccggagcctttccctaagtccagcatggcggccagtgcaccggaaatgtaggctttggcacgctccaccgaggtatccaggtcgtaccccttggccaggttggaggcaatggcgctggacagggtgcagccggtgccgtgggtgttggggttatggatgcgcttgccccggaaccacttgccggtgccgccctgccacagcaggtcgtcggcatcgttgatccggtggccgcccttgcacagcacggcgcagccgtatttctcgctgatgaccctggcggcggcctccatgccggcggcgtcggtgatggtcatgccggcgaggatctcggcctccgggatgttgggggtcagcacttcggccaggggcagcagctcggcggtcagggccgccacggcgtcatcccgcagcagcttggcgccggaggtggctaccatcacggggtcgaccacgatgtgcttagccttgtaaaagcgcagccgctcggaaatcgtagcgatcagctctgccgaggataccatgccgatcttgacggcatcggggtagatgtcggtaaagacggcgtccagctgctccgagaggaacttgggggtcgtctcaaaaatgtcggtcacgccggtggtgttctgggcggtcagggcggtgacagcgctcatggcgaaaacgccgttggcggtcatcgtcttgatgtcagcctggataccggcgcctccgctggaatcactgccagcaatggtcaatgctgttttcatcgtagatacttcctttcttatatgcacagcaaggttttgtaacgcggcgcaaggtggtgcccccaatgcaccgcgggggagtttgcccaaacaaaaacgcggatatgccgacaaagacatatccgcgtacaaactcaaacgagcagacgtcaaggtatctccctacgttggcattatccaaatcaggttacgggtcagggcgcaacagcccactctcagcctgcttagtgcaagctcccccttgtgaacctatctactataccacgcttcgccccgctttgcaaggccgctataaaaatctatagtaacttattgtaggtgttacaatgatggaaaacggcgcggcgattcaaatttgcagctacagcgataaacggtaaaagtgcaggtcactggattttttcggtggcctgcttttcatctgcggcaaaaggcgatataatgggaacagggaaagtattttttgcaaaatggagggacgtattatgtcgctggaaaaagcaaagaagtatctggaaagcaaaggctgcctgaactggaaggagtgtgcaacgcccagggctgggtggatgtgtgcaaaacgccggaaggctgaaatgatacgacacactgcattgtaggggcggatgcttgcatcgacccctacagcgtaacgggaatgaatcattaaaattctataaaaaggagtccccttatgttccgtaaaatacgccgctttaagcaggaaatgcctgccgaggaatgtcgcgaactgctcaaaacccaggtgcggggcgtgctgtccctgctgggggacgacggctacccctacggcctgcccatcgactactggtataacgaggccgacggcaagctctacttccacggcgcgaaagagggccacaagatcgacgccatccgcgcctgcgataaggcatccttctgcatccacgacgagggcgtgcgcatggacggcgaatggccgctgcacttccgcagtgttatcgtgtttggccgcattgcgccggtaacggacgaagccgccaccgcgctggcctgcaaagaactcagccgcaaattcaccccggacgacgaatattttaacaaagagtacgccgccgccaagaaccgtgtgctctgcctggcgctgacgccggagcacatcaccggcaagcgcatcaaggagaactaagcatgcccaaacaaaaacagcccaccgccctggccgtcgcccaggaggccgccatcctgaccgtggcggtggctatcatcgcggcggcggtctactttttcctggtgccaagccatgcgtcggtcagcagcatttcgggtttgggcatcgtgctgtccaactttgtgccgctgtcgctgtctgccatcacgatgatcttgaacgtggtgctgctcatcatcggctttttcacctgcgggcgggagtttggggccaaaacggtctacaccagcatcctgctgccggtattcatcggcctgtttgagcggctcttccccgacatcggctcgctgaccgacagccaggaattggacgtgctgtgctacattctggtggtcagcgtggggctgagcatcctgttcaaccgcaacgcgtcctccggcgggctggacatcgtggccaagatcatgaacaagtacctgcacatcgagctgggccgggccatgtcgctctccggcatgtgcgtggcgctgtcggccgcgctggtctacgataaaaagaccgtggtgctcagcgtgctgggcacctacttcaacgggctggtgctggaccactttatttttgaccacaacatcaagcgccgcgtctgcatcatcacccaaaaagaggaagaactccgccatttcatcctaaccgacctgcacagcggggccacggtgtatgaatcctacggtgcctacaacatggaaaaacgccgcgagatcatcaccatcgtggacaagggcgagtaccagaagctgatggacttcatgaaccgcgaagacccccaggcgttcatcaccgtgtacacggtatcggacatgcgctaccagccgaaaacctaaaaagccaaagaacaagcccgccagctgttttgctggcgggcttttctgtaggtactttaggcaataccgcacaattcccg

SEQ ID NO: 7804 - DNA, 12250 bp, Unknown
  gut microbiota DNA sequence
gcaagccctttcggctgcttgaacaatttttacttcaaaatattgtctaacttttgggggtcacttcacactgtgcggcggctttgtattattttactttcggaactcttccagatatacctctgcactcctcgtcatttcccgggagaaatcgctctcgtacttgcgtttgcagaaggcctggatggcggtggtgaaatcgtagttctgctggccgttggcggcagcgcgggtggtgaagtcagcgcgcagttcgtcgtcggtgcggtcgcggtaggtattctcgcagacgatggcgtcctttgcaaaccgggccggtttggggcgtgccttttgctgttcggtcgggcggccgaacaccagcatacaggcaggaaccacatgctccggcagatgcagggcttcccgcatctgctcggcgttctcgatgacatcaccgatgtagcagctgccgatgcccaggctttccgccgccaccacggcattctgcgctgcgatgcaggtatcggccatggccagcagcaggtctcctacaccgggggtccgtacatcctcgatgcccgctgccttataggcctgcagccaacggcggcaatcggctaaaaacaccagcaccagcggtgccttggcaatgaacggctggtggtcgcacaaatcggccaggcgggctttcagcgccgggtcggtgatgttcaagattgtgtacagctgctggttgcccgccgtgggtgcttggaacgccgcttgtaaaatagcgttccgctcggcttcggtcaccggctcgtcggtatacacgcgcacacttttgcgggcggaaagcgcctgtaagacctcgttatccacagtttccatacaatatcactcctttttgcggtggaggaatttgcccaccagtttgttcagcatactgaaaatttcgcggaagttgatagcgcagacgatggccgtcagcactgtgaccgggatgacccagttttccagccgcatgatgcagaaaatttccgccagcaccagcaccaggttcaacagcagccagccggggtggaagtccacttccagcaggccgcgggtggagtaggcacgcagcaaaaaaaccaacagcagccctaagaagctggccggagtgacaccccaagggccccaggccaggatgaagcagtagttcaggatcaggttgagcactgcaccgcacagcatcgtgaccagcgaaccggtggaccgcttatacaccacgtagatgctgttgaggaactggttcaggcaggtgcacatggagcagagcgtcagaaatggcacaaagatccagccgtcgtaatattcggccttgaacaggtgcatcatcggtcggcagagccagataacgcccgccacacagcagaacaaaacactggcgtagatacggaaaattttggagaagaacacctcgcggtcctgctcctcggtcacagcggagagctgccaggcctcgtagaagatgctgcccagaatcgtgatgacctgcggcaggaaatagcccgccgacagcaggccgacccaatagttgccgctgcggccgccgtaatcctcgcacatagcctgcacaaagaacatatcgctggcgttgatgatccaaaagctgatggccgcggggatcatgggcaggcagtagcgcagcatgtcgcgccacagctttttgtcaaaggctttggggttgtagaatttatagcacccgcccgcaaagaacacaaacaccatcgaggtcaggtccgcgcaggcgtttgccagcaaaaagcccgccgcgcccagcttgagccaactcaaaaacaccaggtaatacgccagcagtgcgccggtagtcagcacgccgtctatcgccaccaggcggttcaacatacgggagcggataaactgggtacacagcgtgcgcaggcagctggccagcacgcagaggtatagatacggcaggtattccgccgcgttggggatgagccgcaccagcggcatggccagcagcagcagcaaaaagcccacgctgatggtagcgccgccattgacgaagacgctggacttgttgacctttttatccaagccaaagcggatgactgcgtaggacacgcccaaactgaccaccgggatcagcaggttagtagcctgctgcagcaggctggacacacccatgatgtccggcgtatccaacgcgtagctcaggtacgggcggatgaagaagctgagcagcttggagctgaagttggagatggcaaacagcagtgtattgcttaccagcgttgagtattttttttgcgatgatgccacgggaaatcctccgtaatgcgtaataaaaatgtttaggcattggtcacatctgctttaacagtcgttcgcgggctttgtagtccggcataactgccgccaccgccgcccaaaagccgggaccatggttggggtgggcaaaatggcagaactcatgtaccacaacatattcctgcgcgggcaggggtgccacacacagccgccgcgcaaaagccaacgtgccggtttttaagctgcagctgccccagcgggtggtcatatcccgcacagcgatcttgggcatatgcccgcccgggcaggtggccgcgaactggggatagtatgcccggcacagcacctggatatgggccagggcctcggccctggtgggcagttccggctgctgggcggcttcctgttcgcggcgggcggccacgcgggcctgggcgctgcgcacccaatctgccttgctggcaacaaaagcatccaccttcatgaccgacacacgcggtgcggcactggcggctacgctgccatcagcccgcacgcgcaggttgatattgcgcacgcggcggcgggtaagcgtataggtcacgcccgccaccgtgcgtgtttgttgccgcggcaaagccaagtgcaagccccctttgcagattttctatattgtacacgcttttgcgggccgatgcaagcatcggcccctacaaaaaagaggcggctaaagcagccacccctcaccgcctgcggcggagctcccctccaggggagcctttatgctatcttattttccttttgcttcctggatatactgccgcggagtctggttatactcggccttaaaggcgcggtaaaagttggcgtaatcgccaaagccgcagtattggcacacctcattcggcggtacgccgcccgccagcagctgcttggcgttcatcaggcgcttttgcaaaatatagcggtgtaccgtggtgcccacctgggcatcaaatttgcgcagcaggtggtatttgctgatgaaaaactgctcagccaattggtccagggtcaggctctcgctgtagtgctcatttatataatgtaggacagcgtccaccacctggtcgctggtgccggccgggcgcaggtccccgtgggagtccgccgcccggttcaggccgatcatcagctctaccagcgcaccttgggccaacaggtcgctgccataatccttgcgggcgcgcaggtcgcacaggcggtccaccgtgctgcgcagcggcgcgccgatggcaccgggcaggcgcagcaggttggtgtggcccggcacgctggtatcaaagcagcgggtcaggctggtgcgcggggtggaaagccggtccagatatggtcgggcgatccacagcacgatgcgctcgtacgcgtcggcatcggtatcgatgcgggcctgatgcagctccagcgggctgcacagcatccagtcgccggggcgcatgcggtaaattttattttccacaatatattcaatacggccgcgcagcagcagataaacctcgtaaaaatcatggtggtgcagctccacttcgttcatgtaggtggaacgatagcggtacacctcataatccggctcgatcatgctttggcgcttggtataggggttaaaactggccgacatggtacacctccgcctttttcatcgttgctttgcttttatttctatgttaccgcaatttttgcaatttatcaagcaattgtggtaattttcttgcgaaaaattgcgtgctatactgaaaccacaaaaggggcggtgacggtacgctgccaaaccttccaaagcatcttctacgcatcatgaaaaggagcaaaccattatgcagatgaatgcctcttccatcgttaaccagaaggccgagtgggaaaagctgggcgttaagctgcccgcctttgaccatgccgccatgactgccgctaccaaggagcatcctatttgggtccactttggcgccggcaacattttccgcggtttcatcgccgccctgcagcagcgcctgctaaacgagggcctggccgatcgcggcatcatcgcggccgacaccttcgactacgacatcatcgacaagatctacaccccgtatgacaacctgacaatgaacgtcaccctgaacccggacggcaccaccagccgcgagatcatcggctccatcgccgaaggcctgcgtgctgactcctctgatgctgccatgatggcccgcttcaaggagatcttcaccgatcccggcctgcagatgatcagcttcaccatcaccgagaagggctacgccctgtatcgtccggacggcagcctgatgcccgttgtccaggccgacatcgacgagggccccgcccacgcacgccatgccatgagcatggtcaccgccctgttgctggagcgtttccagaacggtgccgctcctctggccgtcgtcagcatggacaactgctctcacaacggtgagaaactgcagaccagcgtgatgaccattgccaaggcttggctggagaagggctatgttggccaggacttcatcgattacctgaccgatgagagcaagatcgcatttccctggtccatgatcgacaagatcactccgcgcccccacaagatcgtggaagagcagctggtcaaggacggcatcgagggtatggagcccatcgttaccagcaagaacaccttcattgctgctttcgtcaacgccgagcgcccgcagtacctggtcatcgaggacaagttccccaacggccgtcctgccctggagaaggctggcgtgtacctgaccgaccgcgacaccgtcaacaagaccgagcgcatgaaggtcaccacctgtctgaacccgctgcacaccgccatgagcgtgtacggctgcatgctgggctacaccctgatctgcgacgagatgaaggacgccgacatcgttgccctgatcaagcgcctgggctatgttgagggtctgcccgttgtggtcaaccccggcatcctggagcccaaagctttcatcgacgaagtcgttgagcagcgcctgcccaaccccttcatgcccgacgccccgcagcgtatcgctaccgatacttcccagaaagtcggcatccgcttcggcgagaccatcaagagctacattgccgagggccgcgacctgaacaccctggtcagcatccctctggccctggctggctggctgcgttacctgctggctgtggacgacaacggcaatgcctttgaagtctctgctgatcccctgaaggacgacctgcaggccaagctggccggtatcgaggtcggcaaacccgaaaccttcaccaaccagctggacgacatcctgtccaacgcttccatcttcggcaccgatctgaccaagactgtgctggccgacaagatcaaggcttacttcaaagccgagctggcaggccccggcgctgtccgcaagaccctgcatgacgctgtgaatgcttaattttccgaaaaaggcttcctctgtgagggagctgtcagcgaagctgactgagggggagacagtagatacgctgtttcggtcggcatagtctctctcccacccgcttcgcgggcctccctcgcagaggggggcctacataagaggcaataattaaaaaataaaggagtctacctatgtctatgaaaatgggttggcgctggtatggtgagggcaacgaccccatcacgctggctgacatcaagcagatccccggtgttgaggagatcgtctgggccctgcacagcaagatgcccggtgagatctgggaagaggacgagatcaaggccgtcgtcgatcagatccattcttacggcttcgacgctaccatcgttgagtctgtcaacgttcacgatgacatcaagatcggtctgcccacccgcgaccagtacatcgaaaactacaagcagtgcatccgcaacctgtccaagttcggtgtcaagaccatctgctacaacttcatgccggtctttgactggacccgtaccgacctgttccatcccatcggcgacggttccaccgccctgttctatcagaaggatctgatcaaggacgactacaaggccatggctgattacatcatgagcttcaccgagaagtatcacatgaccttccctggctgggagccggagcgtatggctaagctggacgagctgttcaaggcttacgcccctgtcaccaaggagaagctgtgggataacctgaagtacttcctggaagccatcatgcctacctgccacgagtgcgacatcaagatggccatccatcaggacgatcccccgtgggacatcttcggcctgccccgcctgctggtgaacgccgagagcatcgaccgtttcctgtccatggtggatgatccgtacaactgcctgaccctgtgcagcggcagcatgaacgccaaccccaacaacaacgtggctgagatcgtgcgcaagcattgcgatcgtatcccgttcgcccatatccgcaacatccatcacttcgagaatggcgatttcagcgaggccgcacaccgcgattgctgcggcgagaccggcatcattgagatcctgcgtgcctaccatgactgcggctttgatggctgcatccgtcctgaccacggccgtcaactgtgggaggaaggtcccggtaactgccgccccggttacggtaagtatgaccgtgccctgggtatccagtacatgctgggtgtctgggatctgctcgaccgcctggacgaggagaagaagggctaagctttcgttccttttcttgaaagaaaaggaaccaaaagaactttcaattaaaaagcaaggcatgggccgttggcccatgccttgctttttgtttggagtttcttcggttccttctttgcaaagaaggaacaaaagcccagcccatgctcacaccgcgccatagatgcctttgacgctgacttcgcccgtgaagacgtgggtgtcgccggattcatcgtgaacgacgaggcggccctcctcgtcaatgtccttggcaatacctgcgccgccatcataggtaacgcggcggcccaggttgacgcactgggccttgtactgttcacggtagggggcaagcccctgctcctcataggtgtagagggcgcggtcaaaaccgaaatctgtcatatactgggccagccattcggggtcggtgtccaggtccacgttgacgccctgcaaaagcaggctggtgccgtggggcaggccggccatatcgaaatattcctgcggctgggccaagttgatgccgatgcccaccaccaggctgtgcccgtcgggcgcgacttcgcaaaggatgcccacgatcttttttccgttcaacagcaggtcgttgggccatttaatctggcagtcaatgccataacgctgctttaatgcgtcgcagacagccaaggacgcgaacaacggcagcgtggacggctgtgccagatccgttttgattacggcggtgtagtacagccctttgccgggcgcgtcgacccagccgcggcccagacggccccgacctgcggtctggtcggtggtatacacggcccccaccgggccgaactgggcgatgttctccttcgcccaggcattggtgctgccgacctgcggcagataaattacgctctcgttcaaaactgcggcacccgcttccatgaaaattcacattgcccgtccgtcaccttgatgacgccgtaactgccgccatcccgcagactgcccgggttaaacaccgtagccgccgtgcccacaccgcgcaccagctcccgccgatgggtgtggccaaacagcgctacatcggcaccgcgctctccggcagattccgccagccgctcgctgcccatttttacgccgtaatgatggccgtgggtgtagaaaaacagcacacccgcaaagggggccataccctcggtgggttcctgataccccacatcacagttgcctgccacgcggtagatcgggtacggcacgggggtcttgttcagctccagcgcaccgttcaggtcatacaggccgtcacccaggtaaaacatggcatcggcggtctcgttctgcagcacccagcgcaggtcacgcatgcggccgtgcacatcggaaataactaagatttttgtggtctcggacatgaaggttcctcacttgatcagctctttgtagatctgccctttgctgaatggcgtccccgccgccgcctgtttggctgcagctgagggcggcataccgcctgcctgcaaagtgcgggctgcagccaccgcttcttccagtgtgggggcggtttcctcggccagccgggccgggtcagcacccgccagcaccagcacatactcgccgcggggatcgttttcccggtaaaaggcgacggcctcgccgagggtggtcttcttgatctcttcgtgcagcttggtcagctcgcggcacaggcttaccgaacggtccgtgccaaaggtcaccgccaaatcatccagtgtgccccgcagtttgtggggggcttcgtagaagatcatcgtgcgggtctccttctgcaaaaagtccagccgttcccggcgctcccgcttcgggacaggcagaaaaccctcgaacacgaaccgtgccgtgggctgaccgctggcggcgagggctgtcacgcaggccgaagccgccggcaccggcactaccttgatgccccgggcgtgggcctctttgacgatctgctcaccggggtcgctgatgcagggcattccggcatcgctgcacagggcacagttttcgcccgcttcgatgcgctgcaggatggcctcgccatggtgtagcgcatgctcgtaataactgaccatcggcttttttaagccaagatggttcagcagccgcagggtcacgcgggtatcctcggccgcgatgaaatcggctgcaccaaaggtagccgccacacgcggcggcatatcatctaggttgccgatgggtgttgccaccaaatataatgttccgggcaaaatgctgcccccttttctatactataataggttattataccacgttacgggcattcggtaaaccccgcgtccatgcaaaaagcctccccaaaatggggaggctttgcattatcctctggtgctaaagctatactcgtgctcttccggcggcagggtctcggtggtcatgccctcgatacgcgcccagcgattgctgcgctcgatcatcggcaccagttcatccagcgcagcacgttcgccctgggcttccagggtgacgctgccgtcccagttgttggcgacccatccggtcaggcccagcttttgggcggcgcactgggcaaagtagcggaaccccacaccctgcacatttcccgtgaaatgccagcggcggcggatcacactcatgcgtcgatgcccgttacggtgtagtccttggcttcgacggcggccttcaggtcggcatcagccacgtcagcggtcagggcgacgatggcggtgcccttctcgtggctgacctcggcgctctgcacaccgtccagggcctccagagccttcttcacggtggcctcgcaatggccgcacatcatgccttcgatatggatggtctttttcatagtaactttctccgtttttatttcgttctgcacagggcaggatctggtttcgcacgcggtctctgcgggcagctcacgtgcgggggctttgtgtttgggcggtgcgtcatgggcggcgctgcggggattaaaggtgttcagccgcagggcattggtcacaacgcaaacgctggaaaggctcatggcagccgaggcgatcatcgggttcagcgtgatgccaatggcggtgaagacgcccgcggccagcgggatacagacagcgttgtagaagaacgcccagaacaggttctggtggatgttgcgcaccaccgcgcgggacagacgcaccgcagcgggcacatcggccaggtcgctgcgcactagcaccacgtcggcggcgtccagtgccacgtcggccccagcgccgatggcaatgccggtctcggcacgggtcagggcgggggcatcgttgatgccgtcgcccaccatggccacacggcccgtagcctgcaggcggcggacttcggcctccttaccggcgggcaggacgcctgcaatgacatggtcctcgtccaggccgaccatagcaccaatgtgcttggcggtggcggcgttatcgccggtcagcagcacgacctgcaggcccagggccttcatctgactgatggcctcggccgaggtctgcttgaccacatcagacacgccgatgacgcctgccggtttaccggccagtgagaagtacagcggggtcacgccgtcgcggctcatctcttcgcccgcccgctccaggtcggaggtcagctcgcaggtctcgcggataaaatcggcgttgccgcccgcgatgaccttaccagccaccttgccctgcagacccttgccgggcacagcctcaaaatcggcaacggtggcgtaggagagcttgtccttttcggcctctttcaaaatggcacgggccaacgggtgctcactgcgcagttccaggccagcggccatgctgagcaggaacttggcaggcacgttgcgggtacccacgatcttgaccacgctgggttcgccggtggtgatggtgccggtcttatccaacagcacagcatcggtgtagccggtggtttccaggctggcggcggtcttgaacaggatgccgtttttggcgcccacaccgctgccaaccatgatggcaacaggcgttgccaggcccagcgcgcaggggcagctgatgaccagcacactgataccgcgggccagcgcgtaagtgaaggtctggcccagcagcagccagataacgaacgtcagcaaggcgatgcaggtaacagcgggtacgaagatgccggagactttatccgccgttttggccaacggggccttggtagcggcggcgtcccgcaccaggcggatgacctgggacagggtggtgtcctggccaacacgctcggcccggcaggtcagggcgccgttctggttgatggtggcggcgctgacaggcgaaccgggaaatttatccaccggcatgctctcgccggtcagggcggcctcgttcacgctggagataccctcggtaacagtgccgtccacggggatggattcgcccgggcgtaccagaaacagatccccgatctgcacctcgctgaccggcagcgttatctgctcgccatcgcgcagcacacaggctgtctgaggagccagcttcatcaggctcttcagcgcatcggtggtcttgcccttgctgtaagcttccagcgtttttccgacggtgatcagcgtcagaatcgtggcagcagactcaaaatagaggtcatgccgatactgcatgatcaactccatatcgtcgtttttcaggccaatgccgatcatcacaatagcatacaggccgtacagaagcgcggcacccgcgcccatcgagaccaaggcgtccatgcccggtgcgcgggacttgatgcctttccaaccgctgatgaagaatgcgcggttgatccagcagacgggcagcgtcagcgccagctgcaccagcgcaaacaccatggcaccactgccatggccctccataaacgagggcagcggcaggccgatcatatgccccattgagacatacatcagcggcaccaaaaaacacaggctggcgatcaggcgctttttcagttttggggtctctgtgtcctccagctcagcgttctcgctttcggctgtggccaggctggcgccgtaaccggcagcctccacggcgttgcagatgcgcctggccgtcgtgtccgggtcagcatcgggggtgtagtctacctgcatcgagttggtcagcaggcttacggccacaccagccacacccggcacagccgagaccgctttttccacatggctggcacaagccgcacagctcatgccggtgatctcatagcgttgcatggttcctctattgctcctttgctaaaaatgctaaaacagtaacctaattaaaacatactttc

SEQ ID NO: 7805 - DNA, 9289 bp, Unknown
  gut microbiota DNA sequence
aaaacaatgtcatttttcggaactttggcccagtcgaaatccgccgccagctcttgcggcgtcacggggcggggcgtggcctgcaaaccgcaggcaaaggccagcttgccgataatttcctcggcgctgtacctggcccgcaggttttccaggctttggtcgccgtcccttttggaaaggcggcggccatccggggccagcagcagcggcaggtggtaaaacgttggcggcgtcagccccagctcccgatacagccacagctggcgcggcgtgctggacagcaggtcactgccccgtaccacctcggtaacgcccatcagggcatcatccaccaccacggccagctggtaggcaaacacaccgtctgcccggcgcaggtaaaagtcgccgcaatcgcgggcaagattttcctcatacatacccatatggccgtccgtaaaggagatggtctcatccggcacctgcacgcgccaggcgggggcacggatcttgcagcgctcggccacctcggcgggggtcagcccccggcaggtcccggcgtagacgacctgaccgtcgctgcggtggggtgcgctggccgcatgcagctggctacggctgcaaaaacagggatacaccagcccgcggcagtccagaatatcgtagtaatgctggtaaatttctgccctctcactctggtagaccggcagttgcggaccgtcggcggcaaggcccagccaggccagatcgtcgatgatggcatcggcaaacacacgggggcagcgctgggtgtccaggtcctcgatgcgcaatagcacctgcccgcccttgcttttggcggaaagccaggccagcaggcagcacatcaagttgcccaggtgcatccgcccgctggggctgggtgcgtaacggccggcgatcattccagcgtgtaggtgccatcgcccaaggcacgcagatgcacacggtaaaactccgccaccgcgttgatcatgtggtcagcatcggccacggccgcagtctccaccgcgctgtgcatggccagctgggccaggccaatgtccgccatcgggatgggaagcgtgtggctttgcaggttgcccagggtgctgccgcccggctcatcggcgcggttggtgaacacctgcaccggcacaccagccttgcggcagatttccttgaaaatcgcaccgctgacggcgttggtggtgtacttctggctggcgttgtacttcagcacaacgccctcgcccatatgcaccggggcgcatgggtcggctttctgcgggaagttcgggtgggccgcgtgggcgttgtcggcgctgagcatgtagctgtttgccatggcctgctgctttgcctgggcgctgtgggggatcgaatcgatgatgcggtccagcacatcccgcaggtagctgctctcggcgcccatccggctggaggaacccacttcctcgttgtcaaacatggcccacaccggggcgcaggcgctgtcgcaatcgggggcagcatccaggaaggccagcagcgtggtggcggcacattccaaatcatcgatgcgcggggcgaggagatactcaccgtccgggccaatgcaggtaggctgctgacgggtgaccagctgcaggtcgcggtcgaggatgtcctcgggctggacgttcagctcctcgcacagcacatcggtcagggtgcggcatccagcggggccccacaacggctgcatgtcgatctgggggttgaactcctttcccttattgacgttgcgctgcatgtggatggccagcgacgggatgaccagcaggtcctcatcgatgttgacaaggcggctctcgatgccgtcctcggtcttgaccatgacgcggccagccaccgtcagcgggcggtccagccaggtggacatgatcatgccgccgtaaccttcgacgctcaggcgggagcagccgtcgttttcgaccttctcgtttttaattttccagcacggggaatcgctgtggctggcggcaatgcgccaaccgccgatggcatgctccggcacgcgccaggcgatgaccgaggaaccgttgcgggtaatgtagtaccctttgccggcttccaggttccaataatcggcttcttccaggcgggtataaccggctgcatccagccaggccgcggctatggcagccgcgtggtagggggtcactgctccctgcaaaaattcaaataaatcatcgagcataggtacttttcttccttactgttgttatttttccgggcttttggggcccgggtgcgtcatacggtaatattgtaccgcaaacttacagtgggaacaagttgcaaaacaggaaaatttgttctatactcagtatagtcatactgtccgttttgacaagtacgcactttttggaaagtacccccaggaggttatctatgcacccgaacgcgaactgtaactgccgctatgccgatgttggctgcgataaaatggaagaagtcatggatcagatcagcggcaaatggaagatgcgcattctgtttatggtgggcgcccacggcaccctgcgctatggcgagctgcgccgcctgctggacggcgtgacccacaagatgctctcaaaccagttaaaggagctggccgccgatgggctggtggagcgcatcgattatggcgaggtcccgccccgggtagactaccgcctgaccccgaacggcgaggcattgatgccgatttttgacgatatacaggcgtatatccgcaaaaatgcctgcagcaattgctgcggcgataagcccgccgccccttacggcgcaaggcatggctgttgtgaataatatatttgtaaagtaacctgttaggaggacattttatgcgtaaatctattgcccttttgctgggtctgtcactggccacgctgacagcctgcggacagacgccgggaaattcaggcgctgcatcgtcggattccgcaagtgccgttatttcggaagctgcgtccgatgctgccccggccacggcggaaacacctgcggcctcctcccgcgataccaccaccgagcagcgcaatgtgctggatggctttgtggatttttccgccgacacggcaggcggcagcctgaaatgcgcccgcgcggcggcagtgctggtggaatacctgagctgcgccgacatcgacgcttccaccgccgccgattggatgaccgacctgacccaggaccagcgcgacctgttggacatcaactgggcgggcattttggccaatgcccaaaacatcgccgccgatccagccagccagaccgaccttttatcctgcgccggtgtcaccacggattttaccggcatggttttgaccggggtgccggataagctggtgattttgaataccgtttttaccggaaaagccgggtaaataacacaacagaaaagcggtgccgttcccacgcggcaccgcttttctactgacctttataccttattataatagtgtaacgcttattctacgtcctgcagggcggcgtaatcctgctcacccgtgcggaccttgaccaccttggccacgttgtacacaaagatcttgccatcgccaatgtggccggtgtacagtgccttggtggcggtgtcgatgatcttctccaccgggatcttgctcacgacaacttccaccttgaccttgggcagcagggtggcatccacttcggcgccgcggtacttctcgccgctgcccttctggatgccgcagcccatgacctgggtcacggtcatgccggtgacgccgattttgttcagcgcctgcttcaggctctcaaacttggccagctgcacgatgatggacactttgtgcatgccggaatccagctcggccggcagcggagcttcctgggtgaccttgacggcggccgccaccttctcggtgctggccttggcgatgtcatcttcacccaggtcggtgttctcgttcacatccagctcagcgtaggtggcatcgttgatggcaaaaccggcgtaggcgctggccaggccatgctcatggatgtccaggccgtccagttcctctttctcagaaacgcgcaggccgatcgtctttttgatgatggtaaagatgatggtcatcgtgaccagaacccaggccgccacgctgacaacacccagcaactggatgcccagcttagcaaaaccgccgccgtagaacaggccgccatcggtggcaaacagaccgaccgccagtgtgccccacaggccgttcatgcagtgaaccgacaccgcaccgacagggtcatcgattttggcaatgttatcaaagaattccaccgagaagatgcagagcacgccagccacgatgccgatcacggccgcgccgaaagggtcgaccacatcacagccggcggtgatggccaccagaccggccagcgcaccgttgaaggttagggagacatcgggcttgccgtagcgcacccagctgacgatcagcgcggccaccgtagccagagccgccgccaggttggtgttgaagcagatgaggcccgcggaaaccatcgtgtcatcgccggtcatgctgacggtagagccgccgttgaagccgaaccagcagaaccacaggatgaaaacgcccagggccatggcggtcaggttgtggccggggatagcccgtgccttgccgtccttgccatatttgccgatgcggggaccgagcatccaggcacccaagcaggcggtaacaccgcccacaaagtggaccgccgtggaaccggcgaaatcatggaagcccagctgagccagccagccgccgccccagatccagtggccggaaatgggatagacgatcaggctgatggcggcggagtagcagcagtaggcgctgaacttggtgcgctcagccattgagccggaaacgatggtagctgctgtggcgcagaacacggtctggaacaccgcatagacccagaccggcagggtaccgaaatcgtagctgccctggatgaacgggtcaaacccgccgatcagtgcgccggagccggcaaacatgatgccgaaacccaccagccagtagcagggcgtgccgatacagaagtccatcatattcttcatcagaatattgccggtgttcttggcacgagtaaggcccgcctcgcacaaagcaaagcctgcctgcataaagaacaccagaaacgccgcaaccagtgtccaggtaacgtccgcagagttgtacataacagattcccctctctcactttgcacagcgccgcctcgcacaatgcggcactgcattttgcaaccaacaacaaaaggcgccgggcgggagcttgctatcccgtccggcgcctttgccgtttgttgtgttgccgctatgatagcactgtctgcgcccacggtcaaggggaattgccacagtttgctgcattttgtcagttttggcttgcagccgcaaaaatttccgttgatttttatgcatgttttacaggcatgtgttttttgtacgtggtcagcgcttgccaacaaattgaactttgcggtcgaacttgggcaaatttacgggtatgttaaattttttgcaaaaaaatctaccaaaataattcacattgtgctataatacagataaatgcccttttgttaaaaagagttttatgcttcatccaaaaaggaggaaatcccatgcccaacctcgctctgcttgccttggaagccagcgacggcactgtggtgctgaccagtattaccctggtttttgccatgctgatcgccctgtgcctcatcattaccctggagggcaagctcttcgacctgaaaaacaaaaaacctgctgatcctaagccgcaggcccctgccgcaccggctgccaaagctgccccggcacctgctgccaagcccgctgcccccgctgctaaggctgacaatggcggcatccccggcgaggtcattgctgcgatttctgccgctgttgctactgtgatgggttccggcgctgtgatccacggcatccgccgcgtttccaagcccgccgcaggctcccgccgtggttcctggggcgacgccggtgtgcgtgagcataccacgccctttatgtaaggaggtctggaaatgggtgctattttaaccaacatctcggagatttttgccaagtccggttgggcacagatcttcttcaccgagggcggctggaagtacgccgtcatgctcgccgtggcctgcgtgctgctgtatctggccatcgtcaagcagttcgagcctctgttgctgctgcccatcggctttggtatgctgatgaccaacctgcccctggacggcatcttccacatggacatcttcatcaatgagacaaaccacattgactgggcgctgctgggttcttccggcggcatggtcgactacatttacttaggcgtcaagctaggtatttatcccccgctgatcttcctgggcatcggtaccatgaccgacttcgagccgctgattgcacgtccctccagcctgctgctgggcgctgctgctcagctgggcatcttcttcaccttcgttggcgctaagatcctgggcttcaccaaccaggaagccggtgctatcggcatcatcggtggtgctgacggccccaccgctatctacgttaccaccaagctggccccgcacctgctgggttccatcgcggttgcggcatactgctacatggcgctggtgcctgttatccagccgcctatcatgaaggccctgaccacggaaaaagagcgtcagatcgtcatgaccgcaccccgccgcgtttccaagaccgagaagatccttttccccatcatcgttaccatcatcgttgccctgaccctgccggatgctgctatcctggttggctgcttgatgatgggcaacctgatgaaggagtccggcgttgttgagcgtatcaccaagaccgccggcaacgaactgatgaacatcatcaccatcttcctgggcttctccgttggctgcaccaccaacgcttctaccttcctgaacatccagaccgtcgagatcatcgtcctgggcatcgttgctttcggtgtcggcaccgctggcggcgtcatcctgggcaagatcatgtgcgtcatcacccacggcaagatcaacccgctgatcggttccgccggtgtttccgccgttcctatggctgcccgtgtttcccagaaagtcggccaggagtacaacccccgcaactacctgctcatgcacgccatgggtcccaacgttgccggtgttattggctccgccgttgctgctggtattctgatcaacatgttcggctaatcgcagcttaaaccacaagcaaacaaaacctccggcccgaaagccggaggtttttgtttgctttatgcaatttacaaaatgttcataccagtatcatagttttttagcagatgtcctgtattgtataagcacagggttacggagccgcaaccgtaattctggaacatgattcctcctcacaccaatcgataccccttatgcccccgttcggagccgcaaccgaacgggggcgctttttgtgcttattggtatttattgcagatgggacgtcaaaaaatctaccgtaacctggcgcaggtcagcgtccagctgggtgttggtggcggggtcctcgctggtataattgtggtcaccgttcacgaaggggtccagcaccacctggccgtccggcaggctttcgacggccgccttggtttcggtttgggtagtgtcgctcaagatgcgctcgttgccgctgtaggtcagcagcaccggcaggccgctttcctgcaaggtcgcgttggggtcgctgtcccgcataccgtcgatgtaggcggcactcagctccacgccccaagccgctacactgccctcggcgtcggcgcgggcggccatttcttccacggcggcaaagttatcaatgcttaaaaactccaagccctgcaggcccgtgccgttggcggggctccagagggccagtgccgtgacggggtactgccccagctgcgggtagaggctggccaaccgcccgcccatgctgtggcccaccaacgccgttttgccggtgccgtaggtggcctgcatgtagccgatcacgctgtccacatccgccgccatattggccagcgtgtagttggcgtaaggttcggtgctgtcgccgcagccggcgaaatcaagccgcacagtggcaatgccattggcggccaggtcctcagccaggggcgcgaagtggccgtctccctgccggttgccggtaaagccatggcacagcaccaccagcggcagttcctcgccccgggcagatttggcaggcagctggatggtagccgggatattgccccgcgtaccggggatctcgatgttctttgggttggtgttgggttgtaatagtgtaacagctgccactatgcacagtgcaatggccgccaaacaggcgagcagaatccaaggtgcacgggttttcttggcatgtttcatatgggttcccctttctggttttttcaggtttattgtactatcattaaaacgtattcagggtggtttgtcaattgtgtcctgttcaagtcctctcatataaaaaatgcaaaaaaagcaacaagagcgtctgccttcgtagtagacactcttgctgctttactttttattcctttgtggtatgcaatacaacacactcatacggacgcagagtttctgaagggttatctgcgtagtttcctatcagtttttctgcagtcgcccaagcgtcaggcagttcagcgtggatttcttgctctgtcaggttgcaaagtacaagaagttcttccttgtccgccgagccatagcgccgataagccagcagatcggtgttgtcggggtaaagaaattcaatttttccctcacttatgacccggtgttccttccgcaagcgtaccatcgctttgtagaaactataaatcgaatccgcatcactcgtctgcgccgcagcgttgatgctcttatagttatccgccacaccaatccacggcgtacctgacgtaaagcctgcgttggggctgctgtcccactgcatgggagtacggctgtcatcccggctgcgctgtgccagaatattcagcgtctcagcctcggatttaccttgctcacgcagaatcttatagtagttaagactctccacatcacggtactggtcaatttcggtaaaatgaggattcgtcatgcccagttcctcgccctgataaatatagggtgtgccgcgcatacaatgaatcgccgtggccagcatttcggcgctttctctccaataggtcgtgtcgctgccgaacctgctgacggcacgcggctggtcgtgattgcaccaaaacaaagcgttccagccgccgtgttcct

SEQ ID NO: 7806 - DNA, 30956 bp, Unknown
  gut microbiota DNA sequence
cttttgtttataatttttttggttttttctttgtaaagaaagaacgggaaacttcaccccatcacaacaaaaagttcccacctgctcagcgcaggtgggaacttttttatgccgttaggcggtgcctatacaagattacttgtacaggtcgaccagcttggtcaggtgggtgtaacgagcatcggcaacttcctggttcttctcgaacagctccttagcacgatccgggaaggcgcgtgccagacggctgtaacgagtctcgttagccaggaactcctgatacttggacatatcgccagccttggaggtcagggtgaacgggttcttgccctctgccttagcagcggggttgaaggagaacaggttccagtaaccagcagcaactgccttcttcatctcgttctggcagttggtcatgccgcccttaacaccgtgcagctcgcagggagcgtagccgatgatcagagacgggccgggataagcctcggcctcagcgatgaccttgacagcctgagccatgttggcgcccagagcaatctgagcaacatagatgtagccgtaggtcatgcagatctcagccagagacttcttgctgatttccttaccggcagcagcgaactggcagacctcaccgatgttggaggccttggaagcctgtccgccggtgttggagtacatctcggtgtcgaagaccataacgttgacatcgtggccggaagccaggacgtgatccaaaccgccgtaaccaatgtcgtatgcccagccgtcgccgccgaagatccagaagctcttcttagccaggtactgcttatccttcaggatctcagcagcctcggcgctgccgtcagcctcgagagctgcgaccagagcctttgcaggagcgtcgttggccttggtgttgttcttggtggccaggaagttgtcaatggcagcatccaggtcagcattcttgcccttcagggcctcaaccttggtgatcaggttggcgcggacggtctcataaccgatctgcatgcccaggccgtgctcagcgttgtcctcgaacagagagttgatccaggcggggccgtggccagactctttgttggtggtgtacgggctgatagaagcggtaccaccccagatagaggagcagccggtggcgttggagatgaacatcttctcgccgaacagctgggtgatcaggcgggcataagaggtctcggcgcagcctgcgcaggagccagagaactcaagcagcggctggttgaactgagaacccttgacggaaacctcggaaacaacaccggggacgttgtccttcttgcggatgttctcgacgcagtagtcgaaagcagcctgctgagcggactggctctcctgcggcttcatctcgatggccttggtggggcagacggtgacgcactcgccgcagcccatgcagtccagaggagaaacagccatggtgaacttgtactcgcttgccttgggcttggtgtcggccagcttggtgctctcgggagcgttggcggcctcatcagcggtcaggcagaacggacggatggtagcatgagagcaaacgaatgcacactggttgcactggatgcacttctcagcatcccactcgggaaccataacagcggtgccgcgcttctcgtaagcagaagcaccctgctcccactcgccgttgacgttgccctcgaaggcagaaacaggcaggctgtcgccgtccatacgggcgatgggctccatgacatcgcggatctgcttgaccagggcgtcgggtcccttcagggccttcggagccggatcagcagcggggttggaccaggaggcggggacctcgaccttatggacagcgtccaggccggcgtcgatagccttccagttcatctggacgacagcgtcgcccttcttgccatagctcttcttagcagcggccttcatgtactcgacagcatcgtcgatgggcatgacgtcagccagcttgaagaaggcagactgcaggatggtattggtgcgcttgcccataccgatctcgatagccttatcaatagcgttgatggtgtacagctgaatgttgttgtcagcgatgtacttcttatcagcagcgttcagatgctcgtccagctcctcatcggtccactggcagttgatcatgaagacgccgcccggcttgacatcctggaccatcttcatgcccatgtggatgtaagcggggttgtggcaagccacgaagtcagcctggttgatgtagtaggggctgcggatgggcttgtcgccgaaacgcagatggctgatggtaacgccaccggtcttcttggagtcatactggaagtaagcctgaatgtacttgtcagtatggtcgccgatgatcttggtggagttcttgttagcaccgacagtaccgtcgccgccgagaccccagaacttgcactccttggtgccgggggcggaggtgatgggagcgggcttgacctcaggcaggctgaggttggtcacatcgtcggtaataccgatggtgaagcggggtttcggagcgtccttctccagctcggtgtagatagcgaagacagaggacggcggggtatccttggagcccaggccgtaacggccgccggtcagaacgacatcgttcatgccagcctcacgcagggtggtggcaacatccaggtacaggggctcgcccagggagccgggctccttggtgcggtccagaacagcaatcttcttgaccgtcttgggcaggaccttcagcagagcggaagaaacccagggacgatacaggcggaccagaaccaggccgaccttttcgcccttagcggtcaggtagtcaacaacttcctctgcaacgtcgcagatggagcccatggcgatgatgacgcggtcagcatcctcggcgccgtagtagttgaacaggtcgtagttggtacccagcttctcgttgatcttggccatgtacttctcaacaacagcgggcagagcctcgtaagcggggttgcaagcctcacgatgctggaagaagacgtcgccgttctcgtgagaaccgcgcatcttggggtgttcggggttcagggccttagcacggaactcctcgacagcctccatgttgcacatttccttcagatcggcgtagtcccacttctcgatcttctggatctcgtgagaagtacggaaaccgtcgaagaagttcacgaagggaacgtgaccctcgatggcagacagatgagccacgggagacaggtccataacttcctgcgggttgctctcagccagcatagcgaagccggtctgacgaacagccataacgtcgctgtggtcaccgaagatgttcagggactgggtagcaacggtacgggcagacacgtcgaagacgcagggcagctgctcggctgcgatcttgtacatgttggggatcatcagcagcaggccctgagaggcggtgaaggtggtggtgatagcaccagtaccgagagaaccgtgcacggcaccggcagcaccggcctcggactccatctcaacaaccttgacctggttgccgaagatgttcttcagaccggcagcgctccactggtcaaccgtgtcggccatggggctggagggggtgatggggtagatggcagccacatcggtgaatgcataagctacatgcgccgcagcggtattgccgtccatagactgttttgctctgggcatttttcttcctccgttttcattagagtgtattgcatttccgcgcgggtgtcatgccgcacgggcccacgtttatctgtctggcggcctgtagtttgctccgggcgcactgatagataaacgcttttgcatagctttattgtaccaaaaaacgcccccattcgtaaaggggttttatttagaatattgcacagatttttttgtccgatgtgtacattttgaccattttcaccaaatggcagttttttcaccctttttgcagggacattttctggactgttatatttttatcaatcgtaagtatgcttattttttaatgtcaatgacagttaacatagactcaccgacctgaaactgcacccggtaaccgccaaaatccatggcatatacacggtccgggtcatgctggtaggccgggcgtggatcgtttttcagcacacctaacaaagcggcccgcttattttctggcagtttgtccaaaagtggctgcgggcactgtacttccagcgcgtaagcagccgtctgctcggtaaagccgccgcgggcttcggggtgggcatccacgtaaggcaggtagggcttaatgtcaaagatcggcgtgccgtccaaaaggtcggccccttttaccagaatgtcgccgttctcgatgcccgacagctccacgcaggaaagacccagcgcattgggccggtaagggctgcgggtggcaaacacaccgcgccgggcgtttccacccagccggggcgggcgcacggtgggccgccagcttttgcctgcggcatactcggccgccaccgtcgagaactgccagatcagccacagatggctgtagccttccaaccccaccagcgcgttggggtcgcgatattccggttcaaacacgatgcgggcggtcagctccggcaccaggccgctttgccgcgggatgccaaatttatcggtaaagtcactttttatatgagcaataggacggatgatagtctccacggtaacactctcccctctttttcctattattatataagaaacgggtccatatttcaaatttttacatctcgttatcttcctattttttacgttttatggtaaaatagacacatcttacgaaaagggggcgaatctttggcacccatcatacgaaccgaaaaactgcgaaaagtctacgctgttggaaaagagcgcgttgtagcgctgaatgacgtagaccttgcgatcgaaaaaggcgaattttgctgcatcgtcggccaatccggcagcggtaagtctaccctgctgaaccagctggccgggttggaaaagcctacccgcggcaaagttttcattggcaaacacgagatcagcgccatgaacgaaaccgaattggcgcagttccggcagcagcatctggggttcatcttccagagctacaacctgctgcccacgatgaccgccgcagaaaatgtcgcattaccgttaatgtttaagggtatcgacaaaaagacccgcctaaagctggcccgcaaggaactgaaaagcatgggcctgcttggccgcgccaaccacctgcccactgagatgagcggcggccagcagcagcgtgtgggcatcgcccgtgcctttgtcagcaatcccaaagtcatttttgctgatgaacctaccggcaacctggactccaaaaccagtaagcaggtattgtaccgcatgctggagctgaccaagaaccagcaggtcactttcgtcatggtcacccacgagccggaactggccgaatgtgcggaccgggtcgtgaccattttggacggtaaagtctgctccaacgtggtgcaggacgaggccaccaaaacccgcaaccgtgaaggactgtttgccgacctgcagggcgatatgtccatcggaggcgacgcggcaaaagaaaaaagtaactgatatatggaggttttaccttgaaacgcttattttctctgttgatggtacttacgctggcggcagcgctctgcctgtctgtctgggcggacgacagtaaccctgattccggcatcaacaacggcggcaatacttcgaccgtgaccacagacaaccagggcgtttatgtcaccggctacaccgttaccacccccgcaggcggcgagatcaccacgctaaacgtgggcgatcaggtcaacatcgtgctgcaggtggtggaccattcctcggcccggtatgccgtaaaggccgaagacattgtggcccgcatcaattcttccatctttacttacaccggcaccggcgaaattggtcagctgtttgaaagcaacgacgaccctgaccagacccgcaaggacccccaatacaattattacagttatgtgctgttgttccgcgatgtcatctacaacggcggcggcaataccctgcccatcaacctcagctatctggataccagcaagccgctgcagcagttcagcgtaacgctgggccagtgcgtggacaaagaccaggccaccacaccgaacctcatcgtccgcacctccaattatggtgacgccgtaacggcgggcaccgcctttaccctctcgctgggcctgtacgccaccgacggcaacgaggcactgaacgacgtcatcgtctcgctgaccctgccggagaatatctcgctgggcggcggcagcctgtccaactatgtgggcagcatggcggccaagtcgatgcagaatatcaccttctcggtgctgcctgccgccggttttaccggcacagtagccgacattaccgtgaacatgaccggcaccggcgctatctccggcaaggcagtcagctccaccaccgctatctcggtgcctatcagccagcctgaccgctttgaggtaggccagctgcagttaagctccgaatccatcatggttggcgataccggcagcgtgaccctgagctacgtcaacaaaggcaaaaacgccatcggcaacctggaagcccgcctgactggcaccaacctgggcggcgaaaactaccagtacctgggcaacctgaatgccggcaccgagggcagtgtcgactttgacattacccccgacgccgccggcaacatctccggcgttattaccctgaactacgaggatgccagcggcaacccgcgcaccatcagcaaagattttaccgctacagcggaagaaatgaactacgatgattacatgccggatcccgattccaatatggacgaaccccagcagaccggcatgccggtttggggctgggtgctgatcgtagtctgcgtgggcgttgtggtggctgttatcgtggtcgtggtgctgcgcaaacgcaagaaggccaaggccctggctgctttggatgaggacagcgatgaagatatctgatgagatcagtctttcggcgcgaaatcttttacgccgcaaaggccgtaccgcgctgacgctggtgggtgtcgtgattggcacctgcatggttgtgctgatgatttccctgggaattgcccagaaccaggccaacgatgagatgatccagagttggggcgacctgacccagattgaaatttacggtggcggcatttctgtcggcagtgacggcaaagcaatcaagctggacgatgccgcgctgacgcagatccgtgagctgaacaacgtgctggcggccaccccgtttaccaacccttacaatttgcagggcacggtctcagccgggcgcaatggcaggtatgtatcggacattggcaacattacggcgctggatcctgtggctctggagccgatgggctttgcgctggaatccggccggtggctggacacgaccgtcatcaatgcgcaatccaaaaaaatcccggtcctggtctgtgagtacaccggctacaatttttacgacagccgccgcagcgataacagccccaagcgttaccgctggcagggccagaccgatgccaacggcaacgagttgccgccatttgtggacgtcgacaaggacaaaatgatcttgaccatcaccaacggcgacaacaccaaccccaatacccagacctgggaattggaagtggtgggcaagctgcagcaggatgtctccaagggttggtggacccaaagcggcattatcatgagcatgcagaacctgaaagtgatcgaggctgcctacaacaagatggccaagatcaaggacaccaattcttcctacgatcaggtttacgtcaaggtcgacgacctgaaaaatgtgggcgatgtggaagaagccatccatgacctgggctttcagagcacctggtcctcgaaccagcagcgggaggacatgcaaaagcaagtcttccgcagccagatgattttcggcggtgtagcggctgtttccctgctggtggcggccatcaacatcatcaataccatgacgatggcgatttacgaacgcacccgggaaattggcgttatgaaggtccttggctgtgagatcaataacatccgcacaatgttcctgatggaaagttcctgcattgggtttattggcggcgtgctgggcgtgcttatcagcctgctggtcagtttcattttgaacaacctgaccacgatcatggcgtcctttggccagtacgtagacctgtccggcatcatgggcgggtatggggcatccagttcgaccatctccatcatcccaccctggctgatgctgggtgccctggtgtttgcgactttgattggccttgtctccggcatcctgcctgccaacaaagccgtaaaaatcagtgccctggaggccatccgccacgactaacctactttctttggaaaagaaagtaggcaaagaaactttaatcatatatcacgtgaacgggttgcaaacttttacagaaatataaaaaggacgatgcagatttcacctctgcatcgtccttttttgtgattctattgaaagtttctttggttactttcttttcaaagaaagtaacataaccctcgtttattcctcgtcgctcggtgcgctctcctcggcggcttcctgggcgagttcttcggcttcgatggcggccagttcctcgggggtcgggtcggtttcgccctcgttgtcgatctgggcggtctcggcctcgttgtcgcggtccacgcgggccacgacggctaccttgtcgccctcagccaggcgcatgacacgcacaccgctgccatagcggctctgagtgttgatgtcagctgcatggatgcggatgaggattccgttctggctgatcaaaatcaggtcgtctgtatcgtccacgatcttgatgccggccacgccgccgttgttgtagttgcggatacccaaaccaccgcggttggtgatgcggtaatcatcaatgcggctgcggcgtcccttgccttcctcggtaatggtcagcacgctggcacctgggcggcatacaccggctccaatgacatagtctccctcgcgcagcttgatgacgcgcacaccgtggccggtacggcccatagcgcgggcgccgctctcggtaaagtggatggcggcaccatcgtgggtggcaacgatgatctcatcgtcgcccttggtcaagtggctccagaccaggctgtcgccctcgttcagggcaatggcgatcagacccgctttgcgaatgttacggaactgggacagcggcgtgcgcttaatgaggcccatcttagtgaccatcgtggcgtaggtgttgtcctcgtccacatcggcggcctgctgcagcatcagggtgactttttcgccctcctgcaattgcagcaggttgacgatgtgggtgcccttggcagtgcggctgccctctggtacctggtaacccttcaggcggtagacgcggccctggtcggtcatgaacagcatataatcatgcgtagaaccgacaaaaagttcctcagtaaagtcgtcgtccttttgggtcatgccctgcacgccgcggccgccgcggttctgtgcctggtaggtgtcaagcgtggtgcgcttgatataaccctcgtgggtcagcgtgaagacgcaggtctcctcggggatcaggtcctcgatgtcgacctcaccggaaacagcctcgatggaggtgcggcgttcgtcgccgtacttgtcggccagggtggtcaggtcggttttgacgatgttcttcacgtgctcgtcgttggcaaggatgtcctcataatcggcgatggcggtgcgcagttcacccaattcctgctcgatcttgaggatttccaggccagccagacggcccaactgcagcttgacgattgcatccgcctgcagttcgtcaaagccgaagttatccatcacagcctgacgggcctcggcaaagccgcccttgcaggcgcggatggtagcgatgatttcatcgacgatgtcgacggccttatgcagaccttccaggatatgctcgcgctccttggccttcttcaaatcaaaggcggtgcggcggcggatgacctgcatttggaactcaatatagcgttccatcatggttttcaggctcataatcttgggcacgccgtcatccaacgccagcataatgacacctacggtgtcctgcagctgggtgtaacggtacagctggttcagcacgacctgggggttggcatccttcttgatctcgatgacgatcttcatgccggtacggctggaagattcatcgttcaggtcgctgatgccctcgatgcgcttatccttcacgaggtccgcgatggattcaatcaggcgggtcttgttgaccatgtacgggatctcgttgatgaggatctcgtagcggccgtttttcttttcgatgatttcggcacggccgcgcagcgtaatttttccacggccggtggcgtaagcggcacggatgccagagcggcccatgatgatgccgccagtggggaaatcggggcctttgacgtactccatcaggcccgccaggtcgatctccgggtcatcgatgagggcgaccataccgttgacgatctcgcgcaggttatggggcggaatattggtagccatgccgaccgcgatgccctgactgccgttgaccaacaggttcggaaagcggctgggcaggacgtggggttcctttttggtctcatcaaagttggggtcccaatcgatggtatccttgtcaatatccgtcagcatctcgcaggccattttggacatgcgggcctcagtataacggtaagcagccggggggtcaccgtccacggaaccgaagttaccctggccatcgaccagcgggtaacgcaggctgaaatcctgggccagacggaccatagcgtcgtagacggaggcgtcgccgtggggatggtaggaacccagcacagcaccaacggtatcggcggatttgcggtagggatgctgcggatcattgccgcgctcgtgcatcgtgtacaggatacggcgatgcacgggtttcaggccatcgcgcacatcaggcaatgcgcgcgcaacgataacagacatcgagtagtccaaaaaggccgtctctatctcctgttttacatcgcgcacaatgaccttggtgccggaccccggcaccatgatgatattttcttccattctatcaccttaaatatctaatctatctctctagaaccactttacggcgggaaaattaaaattttcttgcctactttcttttcaaagaaagtaggttacacatcaagattcgcatacttggcatttttctcgatgaactggcgacggggttcgacctgctcacccatcaggatgctgaaagcttcgtcggcacgctcggcatcctcgatcttgatctgcacgatgacgcggttatccgggttcatggtggtctcccacaactggtcggggttcatctcgcccaagcctttgtagcggttgaccttggcgccgggcatttcggcgctcaaaatcttcatttcatcgtcattataggcatacttgacggtctggcctttctgcagcttgaacagcggcggctgagccacgtagacgtaaccgttgtcgatcagcggccgcatataacggaagaagaaggtcagcatcagggtgcagatatgggagccgtcaacatcggcatcggccataataaagattttatggtaacgcaccttggaaatatcaaattcatcgccgataccggtgcccagagccgtgaccacgggcatcagcttatcgttgccgtaaatacggtcggcgcgggctttttcgacgttcagcatcttgccccaaagcggcaggatggcctgaatgttggagtctcggcccatcttggccgagccgcctgcagaatcgccctccacaatgaagagttcggtcttgctgggatctttttcatggcagtcggccaacttgccgggcatgcggttggattccagcgcgctcttgcggcggaccagttcacgggcctttttggcggcggcacgggcacgggctgcctgggtggccttttccagaattgccttggcaacggcggggttttcctcaaagtactcggtcagggccttgtagaccacattgctgaccaggcccttgatgaaagtattgcccagcttggccttggtctggccctcgaactgagcctcctgcagcttgacactgatgatggcaatgataccctcgcgggcatcggggccggaaagattctcgtccttatctttcaggatgcctttagcgcggccgtactcgttcagcacacgggtcagggccagcttaaagccttcctcgtgggtgccgccctcaggcgtatgcacgttattggcaaaactgagcagcagttcattatagctgttatcgtaatactgcaaagccacctcggccacggcgccctggccctcgcccttcatatacatgacctgcggggtcagcggggtgaggtcgcggcgctcgcacaggtagctgacgaaggaacggatgccgccctcgtagcacatggtctcggtgcggacctcgtttccttcgctcttttcctcctgtgggcggtcactctcgggacgctcatctgtcagggtgatgcgaacaccggcgttcaggaaggcttcttcccgcaggcgcttgagcagcgtttcgtaacgatacagcgttgtttcctggaacatttccgggtccggcttgaaggtgaccgtagtaccggtggaggctgccgcgccgatctttttcagatcaccatcgggtttgccgcgcttgaagctctgctcatactcggcaccatcgcgacggacgcggacggtcaaccactcagacagtgcattaacgaccgacgcaccgacgccgtgcagaccgccagccaccttgtagccggaatcctcgccgccgaacttaccgccggcgtgcagcacggtatatacgactgtgacggccgggatgcccagcttgggctggatgtccacggggatgccgcggccgttatcggaaacttcgatgatattaccgggtttgattgttacttcgatatgggtgcagtacccagccagggcttcgtcgatggcgttatcgacgatctcgtagaccaggtgatgcaggccggaagggccggtagaaccgatatacatgccggggcgcttgcgcacagcctccaagccctccaggacctggatctgcgcaccgccgtaggcatggtctgtggccgtttcgcggttggtttcggtgatgatttcttctgccatgaaatgatagcctcctgttgtggtgggtatctgctgttgcttccctctatggaagcagttttattttaattcggccttttctgcccgcttttttaaggctacgggcgaaagctggctgatgtagatggtctcatcggggaaatcggtgacgaggaagctttttggcaggctaccaggggcacacaggtccaccacggcaccgttatcctcggcacttctgaaatattcttctgtccggcgggaggccccggctgtgtccagatcaaacacaccgattacatcccgggtattcaaaacaaagtcctgccctgcatggaaatacatgccctgctccccttttattcggtcacggtgcctgctttcaccatcacgattttaccattggtacgtgcaaatgcggcagtatcgcaggtggtcacgatggtctggtgctcacccatacgggtcagcaggtaggtctggcgttcatcgtccagctcgctgagcacatcgtccagcagcagcaccgggtgttcgccaaaaaggctgccgaccacgctggcctcggccagtttcatggccaatacgcagctgcgctgctggccctggctgccaaacacgcgtgcaggctggtcatccagtttgatttccagatcttcgcggtgcggccctgccaaacagaacccggcgtgcagctctgcatttttgaccgattccaatttttccgccagcgcgtctgcggtggtgttattggcacacaactggtaattcagctgcagcacttcggcatcgtgggagatctcgctgtaattcttggcggcaatgggggccagctccgcaataaatttgcggcggtgctccatgatctgcccaccgtactgggcaagctgctcattataagcatccagcagcagcgaggcattgggcgttatttcgtagcttttcagcagcgcatttttctgcgccacaagccttgtgtagcgccgcagcgccaccagatagggccggtacacctggcacagcgccgaatccaggaaccgccgccggccttccggtccgcctttgaccaaactgagcaggtccggctcaaacacaacggcctggaagttcccggccaaggcagccgcgcggccttggtccacaccgttcagtttcgcggtgcggcccggccgttgactgcctttactgcccaccgttaaacggatagttttggcgcaatcctcagtctcgaacgcaccctcgatcaccgaaaagtcgcatccgcggcggatgagctcggcatccttggacccgcggaagcttttgccgccggtcagcagccagacggcctccagcaaattggtcttgccctggccgttggggccgcacaaaaccgtaaggtgagggtcaggtgtcagctcggcgtatttgatattgcggtggtcggtcagggtcaggtggttcaggcgcattacgcgccctccgcgacctgcacggtctggccttccagctccaccgtgtcaccggcgcgacactttttgccgcgcatcgtgcagacctcgccattgaccttgaccgcgccgccctggatcagctccttggcttcgccgccggtctcgcacaggcctgcaaatttcagcagggcatccagcttgataaactccgtgttgatacgaattttttccatacgttagccttcattcttaaagcgaaccggcaggaccaggtagatgaagtccttgccgttttccggcaaaatcttgacgggactcaagggtccgttgatctccagtaccatcttctcgcacttggagtagcgcagggcgtccagcaggtagcggttattgaaaccaatctccacggggtcgccggtcatctccacgggggcaaactcgtccacgaccttgcccagcggggtctggcagcgcacggtgatcttattctcggtaaaactgatgcgcagcggattcttcagccgctcggtgatgatcagcgaagcgcgctcaatcgtatcgataaaggtcttgcaatcaacggtgatacgtgttttcttatccttcgggataacgctctcgtagttcaggaagtcgccctcgatcaggcggctcatgatggtgtagccgttggtggtgaacacgacataacggcggttggcatcgatcttcacgtcctcgtcggcgccgcccatgatcttgagcagttcctgcagcgttttgctggggatgatgatgcggatgtcgcgggtgcactcgacgtcacgctggataatggcgaggcggtagccgtccagagccacaaccgtcaggctgcccggctcaatgacgaacagttcgccggtgtgggctggctttttgtcgtcctggctgacggcataaatggtcttttcgatcatttcgcggatgacgccgcatttcattgtcatggtattatcggcgccggtcacgggcaggctggggtagtcgctggcgttcagggcaggaatttcaaattctgccacaccaccgctgatttttgcctgaccttcgtcgttcagctcaatgcggacattgccggcgggcatgcggctgaccattgagcccagcagcttggcatccagtacggtctcgccgggaaccagcacattgcactcaatggtggtggtgatgcccatctccatatcgtaaccagtcaaagtcaaattaaatccttcggctttcatatagatgccttccagcacggggatggcggcgcggttggtgatggcgcggctgacaccctcaatggcggaggcgagcatggatttttcgcattcaaatttcataattgattcctttctacttactttctttgaaaagaaagtaagcaaagaaactttaaatgagtcctcttgagagggaaatttttgatttagttacatttttccacaaaaggattggtagtttgtttgcaattttgccgttcagtttgcaaaagtagagaataaactagaatcttttatcgtagtagtagtagggggtgtgaaaactgtggaaaaatggcgcgtttattatcactgcgcggaaaataagcgttggattttccagatttcgccgtgaaatcttttgtggaaaactgggaaaactcaacttttccacacgactcttggaaaacccgttgttaataactaaaaactttgtggaaagatttgtcgttctttctttgcaaaaaaagaaccaaagaaactctaatatcgatctgaaactaagaggatgtagagtataacttgcagcccacgtgaactggggataatgtgaggaaaaaaatatatccacttaacggtgataatatattaaaagttctttggttactttctttcaaggaagtaacagaaactcccgtaaaatcaggtacgcacgtttttcatgatgtcgctgcacatttctttcaggtgctggtcgcgggagatattttcctccatcgttttaatagaatacacaacggtggaatgatcgcgctggaattcctggccgatagcttccatgctcatgccggtaacttcgcggatgatatacatggtcatctgccgtgcggcgctcacatttgcgttgcgctttttcccgcggatatccgcaggaagcacattgtaagtgcgggcgacctcattcaggatcttttcgatcgtgaccgggatcggctggctgtcgttcagggtatccttgatggctgtggtcgtcacaccgatacagggagcaatgccttccagcatgtaataagcattcagttttttcacggcgccttccagctggcggatgttctgcttcaaatggttggcgatgtactccgcaacatcgttgggcaggtccaggttgagaagttccgccttgcgcttgacaatggcaacgcgggtctcaaaatccggcggctggatgtcggctgtcaagccccactcgaaccgggtgcgcagacgctcctctaggctcttgatctcctttgccgggcgatcggacgcgataacgatctgacgaccgtcgttgtgcagggtgttgaaagtgtggaaaaactcttcctgcgtactttccttgccggccaggaactggatatcgtcgatcagcagtacgtccgccttgcggtacttgtcccggaactgctccgtggtggccgtcttgacggcggtgatgatctcattggtgaacatttcacagtccacatacacaatgttgaaatccgggtgattctttttgatctccacctggatcgcgttcagcaagtgggtcttgcccaggccggatggcccgtagatgaacagcgggttgtacgcgccggacgggttggccgcaaccgcctgcgccgccgcataggcaaactggttcgatggacccttgatgaagttttcaaaggtgaaatcataccgaccgctgggcagggatttttcgtccagcttgggtttcttctcttttccttcctcgtcgccgccctctttcggggtaacgaatttcaggtcaacatcaaagccaagtaccgatttgaaggcatccttcaacgtagttgcatagcggtccgacacaatgcttaaaataaacgcattgcggatctccagcgtgatagtgttggaattttcaaagctgaccgccttgatgtcgctgatataatactgataggtcgcctcggaagtatgttcacggcaatactgcttggccgcgttcaatacgtcgttgatggaatccatggatctcgatactccccacttcctgttaaaaatcgcccctttcaacagggcgcaaaaataccacatacagtataccacaaaacagcacccaaaacaacagtccctttatataaaggtagaaattttttgaaaagtccaagctctgaaccgagttttcaacagatagtggaaaaaccatggtggaaaactgcacggccgcccttaaaataaaaatcacgcgcagacaagaggggcaggaccggcgtgtgactatgtgggaaaaaaccggctgtacactacatcttgtagaccaacaaaaaatccgcaataacttagcgtttctgcgaaaaaatatcccgaaaagtattgacaaaacctatatacatcgcgtataatctaagtctgcaaggctgccccagtgtagggcaatagcctggactagccccatactgggaatttcaacaggaggaatgaaaaatgaagcgtactttccagcccaagaagcgtcagcgcagccgcgtccacggtttcctgaaccgcatggctaccaagaacggccgcaaggtcattgctcgccgccgtgctaagggtcgcaagagcctgactgtctgatctttggtataacaatgaagtaaagggttgctgatggaatatcagcagcccttttttcaaaaaaggatttttaccatgcgttatcgcactttaaataaaaactggcatttcaatcgggtatacagccgcggcaaaagctacgtgcacccccatgtggtgctgtacgtggcaaaaaaccgactgggctatacccgcatcggcctgacggctaccaagaaagtaggtcacgctgtacagcgcaaccgtgcccgccgcgtaatgcgggcagcactttgcgaacatctctcgcaaaatatcggcggatatgatataatactggtagcgcgcggccagacgccgaagctcaagagtacccagctgagcagaacactgggtaaactctttgcaaaagccggtctgccggacctggctgctccccagacgcccccgcaatgacccagctgctgatcgccctgctgaaggggtacaaaaagtacatcagcccgcatctggggcatcattgccgctttgtgcccacctgcagcgagtatgccatgcaggcgctggccgtgcatggcttttttaaggggacacttttaacggtctggcggttattgaggtgccagccgttggcaaaattcgggtacgacccggtgccggaaaaaggaaaatgggtgaaccccaaccggaacctgacccgctccaaatagcctctcatgtctttgctctgcgtggcagagacctacataaaaaataaaaaggtcccgggcgcagacggggcagaatggatagagtatgaactttatgtacttcctggccatcctgattggcccgctgatgaaggtgctgtacagcttcatcggcaactacgcagtgacgatcatcgtcgccaccatcatcatgaagctgctgcttttcccgctggcaatccaccagcagaaatccacggctaagatgtcggtattccagcccctgatcaacgagatccagcaaaaatacaaaaacgaccctcagaaacagcaggaggagctgatgaagctccagcaggagcatggctataaccccatgggcggctgcctgcccatgctgctgactttcctggttctgttcggcttcctgggcgttgtgtattaccctgtccattacatcttcggcgtggataatgcttctatcaaggctgcctgcgaggcaattggccttgtaaccactaacacctccaccatgcagacggccctgattcaggccatccacaacggtgcatccattgatgcgtccatcattccggctgccacggttgccgagattgccaacttcaacaccaccttcttcggcctggatatctgcgacatcgcaggctttgccctgaccccgctggccatcttcccggccatcgctaccgttaccatgttcctgagctacttcatcacccaaaagctctccggcatggaagcccagatgcagggcagtatgaaaatcatgatgctggtctgcaacctgatgttcgttaccttctgctttaacgcccccatcggcttctccttctactacagtgtttccaacatctggcagattggccagagctttgtgacctataagatctacagccccgaaaagttcaagaagcagtatgaggaagaactggccgccaagcgtgccgagaaaaagaagaagcgcagcgtgaccgtggaagaaaacggccagaccgttaccaaagaagtcagcctggcagacgccaacaagctgcgcctggagctggcacgcaagcgcgaagctgaactgcataaggatgaacggaccaccccgttgaataaagaacaataataagaggaggcaacaaagatgcgcagcattgaaatgagcgccaagaccgtagaagccgcggtacaggctgcctgcgaggccctgggcgtagaccgcgatgacatcaacgtaagctacgaagtgctggaattccctgcccgtaaactgttcaagaccatccccgcaaaagttctggtaaaggtcgaggagccggaagtagaggaagtgaagcccgtggaggatgcccccgctcccgtcgaagctcccgccgtccccgcagaggaagctgccccggctgttgagcctgccgctgaagagtctgccgaggccccggttgaggaagacgcttctgccgatgaggaagtttccctggatattgctgctgacccgcgcctgcaggccgctgttgattacctgacccccatttttaagctgatgggcgtggaggaattcagctttaccgccgtcaagaagggcgaagccacaatcctgcgcgtgatcggcgagcacatgggtgctctgatcggccgccgcggcgagacgatggagagcctgtcctacctggccagcctggtcatcaaccgcatggaaggcccctacgtaaagctgggcctggatgtgggcggttaccgcaacaagcgcgaggatgatctttctgccctggcaaagcgcattgccgaccgcgtgatccgtaccggctgctactacgagatggagccgatgaatccctacgagcgccacatcatccacaccgctatcgcggacattgagggtgttcgcagcgagagcaagggcgaaggacctacccgccacatcgtgatctactccaccgatcccaacgcatccaacctgccggatcgtgacaacgcccgcaacacccgtggtccccgccgcgatggcagccgtggcccgcgtcgtgatggtcgtggtccccgccgtgacggcggccgcggtccccgcatcggcggcccgcatcgcgatggtcgtggtccccgccgtgatggcggccgcccctacggcggccaccgttccaatgtgccgggccgtgagtttgcggatcgtccccgcgaccccaatgctcagcccatggcccccaagaccacggagcgcatccacgacggcgacgatttcgccttcggcaagatcgagttttaacctacttttctttcaagaaaagtaggaaaaagaacttttaattatcctaaataaaaagagggaggcaccggtaacacggcgtctccctttttgtgtagaatcttacggtttgattgcaggggccgatgttcgtcatcggcccgcaaacaagcaatcccaaaagttttaaacaagtctgtggaaaacatgaaactatacgaaatctaaaatcgaaatccctgttggatgctttggtatccgtctgggaagattccgtctgcacgacccatcatttcctttcggatgcggagatcctcaaaatcaaaacctacatccctcaggtcgttgcccaccacgtagatgcacactttctgcacgggctgcttgtgcttaacatgcaacaccggctggccgcagagcgtctgcgtttcaaaggtaagattcggatcctgcgcgccgggatcttcggcaccgcggaagccgttttgaatgtctccagcagtttgccgtagggctgtgccatgatcttttggaaatggatgatccgtgtcgcttttttcagaattgcatattttgcagacatccaaacccatccctgtaaaattagaaataactaacttataataaatgcaccttcccggcaattgcccaccacaggtgcattttcagtataggaaaggaatggtcagttttcaacaagctgttgaaaatcactcagcagtcggcgtagttatataatcctcggcacggcggacagcctgcaccttgtgtaggaaagcagccaggtcggcgttgtacttgcgggcgatttccaaggtgttttatttgcccctgttgtgtggatcaactcgctttttgttggtgacataagagcttagctttttatttttcaaaaaaccgcagaaaaaaggtaggaaaaagaaaaaattcgtggtatgataaagtgttagaaactttacttcacggaggtatcgcagtggatcgcttacagcagacaatctgtgcactggcaacgccccccggcaccggcggcattgccgtggtgcgggtatcagggccggacgcctaccccatggtggaaaagatcttcgtcccgctccacgtgggacgcaaggtggccgaggccaagggctacaccgccatgctgggccactacctgctgcacgggcaggaaatggacgagactatcgccctcttcttccgcgccccccactcctataccggcgaggatgtcatcgagctttcagtccacggcggtaccgctatggcggacggcttgctggaagcccttatcaccgcgggcacagccccggcagggccgggtgagttcacccgccgcgcgctggagcatggccgcatgtcgttgacccaggctgaggccgtgatggaagtcatcgccgccaacggtcgccagggtgccgcgctggccaagtcggccctggatgggcggctggcaaaacgcatcggcgccatccagaccgtgctgcaaaacctgaacgcccacctgaccgcctggatcgactaccccgaggaggacgtgccggaactttccgatgagcatctgctgaaaacgctgggcggccagaaagcggagctggacagcctgatccgtggttatggtgccggtgcggtgctgcgccggggcgtggattgtgtgctgctgggccgccccaacgtgggcaaaagtacgctgttgaacctgatggccggttttgaccgggccatcgtaacgccggtggcaggtactacccgcgatattgtagagcaggccgtccagctgggcgagatccggctgaacctgtttgatactgccggtgtgcgggacgtgggcgccgacggcgatgccatcgaagccgagggcatccgccgcagctggaaaaagctggacgaagccgggctggtgctggccgtgttcgatgccgcccagccattgaccgacgccgatttagaaattgcccaccgctgccagaatcgccctgcgttggcaattttgaacaaagaggatctggccgattccacggagaacgcggcccagaccttgcagccctattttaaaaaggtcatcaccctttgcgccaaagaggctgacagtttgcaacccttgaccgatgccgtggccgaactgctgggcacagcccagctggaccccggagcagcgcagttgtgcagtgcccgccagctggcggccgccacccgtgcgcgggatgccattgccgaagcgatgaaggcccggcaggcaggctttgggctggacgctaccggtatctgcctgaccgatgcgttgcaggctctgtgcgatctgaccggcgaggatgccagcgacgcgaccatagaggaagtatttgagacgttttgtgtgggtaaatgatagaggaaaaaacgtatggataaactgggaagttatgatgtggtagtgatcggtgccgggcatgcgggcatcgaggctgcccacgcggcagcgacactaggggccaggaccgccgtgttcaccctgtcgctggattttatcggcaacatgccctgcaacccgtccatcggcggtaccgccaaggggcacctagtgcgggaagtggacgccctgggcggtctgatgggcattgctgccgacgccacctttttgcagagccgcatgctgaaccggggcaagggccctgccgtccacagcctgcgtgtgcagaccgaccgcaagcgttaccacatgtggatgaaacacgcgctggagaaaacgccgaacctggacatccatcaggccgagatcgtggccgtggatattcaggaaggcaaagtttgcggcgtcatcaccaatttaaacggctactatagctgcaaggcgctggtcatcgccaccggcaccacgctgggcgggcgcatctttgtgggcgaggctcactacgacagcggtcccgacggcacccatgccgccacggcactgaccaaatgcctggtggagcagggctttacgctgcgccggtttaagaccggcactccggcccgcgttcaccgccgcagcatcgactttacccagctggagcgtcagcccggcgacccggatgaggaattgcagcctttcagctttttaacgcgagagccgatgcacaacaaggtggattgctacatcgcttacaccaaccccgagacccacaaggtcattctggataatctgcaccgttcgccgctctacggcggagacatccagggcgtcggcccgcgctactgcccctccattgaggataaagtggtgcgttttaaggataaggagcgccaccccatttttgtagagccctgcggcgaggacaccgaggaaatgtacctgcagggcctttcttccagcctgccagaggtggtgcagaatgccatgtaccgtaccatcaaggggtttgagcatctggaaatcatgcgcccggcctacgctatcgagtacgattgcgtcgaccccaccacattaaagcctacgctggaaagcaaggtggtcgcgggcatttatggcgcggggcagttcaacggaacctctggctacgaggaagctgccgcccagggcttgcttgccggcctgaacgccgcccgccacgcgctggaaaaggatgagctggtgctggcccgccacaccagttacctgggaactttggtggatgacctggtgaccaagggtgtcatggacccctaccgcatgatgaccagccgcagtgaataccgcctgagcctgcggcaggataacgccgacgaacgtctgacccctatcggccgggagtacggtctggtacaggatgaccggtgggcagtattctgcaaggatcgcgagatcaagcagaacgagatggaccgcctggccaaaaccacggtgcggctggccgacctgaaagctgccgtgcccgaagacaccgagttgggggaaatcggcggcacggcgctggaactgatgcgccgtccctacatcagctatgagctgatcgccaaagtcatcggtcgcggcgagggtgtgacccctgccatggcccagcgcatcgagaccgagatccgctacgccggctatatcgcccgtgaggaacggttgatccgggacattcagcgccatgagaatgtgaagatccctgaggacttcgattacagccccattgagatgatcacgctggaagcccgtgaaaaattacagaagatccgcccccgcacgctggcccaggccgggcgcatccccggtgtctcccccagcgacctggcccagctgagcattgtgctgctgaaacagaaatgagtgttaaactatgatcgataaaaaccgcctggctgaaaaatgttccacgtggaacatcagcctctcccctgcccagctggaccagctggatcactacgctgaaattttggtgagctataatgagaaggtcaacctgacggccatcaccagccccgagggcatcgaggaccgccactttactgacagcctgctgtttgccgctcagcccgaagtgcagggcaagatggtggacgtgggtaccggcgcaggtttccccggtattgtggctaaaatttataaaccggacctggagctgaccttgatggaacctaccggcaagcgtgtagaatttttaaagtatgcctgcgccgagctgggcctgaccggcgtggagttcgccaaggaacgcgccgaggaagccgcccgcaaagtctggcgtgagcagttcgatattgccagcgcccgcgccgtggcagccctgccggtgttgagtgaatactgcctgccgctggtcaaagtcggcggcgtgttcatcgccatgaaaggccccgaagctgacgccgaagctaaggccgcagttaacgctttaaagaagctgggcggtaaataccgcgagacccggcagttcaccctgcccgatggcagtgcccgcgggctggtggtgtgcgaaaaaatatcgcagactccgaccgtttaccccagaaacggcggcaaaattgccaagaagccgctgtaaaaccgcgaaaagggccaaaatccagcgaacgatttctcttccacttttttccagttcgtgctatgcttttcccagggaaaagcatagcattttttatgtgataatcacccgcagggaggaatcaaaagtggctaagaatgaactacaaaaacaagggcgcattgtcatgctgcccgttgactgcatcgaaccgtccccttaccaggcccgcacggcttttgacgagccggagattgcggcgctagccgtcagtattctgcaaaatggtctgctgcagcccatcagcgtgcggcgggtggggctgcggaaataccagctcattgcgggtgagcgccgcctgcgcgcctgccgccttgccaagctggaaaaagtgcctgccattttggcggactacgatgacagcgaatccgccgcactgggtctgttggaaaacttgcagcgcagccagttggacccctttgatactgcccgcggcattaaagaggtaatccgcctgtggggctgtacccaggccgaggctgcaaggcggctggggttaagtcagcctgccctggccaacaaactgcgcttacttacccttacaccggaacagcagcagctttgcaccgccaaccacctgaccgagcgccatgcccgcgcggccctgcgcctgccggagagccgccgtaccccggcactggaaaagatggcgcgggataagctcagcgtgcggcaggcggacaaactggtggaccagatgttggccgcccccaacagccccagcccctgccgccgcaccatccccatggtgcgggatgtccgcttttttgtaaataccctgcagcatgccgttgacctgatgacccagaagggcatccaggcaactacccactgtgataagcatgacgggtgcctagagtacattgtgcgcatccccgtaggcagtgacggccgccctgtgcagcagccaacgactccgccgcaggaaccagccaaagagtacgcgaccgaggtataaagtactgaaaatagagaaaaccctgtaaaatgttccacgtggaacattttacagggcattttttgcgtttgcccccttttttatagtgtttccttgtgctataatagaatccagacggacaaaaccgtcttaaaatgcaaaaagacggagggaaaagcgtggcaaaggtaatcgcagtagcaaaccagaaaggaggcgtgggcaaaacgactagcgccgtaaacctcagcgcctgcgtggcagcactgggcaaaaaggtccttgtcgtagacctcgacccccagggcaacgcttccagcggttacggcattgccaaaaacaagctggaatccgacatttatacttgcctgatcgaggacgacgatgtgcgcaacgccatcgtcaagaccgagtataatgccgacctgcttccctccaacacccaattggccggcgctgctgtggcgctggtcaacctgccccggcgcgagatgcgcctgcgtagcgtgctggctcccattgtgccgctgtacgattatattttcatcgattgcccgccttcgctggatctgctgaccatcaacggcctgtgcgccgccgataccgtgctgatccccctgcagtgcgaatactacgcgctggaaggcctgacagagctgatgaacaccttaaaaatggtgcgaaaaaagtataaccgttatctggacattgagggcgtgctctttaccatgtactccggccggctgaacctgacaatgcaggtggtggcccaggtcaaaaagtactacggggacaaggtgttcaaggcggtcatcccccgctcggtgcgcctgtctgaggcaccgagcttcggcatgcccatcaatttctatgagccgaacggcaaaggctgcgaggcttacatggaactggcacgggaatttttaagcaagaacgagaggtgagccgatggcaaaaaagaaaatgggcggcttaggcaagggccttgacctgctgtttgccgacctgcccgagacctcatcggatgatgcggctgcctctaccctgccgctgcgggagatcgaaccagaccccgcgcagccccgcaagcagttcgacgacgatgcgctgaaccagctggccgacagcattaccgaaaacggcctgctgcagcccattgctgtacgccccaaaaagctgggcactggctacatcatcattgcgggcgagcgccgctggcgtgccgcccggctggccgggctggatgaggtgccggtcatcatcaaggatgtatcggacgaacaagccgcagccctggcgctgatcgaaaacctgcagcgcgaggacctgaatcccatcgaggtagccgagggctgccaccagctgattgaaaagtacggcctgacgcaggaaacggccgccaaaaagctgggtaaaagccgcagctccgtcaccaacagcctgcgcctgctggcgttgccgcaggaggtccgccataaagtcagtgagggcattttaagtgccgggcacgccaaagtgctgctgggcctgcccacacaggagttgatgcagcaggcggccgaggaaatcgaggccaacgggctgaacgtccgccagaccgaagccctttgcaaaaagctggccaagcctgccaaaccgcccaaaccaaagccagaccccttcagccgccccaagcgcgcggtggagatcgaagctgccctaaaagaagtgaccggcagtgaggtccacgtggaatacaaagatggcaaaggctcgctgaagatcgacttttacagcgatgaaatgctgcaaaagttcgcagatctgctgggccattacgacccggaggccgaataatcaacctggttttctataaagtatagaaaaatatagaggagaatcatcatgttagacattcgttttgtccgtgaaaatccggaggcagtcaaggaaaacatccgcaaaaagtttcaggatgccaagctgcccctggtcgacgaggtcatcaagctggatgccgagtaccgcgctgccatcggcgaggccagcgacctgcgcgccaaccgtaacaagctgtccaagcagatcggtgctctgatgggccaggccaagaaggaccccagcaaggcagccgaggccgaggaaatcaagaagcaggtcaccgctcaggctgaccgcctgaaagagctggaggccaaagagaccgagctgcaggccaagatccaggaaatcatgtacacgatcccccagatgatagaccccagcgtgcccatcggccccgatgacagctgcaacgtcgaggtccagcgcttcggcgagcctgttgtgcccgattaccccatcccctaccatgtggacatcatggagagttttgaaggtatcgatttggatgccgccggccgcgtttccggcaacggcttctactacctgctgggcgacatcgcccgcctgcacgaagctgtgctggcctacgcccgcgacttcatgatcaacaagggcttcacctacgtcatccccccgttcatgatgcacggcgatgtggtcaagggcgttatgtccttccccgagatggatgccatgatgtacaagatcgagggcgaggatctgtacctgatcggtacctctgagcataccatgatcggccgtttcatcgaccagaccattgatggcgagaagctgcccctgaccctgaccagctacagcccctgcttccgtaaagaaaagggcgcccacggcatcgaggagcgcggcatctaccgtatccaccagtttgagaagcaggagatgatcgttgtttgcaaacccgaggacagcatgacctggtacgacaagctgtggaagaactctgttgagctgttccgctctatggagatccccgtccgtcagctggagtgctgctccggagacctggctgacctgaaggtcaagagctgcgacatcgaggcatggagcccccgccagcagaaatactttgaggtttgcagctgctccaatctgggcgacgcccaggcccgccgcctgcacatccgctataaggatgagaacggcaagacccagctggcccataccctgaacaatacctgcgtggccccgccgcgtatgctgattgccttcctggagaaccatctgcaggccgatggcactgtgaccatccccgaagtcctgcagccctacatgggcggcaaggccgtgctggtccccaacaagaagtaattttgtaacaagcgcttattcccgcactgcagccgcaatgcgggaatttttttggtattttttcaaaaaagtcgggaaaaatacttgacatggaccccgctttttcgtataataataaagcactttcgagtgcacctcaacaaatgtggcggtatagctcagttggctagagcattcggttcatacccgaagtgtcaccggttcaaatccagttaccgctaccacatgatacaaggtttcgctaaaatacttgggggtcggttgcaatagtagccgataagttgcttgctgttttagcgaaatcttgtattatataaggcccgttggtcaagcggttaagacacggccctttcacggctgtaacatgggttcgattcccgtacgggtcaccaaaagctctgcttcttaggaagcagagcttttttctttatgttgttacttct

SEQ ID NO: 7807 - DNA, 8746 bp, Unknown
  gut microbiota DNA sequence
cttacggaggaaagaacagctatattcaccgccccactggcagttattctgatggtggtcgaacaactggtggtggggcaggcttcattactctacaacctcgtagtcggtgaggttgatttttccgaagctgttgtggacttccatgtcgaggatgtgaccgggaacgtctgcgatattgccgccgaggtcagcgataatctggcccatctggtcaggcgctgcgcgaacgacggccgtaatctgaccgtatgcgtccttgctgtttttcagcgtgtgcagacgatacacgtcataatgctggacggtgttcgcatttttgcccgtagtgggagtaaagtcgccaactgcgtgttcgatacctacgatttcgtacttcatttttgtaccctcactttctttttccggttttttttactgcccctgttttgtgaaccaactcggtttttgttggtgacataagagtacaactttttacgtagaaattttttcatcaaaatattgacagcacgatttccctatgctatactttgtctcgattttgaaagacgaatcgagtttgtaagagtttttcaaagcaatttacctacggaccgcccgtcaggggctaaggccatacggacagccgggtccactgccgatcggcaactttgggttgccttattgattgagttaaaagctcaaattttataagttggttcctttacagccatgaaattgcacgttttggcgtgcagacttgtgaaacggtcaataaagagtagtaaaagtaagattgctatatagactctgacacgctcagcctttttgaatcatgcaggaccttctctcggtgaggtatcggggggtaatcggtctgtgtccaaatatgctgaattcaaacgcaagtctgcacatctgtgcatggcttgcgttttttgttttgcaaagggatcgcgaacggaggtaaaaatgaacggagaagcaaagcgcacccggctggatcagcgccgcgcccccatccatgaagcactggaaaactttcgccggatgcgcgttgttccctttgacgtgccggggcacaagcgcggacgcggcaatccggagctgaccgcgtttttgggccagcagtgcgttggtgtggatgtcaacagcatgaagccgctggacaatctctgccacccggtttcggtcatccgcgaggccgaggagctggccgccgatgcgtttggcgcggcacacgcctttttgatggtgggcggcacaacgagctcggtgcagagcatggtgctgacggcctgcaagcgcggggatgaaatcatcctgccacgcaatgtccaccgcagcgtgctgaacgcgctggtgctctgcggcgcggtgccggtctatgtaaacccggaggtggacaaccgcctcggcatcagtctgggcatgaagcgtgagcaggtggccaaggccattgccgagcaccccaacgccgtggcggtgctggttaataaccccacctactacggcatctgcagcgatctgcgcgccattgtgcggatggcgcatgacgccgggatgctctgccttgcggacgaagcccacggcacgcatttttatttcggcggcgggctgccggtctcggctatggcggcgggcgcggatatggcctccgtctcgatgcacaagagcggcggcagcctgacccaatccagcctgctgctgaccggccccaacgtccacgcgggctatgtgcggcagatcatcaatctgacccagacgacctccggcagctatcttctgatgtcgagccttgacatttcccgccgcaatctggcactgcggggccggcaggtgttccatcaggtggccgacatggccgagtacgcgcgcgaggagatcaacgccgtgggcgggtactatgccttcggcaaggagctttgcaacggaaactccgtttttgattttgatacgacaaaattgagcgttcacacgctggacatcggccttgcaggcattgaggtgtacgacatcctgcgcgatgaatacgacattcagatcgagttcggcgacatcggcaacattctcgcatatctctccatcggcgaccgcccgcaggaggtcgagcgtcttgtcagcgcactggccgagatcaagcgccgctatcacaccgacggtgcgggacttttgagtcaggagtacattgaccccgaagttgccgccagcccgcaggaggcgttctacgcccccaaaaagagcctgcccctgcgtgagacagagggcatggtctgcagcgagttcgtcatgtgctatcccccgggcatcccgatccttgccccgggcgagcgcatcaccgcgcagatcttggattatatcgagtatgccaaggccaagggctgcagcatgaccggccccgaggacccggacattctgcgcctgaatgtgctggcttgacagggaggtttgcagtatggaaatgtggttttcggaatttcacaccccggatgtcaagcacagcatccgggtcaaccgccagctttactccaagcagagcgactaccagcgcatcgacatttttgagacaccggagtttggccgcgtgctgacgctggacggcaacgtcatgctgaccgagcgcgacgagttcatctacgacgagatgattacccatgtgccgatgtcggtacacaaaaacgccaaggacattcttgttatcggcgcaggcgacggcggtgtagtgcgggaactgacccgctacgaccgcgtggaacgcatcgaccttgtggagatggacccgcaggtcatcgaagcctgccgtgcctatctgcccggcaacgcctgccgcatggacgaccgccgcgtacacatttattacgagaacgcgctgaaatttatccgcaagtgcgaggaagagtacgacctcatcatcgtggattcctccgacccgttcggcccgtcggaggggttgttcacccgcgagttttacggcaactgcttcaacgcgctgcgcgcggacggcatcatggtcaaccagcagggcagccccttctatgctgaggacgcgaccgccatgcagcgcagccacaagcgcatcgccagtaccttcccgatcagcaaggtgtatcaggcacacatccctacctttgcggcgggctactggctgttcggctttgccagcaaaaaatatcatcccatcaacgatatggacgccgatgcgtggaatgcgctgaacatgcgcacccgctattacacgacccggctgcatgtcggtgcattttacctgccggcgtttctggaggaaatgctgcgcgaagtggaggaacactgatgctgcatcgcaatgttgaaaatttcatcggctgcgacagcagctaccgcacggcaagcattgttttgtacggcgcaccgtttgattccaccaccagctaccgtcccggcgcgcggttcggccccgctgccatgcggcacgaaagctacgggctggaaacctacagcccctatcaggacaaggacctgacggacggcagcgtctttgacagcggtgatttggagctgtgcttcggctcaagcgagagcgccctggtggacatcgaatcccgcgcggcggagatcctgcgggacggcaagctgccgcttctgctcggcggcgagcatcttgtgaccctgggtgccgtgcgcgcagccgtgcgcaaatatcccgatctgcacatcgtccattttgacgcccacgccgatctgcgggacgattacctcggcgcacagctgagccacgcctgcgtgctgcgccgctgtcatgatttggtcggcgacgggcgcatccaccagttctgcatccgcagcggtgaacgggaggaatttcagttcgccgcgcggcacaccgatatgcacaagttcgactttaccgggctggccgagctgaccgactggctgtgccaagccgatgtgcctgtctatctgaccatcgatctcgactgcctcgacccgtcggccttccccggcacgggcacgcccgaggcgggcggcgtcagctttttgcagctgcttggggccatccgcaccgtgacgaaagcgaacatcattggcgcggatgtgaacgagctggctcccatgctcgaccagagcggcgtttccacagccacggcctgcaaggtattgcgggagttgctgctggcgctggaaaaataaaaatctgttataaattcaaacataaaggagttctatcatgagcaaagttcttgttatcggctgcggcggcgtggcaagcgtcgccatctccaagtgctgtcaggtcagcgatgtcttcacagagctgtgcatcgccagccgcaccaaatccaagtgtgacgcgctggccgccaagctggcacccaccacccagaccaaaatcaccaccgcgcaggtcgatgccgacgacgtccagcagctgtgcgacctcatcaacagctacaagcctgacctcgttatgaacattgccctgccgtatcaggatctaactatcatggacgcctgccttgcctgcggcgtcaactacatggacaccgccaactacgaacccgaaaacaccgacgaccccacctggcgtgccatctacgagaagcgctgcaaggaggaaggcttttccgcctacttcgattacagctggcagtgggcctacaagaaaaagtttgaggatgccggcctgactgcgctgctgggctgtggctttgacccgggtgtgacgcaggcctactgcgcctacgccgccaaacatgagttcgactctattgacacgatcgacattctcgactgcaacggcggtgaccacggctacgcctttgccaccaactttaaccccgaaatcaacctgcgcgaagtctccgctcccggcagctacatggagaacggcaagtgggtcgagattccgcccatgagcatcaagcgggaatacaacttcgatcaggtcggccagaaggatatgtacctgctgcatcacgaggaaatcgagtccttgggcaaaaacctgcccgatgtcaagcgcatccgcttctttatgactttcggccagagctaccttgaccatatgcgttgtctggaggatgtgggcatgctttccaccacaccgatcaactacaacggtcaggagatcgtgcccatccagttcttgaaagctctgctgcctgaccccgccagcctcggcccccgcaccaagggcaagacgaacatcggctgcatcttcaccggcaaaaaggacggcaaggacaagacttactacatttataatgtatgcgaccatcaggaatgctaccgcgaggtcggcagtcaggccatcagctacaccacgggtgtgcccgccatgtgcggcgcgctgatgatgctgaccggcgagtggacgaagcccggtgtctacacggtcgaggaatttaaccctgatccgttcctcaatgcactggacaagtacggcctgccccgcagtgagaaccataacccggttctggtggactgatggtacagcgcgatgcacggccgccgtttgcggccatcggcggcgcggtgtcgccggaatttgccgccctgcccacgccttgctacctgctggatgaagccgccctgacccgtaacgcggaaattctgggcaatctttcccgacgcactgggtgcagggtgctgctggcgcaaaaagcgttcagcaactacgatttatacccgctgctggcgccgcacttggcgggcaccgaagccagcggcctgtttgaagcgcggctgggcgcggaggaaatgcccagcaaagaagttcatgtcttctgcgcggcctaccgctcggacgaaatggaagaactgctgcaatatgccgaccatatcgtcttcaactctccggcacagctggtaaagttcggccccgcggccaaagcagcggggaagagcgtgggcctgcgtatcaacccggagtgctcgacgcaggacggccacgcgatttatgacccctgcgcccccggcagtcgcttgggcacaacccgcgcgcagtgggatgccgccgtggcggctgacccggcactgcccgcgctgttggacggcctgcatttccacaccctgtgtgagcaggacgccgacgcgttggccgtaacgctggacgcagtggccgataaatttagcgacctgctgtccaaaatgcagtggctgaatttcggcggcgggcaccacatcacccgccccggctacaacatgaccacgctggagcgctgcatccgccgcgcccatcaggactggggcgtgacggtctatctggaacccggcgaggcctgcgccctgaacgcggggtatctcctaacccgcgtactggatgtagtgcaaaacggcgatgccacaattgcgattctggataccagcgccgcctgccatatgccggatgtcattgagatgccctaccgcccgccgctgctgggcgcgggcgaacccggtgaaaaagcctgcactgtacgccttgcaggcccgacctgccttgcgggggacatcatcggcgattacagctttgacgccgtgcccgccgtgggagatttgctggtttttggcgatatggcgatttataccacctgcaaaaacaataccttcaacggtatgccactgcccgccatctacgcccgcaggcctgacggtacaacacgggaaatcacaacctttgggtacagcaatttcaaacatcgggttggaaaatgattggtccacttcctatggcagttctgcgtaggcgctcatgttgcggatacgaaagagttgggagattacgttcgacttgaacccgaaacttcttacgcatccggaacaggtcaaggttctccgctttgccttgaaacctcatcttgaatttttgaaaacgctggacgaagttcttgcaaaatccagcggcgaatcctctaaaacggcataacgacaggcacttgtaagccatcaacgagcccccagccgcaagtgcagggcggaaagcatccgcgcccttgcgcctgataaaaattggaactttgattttctcgcccggctttgccacggtgggacgatcaaaggagcgtgcgtttgaacaaaaagaaaaagtccacaaacacttccccctaccccgatgaagtcattgaccgtctggcacgggcattctacccggcgatcctcgcctgctggaacagcgaggaaggtcaacggaagtttgccgcgtggcaggcggagcagactcatcatatcccaagcaaagaaaaacagggcgttcccgacggggaacgccctgttgtacatatcgctatcgtatgtggatttttcagcgtgcgtccgggtgggcgcaccctgtttttgttttgtcctcaatcttctaacccttgacctcctgccacgtttcgcagatattcttccggctcgccgttcaagatcagttcggcatgcatgacagtataaaatctttgatgtcaatattgttggatttgctgttgccgacataagattatctctatgcagacaatatttcatgatataatagtaggtttggatatagttgattatagtttggaagtcgataaaagtggggtggaaaatgtgtgaaaaacaacatgcaatcgagtactgtgaagctgaacaaaaaaggcaaaacaaacgataatgtgttgatttgcttgcaaatctgcaacggatagcgtagttacttataggtattcggtcggaaaacgacgacaggggtgcatagaccagcgataagccgtaaattttgtcagttctacctaactccacccaaaaaagaaaaagactgttgttggttggcttaacagtgataagaaagtaatttaaacttgactgttagctgacggattcaggtgctaaaaaggacacctattcttttgaatagatgtccttttttgttgtgccgcggggctgtttttgaattgggtcagatggcccagcactggctttcgatctgcagatccaccatgtgggtgtactggccgttccgggcatagccctgcccctgatatttctcccgcacacagacaagtccaacgaaaatatagggattcttttccttgtccatgctgcaccctcaaattccttgtccgcatccggcaaaattttgtgcccggcgtttcggattgctcgatagccctcgatattggcaccgatcagccgatgcaggtaagcattgtcctttttcagcttttcaggtttccatcggtcttgtagcaggcaaacactgccggaagcacaaacgaggcatggcacaaaagataatcctcctgccaaactgacaaaaattacgcaagaaaaatgaaatttgtttacaatttgcccatgaagctgtgcggcacgtaggcggtaagaaactttccgtaaggattcgccaagaaatatttgcatttttgcggcaggtttgctatactatattagtcacataaatgtggcatatgagcgatcgcagctcagttggatagagcgtccggctccgacaactgcgacagggcgggttttaggcttgcttttgttcgatacagcgcgatttacgctcgcaaaaacgcggtggtcaacggtagtcagaccacgaattgaccactattgaaaattgactactttacaagattgaaatacgtcagaacgacgtttttcatacataagcgatcgtagctcagctggatagagcgttcggctccgacccggaaggccagaggttcgaatcctcccggtcgcaccagaaaacctcattgcaatgtgttttttgcaatgaggttttttgtttttgttagtgtttgattttcagaataattttagcagcatatcatct

SEQ ID NO: 7808 - DNA, 53423 bp, Unknown
  gut microbiota DNA sequence
gttggtcaagcggttaagacagcggcctctcacgccgttaacgtgggttcgattcccgcacgggtcacttgctgaaagcaccaaaatctgacgattattcgtttggttttggtgcttttctatttgtctgcattgcgcataccacacttttaccaaactcgcgtaattctgtcgagagagaagctccaattgaaaaaagaaatctccccctgcccggatgatgggcaaggggagattgtgcgttatgggattgtatggagtaggagaaagtcacgcaccagacgcatttgccgccgtacttaatccaacaactgacacccatttgggcgcgagaaagattcataaggatttcactataaatacaatatcattattgaaagtgtaagacttgcttatttcgacaaaattcgttacaataaaataaactgttttgtggatcagaggtgacattttgaaaaaggcaggtaagaaaaatgcctatattccgcgggtgctgatgatggtgctgaccactgttttaatcggcgtgatcgtggcgatcatgcaggtggtggggcagatccagggcacggcgcgggtggtcaactatgcgggcctggttcgcggcgagacacagcgcatcatcaagctggaaaacgccagcctgccgcaggacggcatgatcgatgatgtgacctcgtttatcgcaggtctgcgctttggcagtaaggagctgcagttggtgcggctgaacgacgttaacttccaaaacaaaatggccgagctttccgatgagtttgaaacgctgaaaaaggagatccagctcgtgcgcacggtcggctgctaccaaaccgatattatccagcagagtgaggacttctttgccatctgcgatgaggcaaccggcctggcggcggcctactcccagcgccgtgccacaattttgagttacctagaaaatgtagccgcagcggacattgttgccctggtggcgctgattgccctggagcttttccacgcgctgcagtttgcagcccagaaccgtgtgctgcaaaccaaggtttacaaagatgaagctaccggcctgcccaacaaaaacaaatgtgaggaactgctgaaccggaaggaatcgatcccagcagaggagcaggtcgccgtttgcgtgtttgacctaaataacctgcgcactatcaacaatacaatgggccacgaaaagggtgacgagtatatccgcaattttgcccaggaattgcgcaccgctgcgcctgaggaccagtttgtgggccgcgatggcggcgatgaattcctgatgattctgcgcgggatggaccatgccgccgtgcgccattgcctgcagcaaattcgtcagcatattctggactactcagcccaccaccccgaaatgccgatgagctacgcggtcggctacggtctttccaccgacctggaaggacccaccatgcgggaactgttccgtgaggccgacaaaaacatgtacatcgacaaaaaccgcgccaagatggaggaggccgatgtacagcaccgcaccaatctggccatgctcaactttgttaaaaagcagggctaccatttctcgtcgtgcatgtactgcgacgcccagcaggaccgctaccgtaccctgcgcgccggggctgagacttttctggcggcggatggaaactacaccggcgctgccgagcagatcgcctggcagctgtgcgaggcaggccagcggcatgccctgcgcgacgcgctgcagctggccaacttgcagcaggtgttaaaaccggacgcgccgctggtactggagttccagcgcaaagacgaagataccatccaccgcggccgtctgaccgcgctgtatggcgatgcggtcgacggcaagctgcatcactttgtcttgggcgtagaatatttccgtgacagcgacgaaaaaatcgtcaacgagcgcaaacccttgacccaatactacgagcaggtcaagcaatccatcctggaaagcggcgactacgtggacgccttgatgcagatggccgaggccgtctacaccgtggacctgacccatgacagcgtggagaacatcttctgccgtgagggcgcgcgggagcgcatcaacgccaaggtggaggtgccatgctcctacgacgaatactgccgcatccgcagcgatctggtcagcccggacacacgggaaaacttccgcattatggactcctcagccaagatgctggaacgctaccgcaacggcgaacggcaggtgaccgtcgaataccaggagactaccgctgacggcgggcatatttggctgcagaaaacgatgctgatgtccgaggacaccgtctacgaccgccaactgggccacgaacggacgatcctctacggcatcacactgctgaaagacacatcggccttccacgaaaaagatgagcaggagaaccgccgcctggaggccgcctatcaggcggctgacttcgagagcaaggccaagaccgaattcctgaaccgcatgagccatgatgtgcgcacgcccatcaacggcattatgggcatgctggacatcatccgcagccaccgggacgatgaagcccgtgtggacgattgcctgcaaaaaatccagctttccgccagccacttacaagcgctggtcaacgacgtgctggacatgagcaagctgaaatccaaggagactacgctggaaaaggtgccctttgagctgaccgcgctgctgaaagaagctgcggaccttgtggacgcccagctgatcgagaccggcatcacccacacccgccataaaccggagtgcagtcacacccatctgatcggatgccccgtgcagctgcggcagatcatggtgaacctgctcagcaatgccatcaagtacaaccgccccaacggccgcatagacacctataccaaagaactttcctatgagaacggcaccgtctggtacgagtttaccatctccgataccggcgtgggcatgagcgaggcgtttgtaaagaacgaattgttccgcccctttacgcaagaaaaatccgatgcccgcacccagtacaagggcaccggcctgggaatgtctatcgtcaaggagctgctgaacaaactggacggttccatccaggtaagcagcaccctggggcagggcacgacctttgcgttccgcctgccctttgcggtggacacacaggatgaagaaacgcaggcgcttatcagcacggacaaatcctgcaagctggccggtgtgcaggtgcttctggtcgaggacaatgagatcaatatggagatcgctgaattttatctgaccgagcgcggtgcggccgtggccaaggcatggaacggccgggaagctgtagaaaaagtcaaagccgaaccccggcgctttgacgttgtgctgatggatgtgatgatgccggtgctggacggcctggcagctacgcgggagattcgcgccctgccgtacccggcagctggggtgcccatcctggccatgacggcccaggataccagggagtctgcgcaggagtgcaaagacgctggtatgaacgactacctggccaagcccgtgggcccggaccgcatggcggagaagatattgcactggacccgtcagcaggcggaaacttccagcccggcacaacctgccgctacttgacaaaaatgcgtggttatgttacactaaccatgcttcacagctaaccagattccctacaccttgcgtgcggggaatttttatgcgccaagggttagctaatactaactttttatagagagggtacttatgcaatccaacaacaaacttaccatcccggatctgatctccatcggcgtgtttacggctatctactttgtgctggtcaccatcgccacctttgccagcgcgttgctgctgcctggtgtgtccaacatctttttgcctgccatcgcagcgctgatctctggcagcgtctacatgctgctggcggccaaactgcaaaagttcggcggcatcaccatcatgggtctggtcatggggctgtttttcttcgtatccggccactttgtgttgtcctttgctgccaacatcctgttcggcgtcctggccgattgggtggcctcgctgggcaagtattatgaccgcaagctgctgttcgttagttacatcctgttctcctacggccttaccggtcccattctgccgctgtggttcatgaaggatgcctacgtggtcgccctgcaggcccgcggcaaggacgccgcctatatcgacgccctgtttgcgcccatcaacacgggtactttcatcgtctgcctggtgtccattctggtgtgcgcggtcattggcgggctgtttggccaaaagatgatcaaaaaacacttcgccaaagcaggtatcgtctgatgcggttccgcatggacccgcgtgccaagctgtatttgctgctgctggcgaatctgatgctctttttccacgtcagcctggcggcggaggctatcatggcggtgctgtttctgctgttgtttttcctctccgggcgctgtgcggccgggctgcggctgacagccatctacggtgtgctgctggcgctggacctatgggccgtgccccgggccgagagcagcccgtttctcaatgtggtggccctcttctcgataggcatccgcatgatgctgccctgcatcatcaccggtgcgtatgcgttttccactaccacggcgggggaactggtctgtgcgctgcgcagcatgcacgtgccggaaagcgtcatcatcccctgcgcggtggtcatccgctttttccccacggtgggcgaggactaccgccagatccgcgcggccatggcgctgcgcggcatcgctgagggcaaagcggcgctgctgctccacccggcgcagtcgctggagtacatcctgatgccgctgctgatgaacggtaacaacgtggcgcaggacctctcggttgcggcgctgacgaagggaatcggcctgccggggcggcacaccagcatgatcgaactgtgccccaaggcggcggacattctctactcgctgctctgcacgctgccgatgctgctcttctggggaggtgtgctgtgatgacagaaaataataccaacgccccgctgattgagaccagtgccgtcggctttacctaccagggaagcgagaccccagctctgcaggacgtgaccctgtccatcggggcaggggagtgcgtgctgctgtgcggcaaaagcggctgcggaaaaaccaccttcacccgtctgctcaatggcttggctccagcgtttttccccggccggatgctgggcagctgccgcgtaggcgacctgctggcaggcaccgccgccatcgaggaatacgtgccgctggtgggcagcgtgttccaaaaccccaagacccaatattttaatgtggacaccaccgccgagctggccttcccctgcgagaatgtggggatgccctcggccgagatccacagccgcgtgcaggattgtgcccggcggttcggcctgactgggctgatggaccgcagtatcttctgcctgtctggcggcgagaagcagcgcatcgcctttgccgccgccagcatgctgggtccgcgcctgttggtgctggacgaacccaccagcaacctggacgccggagccatcgtacagctgcacgatatgatcgccgcaatgaaagaggcgggcgtcaccatcgtactggcagagcaccgcctggcctggatcaccgacctggcggaccgctatttcttctttgaagagggccgcttggctgcccagtggacggctgctgcgtttgccgccctcacggcgaaggcccttaccgcctgcggtctgcgtgcccgggaactggcaacctgccgcgcccgcttgagggaaaagtcggcggcctccaatgggccggccccggcgcaggcggccattcaaagcaaagggttgaccttgggctacagcaagcgcagccccatctgtacactgcctgacttctcgctggcctatggtgagatcgtgggcctgatgggccacaacggcattggcaaaagtacgctggcacgcaccctttgcgggctgctcaaacctctgggcgggcagatcctctgggacggcgcaccggccaagccccgcagctgcacccgccgcagctttttggttatgcaggatgtcaactatcagctgttcagcgacagcgtgcgggaggaagtgctgctgggcgctgcccaaccggaacgctgtgacgagatattggccgccctgggcctgaccacgctggccgaccgccaccccatgagcctgagcggcgggcagaagcagcgcgttgtggtggccgcggccatgctctccggcaaggatctgatcgtgctggacgagcccaccagcggcctggactatgcccacatgcagcaggtcggccagctgttgcagcagttaaaacaggcaggcaaaatcgtgctggtcatcacccacgatgaagaactggccgccgattggtgcgaccgcgtgatccagtggaacgacaaggaggaaagaggacgatgaactaccaacaaaaagattggctgggcagctggcagaattttgagagctatctggtcagcaccgcccccgccatgcaggcatgttggacgcaggccgaagaagccgccaaagccctgccgatgtttcaggcgggcgtaaaaacgttctggcagcgggcgtgcggcacggcactggcaggccccgtactgggtggctggcagatcgaagcggccaacgcccaggacctgcgcatcacttggctggatgctgccggtcagccgctggacagcgccgtttaccactttaccggcgcgctggaaaaagggctggagggaaaagtctgtgccaagtttgagaccgccggtgccctgcagcacccgcagttccgctgcctgctggccatgccgccgatgccggagcgcaccgcccgtgcccatggcggcttgctgagccacctgcatttccagtatgcagccggctggaccacccttgttggtacagacggcaagctcagccatcccatgtggtaccccaccatgtgcgatggtgcaggcaccctgctggagcagtgcaacattgtgcgagccatgcaccatttgacctgctggaccgagctgcctgtgtgaatcctgtcgaatcgctgaaaagtcccccttcttttttggcgtaaaagtcaattgtatgtgccgcagtcctgtgctatcatacaattacgaatggtttgtttaattgcaaccaagtgcaggaggagtcaatatgaaaaccaaacaggaactggccggtatctacgtagccagcattactgcgtatgaccaggcgggcaatgtggacgctgccgcgctgcaaaaactgatgcagcgcaacatcaacgagggcgctgcaggcttctttgtgggcggcagcagcggcgagtgctttatgctgaccgaagccgagcgcgtgcaggtgtttgaagctgccgcagcctacgccggtaaaactaatctgatcgcccacgtgggtgccatcggcaccgccgaggccgtccgctacgccaaggccgctatgggcatgggctacgatgtggttgccgccaccgccccgttctactatggcttctctcccaaagaggtctgccgctactactacgacattgctgaagcttccggaagcccggtgctgatctacaacttccccggcaatacccaccgcgaatttgacgttgccaacccggattacatccagctgttcaagagcggtgctatcctgggcgtcaagcagaccaactacaacctgttccagatggagcgcatcctcaacctgaacccagacctcatcgcctttgacggttacgatgaaacgatggttgctggccaggccctgggcagcagcggttccatcggcagcaccttcaacatgatgctgccccactacaagaagatcttcgacctgttcgacgcaggcaaacgggaggaagccctcgccctgcagcacaaagccaacaactgcatggaggctatgtgccgtgtgggcctgatccccgccatcaagtacgagctggcccgtcagggttaccccgtcggcgaggcccgccgtcccttcagccccctgaccgatgagcagaaagcttatgtggacggcgtgctggatgaatacctcgttaaataactccaatacacaataaaaaatccgctgagcgttgcagcccagtggatttttgtatattacaggaaattacagcttgcgcaccttaaagcggatgcgcacgtagtctacgtaccacacgccgtcgtgcagcagcacggggcgcagatcctctacggtctcgtcgatgatctgtgccgccaacgcgggatcgaccccggaaaagggagccgtatcaaacatacggatccaatcggccagtccgtccgggccgttttgcttggtggggcggtcaaacagcgtggcaaactccacacggaaaccggccttctccagcagcggcgcgtactcgcctacggtagggaagtagaaggtgcggagataatgcagcccatgggcggcaaaccgcttttccagtgcagcatgcaccgtctcggcgcagcccttgccgccaaactcgcagaccagcaggccgccagatttgatctggctggcaatgtggtccagcatggcctgctgcttgtcggcatcgatccagtgcagcacggcattggaaaacaccgcgtccaccggctcgtccagcgtaaagtccaacgcgttgccgggcaggaacttcaggtccgggtgaccctcgcgagctagctccagcatctctgccgaggcatccacgccggttacatcatagccgcgggcagccagctgctctgtcagcgcaccgttgccgcagcccaggtctatcacgcgggacccgggggcagcatccagcagatccatcacggcttcgccgtactgcggcacgaacgaaaaatcttttttgtacttttcagcatcccagaaaatgttcatggggcaaatccgcacctttctgtaagcattattccggcaaagcctcgggggctgcgtccgtatcaacagcctccggcaggcggggcgtgcggccggttttttccatcatttcctcatataggccgctggcggcttcgggcgagtagccgtacaccaaaaaagcgtccattacgtagggggagtagggaatacctgtcagggtcttggcaaaggacatagccgcgatctcgcccagcaccgacacgccggaacggttatgcagcggcttgggtgcccacagctcgatcttgtaggtgcgggtccagatctccttcttatacttctcctccacaaagtggaaaagctcatgccccagcagcagcttggcaatatccagctggccggtcagcgcatgggagacacccggctcgcttaacaaagcgcggcctttgcggacgccgtccatatagatgtggatgttgttcggctcacggaactccgcgaataggacacgctccgcattctgcggcatatcaggataatccacattcaagcccagctgcttggccagcttttcagggtcacgcataccaaattgcgcggccagcttctcggcatactcgtgcccgcaggcaatggcctgacgggtaaggtcaaggcgctgttcatcattgaacttaccattcagcggctcgcgagagaaagcgtatttggcccactcgtcctcggggatgcggcagagatcttctacgatcatgcctaccgggcgtaccgtgtaatggggcatctcgccataacgggtgcgctgcttgccaaacaggccgtcggcaatgggtttgagtaattcctgaaaccgttcctttgtcatgttcgttcactttccaaaaacggctccgcagagcgcggagccgtcttttgtgttatttgggttgaatcagcggacgtcgttcacggaagcaacaacgatgatgtcctcatcgggctcacgatccatgatgtccagatccatcagcagcatgacctgatccaggtcaacagcagagtagtcgcagacacgggggccaacgcagacgaagtagtcgggacgcaggaccgtatcagtcttgaacacggccatatccttccacagctcttcgaccttctccttgtactcgccagccttgaccttagcggcaatgccgtcagagcactgaaccttgatgaagcccttcttatcgacgatgcggatgggatgacgatcgcccatgtcgccggtgtagacgtagaacttatcggtcttctcagccagatggatgttggagaccttggcaccaaagtcttccttagccagctgctcagcctcagcctcgtcgcactccttcagcaggtcagtggtcttgacctcggtagaaccggtggcgatagcggtgaccttaccggtctggctgtcgatctcgatatgaacttcaacagtgtcgggagaagcaccggaaccgatggcggcgtcggtagcttccttcttcagctccttgatgtcttcctgggtcgggttcgggataacacgttcgacaacgtcacgaaccatggacagggcaacaccgatggaggagatgacctcggcgttctcggggatggagtactgcaggcccatcttcttggcgcagtaggggaccagagaggcagcaccgccgccgcagccaaccagcttcatggcgtcatggtccagctgatacttgtcagccagggcgttgatgcaggcgttgaccttctcgaagtccttgtccaggatctgggtagccagttcctcaacggtgatgcccagcttgtcagcaacgggctgcatgcacttgcgggcagcgctggcgttgccgtgtgcgaagtacttctcgtcgatcaggcccagcacgttggcagcgtcggtgttggtgaagcagatacgcttgccgcttgccagtttgacggcaacgtagtcagaggggtcacccggtttcgggctcagcatctcgatggtcagcgggccggcgtcgatctcctcctcaggagtgaagcaggcgtactcgcagccagcgatgtgggcggaacgggggccgacgtcctcaacgccatggtcgttgatacggaccatggaaccaccggcgcagcccaggatgcggacatccagagagttgatgtaggtatcgtggccgccgatctgggcgtagtcaacgccgggacggccgttcttgataacaccgatgttggtggtggtgccgccgacctcaaagtagatggcgttggaagcacgcagatacatcagggagcccatgacggaagcagcagggccggacagagcagtcaggatgggacgcttacgcatctcgctgatctccataacgccgccgtcgccgcgcatgatcatcaggggaacggtaacgccagcgttgcggacagagctctcggtggcgtttgcggtagccatcatcttgggcagaatggaagcgttgatggcggcagtgcgggtacggcgggtcaggccgtacagcttggtgatgtcagaagccatggaaaccggcaggccctgggcctcggccaggtcatggatcttgacctcttcgtccatgttgtcaacgccgaaagccatggaggcaacgataacctggctgccttcaccgcacagctctttgatggcggcattgatcttctcgtcggtcatttccttcttcttcaggaacctgttatgcacggggatcttacggccgactttctcgtccaggacgatgtccttcagattcagctggcgctttgccaggaagccttccaggccgccgcctgcaacaccgatgacaccgacagaagcaacgtcgccctcgatgaaggcgttggttgcctgggtggtggagtgcgcaacgaagacgacgtcctcaggggcaatgtcgttctcggccatgcagtttttgaaggactgcacaacgccggcggcaacgccgtccttgtcgtcgtgggtggtcttaacttcgttcttgccaatgatctcatgggtcaggttgtccatggcgacacacttggtgtaagtaccgccgacgtcaatgcccatgcgaacagcgcgatgttctgccattcagttttcctcctaaatgtttctcagtagggtaggggagtgtttcttctccttaaaaagtaaggtgccgccgccttcgaggcggcggcaccctaatttacggtttaacttacaggttcaaagtggatcagacaaaccactcggcgcccagaccgctcatggtgacgaaggtcaggacatacagcaggatgccgccgatgtaagtcatggggatggagagcttcaggtaatccttagactcaaccttggtgtaggcaaggccccaagcaacccaggactgggtgatgcaggaaccgatgttgacggtgatggtggggattgcgaagacgcaatacaggaacgggacgctgaaggaagcgacaccgcgcagaacgcccagagtagcagcaccgcagccaaccagggtcataggaccacggaagaggcccagagccagcaggacggcgaacaggatgcagacgaccagctcgctcttcggcatgacggggcccagaacggccttgaagaacggggaagcgtaagaagcaacactgttgaacatgggcagggtcagcaggaagccaaccaggggagcggtatcaacaacgccgtcatagtacagcttgttgaccagctggcagttctccttgaaggaacccttcatcttgccgcagaggaacagagcagcaaaaccagcgatgacgaaaccgccgataacggagaagtcgagccagatcttcagcacaacgggaacgatgggcaggatcaaggtatacagaggagcatccttctgctcggaagcgccacgggtctgagcggcccaagcatggctggtcttgctcttcttcaggaagaagccggccaggatggtggtgacgacaacagagatgaccagagcggcatagccccacttgccagcgtaccagcccagggtgaagtcgggcatctcatcgacgtcgatgaagaaagcacgatactgagcgaagttgacggggttcagatagataccagcggcaacagactccatgaagctgaacatggcgattgccttgggaacacccagggacatcatgatgggcaggacgataacgccgatggcgataacggggccggcaccggtcatggcggtgaagatgatagcggtaacgatgttcagcagggcgatggtgaccatgggcttatcgccgcccagctcaacagtcttacggatcagggtggaagcaatgccggtctccatcaggacgcggccgaaccaagcgccccagcagacattgaccagcgtggtgccccagccttcgggggcggactggtagatcttgttcaggatggcaatggccttaacaggctcgccattcgaatagaaagcagtggtggacaggaactcgggagatgcaaaagcagcgcccaggaaggacagagcagtccacagaatagtaatgataaggaagccgatcatcaggttgtggcccttaatgcagtaaaaagccaggccgaagaacgtgaggagcagcaaaataccgactacgaactccaaggtaaatacccctttctttaattacaatgattctctcctggctgcttggcgcagccatttgccgggaatatgctttcctcctttcatacagtataaattagtaccttattcatattaccaaagcggatacggaccgttttggcatttaaggcatccttccaaacggtagggaagccttaaggcaaattaaaagttgagatcctcagatttctcgttctcgtagaagtactgcgggtataaccgccgcaggtggtctgcgtcacgggtgatgaatcccagatgctggtggcacattacggcaatggcctcggcatcacgcctgcgtaagcagtccagcatcatgcggtgctcagtcaaagtgttctcccaactggcaacggcaaccatgtgtaccttgtaactgtaggtcatgatctgcagctgacgaatgcgcatcatgtcgcagttgatgatggagatactgtcccacgcgtgttcccgcccgcagtattcataaaacaggtggtgcatgcgagtgtcttcatccagcagatcggaggaggcctggtcgtcgtaataccggcgctgcttgcgcaggctttcttccagagtctcaaactgttccggggtgatgccggtgctgcaaagctggcgcaggacactttcttccagcaccgtccgcagaaagacagcatggtgcaggcggttgatcgagatccggctgacctgggtgccgcgctggggaaaaacctctacgcagccttcctcagccaggcgggcaatcgcctcgcgcacggtagcgcggctggtacccatctgggatgccaaggcgttttcactcaggaactctccgggcaggagggtgaagtcaatgatgcggtgccgaagctggctgtaagcatcatcaggccctgtgatcgctggtggtgtagtaagctgtggcatgtactgtacctcgcttccctgggtgaacattgctgcatactagatgtagtggaactgaccggggaaaccgcggccggtcgctgtgcatacaagcaactgcacaccagtaccatcgggtctgacaataaaatagcacgctttcttgggatttgcaagccttttttgacactttttctttttttttgcgagaaagtttgaatgtttcgtcaaaatgaacaacaagttttcaacaattttggcatacaagtcagtcttgcaatttgtcgagtgttgcgttatactataggtgaacctggggacagcgcacgaaaattgctctgcccacaccagcggtacactacaatactgataccacaggatatggatgcgctgattatttaccccactaagccggaaaggagctgataaatatgcagacggatgtacgcagtgtacgtgcccccgaagaatccgcccgtgcgtttgtttatcgcgtcctttctacttatataaaggagatgttcctgcatcccggcgagaaactggctgagaccgatgtagccgctgagctgcaggtcagccgcacgccggtgcatgatactttctcccgcttagagcgcgagaagatgctgcgcccggtgccccgcggggccgtggtgccgccgctgaacaccgacatgatccgccagacggtgtggatgcaccgcacggtcagccaggcggttttgggcgaattgtacaatcaccgcccgactacgctggagccgctggagcattgtgtggcggccgagctggaagccttgcagggcggcgccatcatcaaaatggcacgcctgcatctggagttccaccgcaccttgtactctatggcagggcgtgagcctgtcatggatgtactggagcgcaacagcggcgatttgtaccggctgctccgcatgatggaaagcgccgacctctggcgctatgtggccgagcagcactccaccgtcgtgcagggcctggccatgcgtgactacgagatggctgcccacgcgctggaagctgagtttgaccttgtgaagccgcttttggaagaatgccgctaccagcggccttacttctttgaatgatttcatttgaaccattccgggacagccctgcgggcgctgcctggcagacagaccccggtgggaaatatattatatattactataaagtaaacggattcggaaggagcaactacctatgaaaatcgcagttcttggttccggcgccatgggcgggctgtacagctcgtacctgagccgccacaacgaagtgaccgtgatcgatgtaaacgccgcactggtggaaaaggtgaacgccgagggcctggaagttcaggaaccggacggcacctccaacgtcttccatccccacgcggttctttctaccgagggcatggagcctgttgacctgatcatcgtcttcgtcaaggccatgttcagcgaaggcgccctgaacaacaacaagggcatcatcggacccgacacctacatcatgaccctgcagaacggcagcggccatgaggatctgctgggcaagttcgtcccgcaggatcatatcatcatcggtaccacccagcacaacgccagcgtagccggtttgggcgtcaccaagcacggcggcagcggcatgacccacatgggctgcgttgtcggcgaagctgcccgactgcagaagtttgctgataccttcactgagtgcggcctcgaggctgacgtttccgacggcgtccagaagatgatctggaacaagctgttcaccaacgtttccgccagtgccctgaccggtgccctgcaggtgcccctgggctacatctcttccaacgagcacgcctggaagctctgctgccagctgatccgcgaggctgtggatgctgccgcaggcctgggcatggactttgactatgacgaaaaggtcgccgaggtcaaggcagtctgcgataagtctcccaacggcctgaccagcatctacgctgacctgcgcgacggccgccgcagcgaggtcgataccatcagcggcagtgttgtccgcgccggcaagaagtctggcgttgctaccccgagtcatgagttcctggttgagctgatccacgccatggagggccgcctgaaggcctgatttggcacaaatcttttgtacttcggggcgtccggaacccggatacccttgaagataaatgcacatttttaaaggaggattttccctatgtctgaacagcctttgacttatgattgggttgctggcaaaccgaaagccgtccccgctgacaagctgcccccgaaagaatacatgaagggcaacctgcacatcgtcgacctgagcaagtgcgttgacccgtacaccgagagccgccgctgcaacctgtggcgcttcaacaccggtggtgacgtgcctgacttccacaccaacgtggacatcggcagccatctgggtacccactgcgagtgcccctaccatcacgactccaactggcccagcgttgctgagctgcccctggatcagttcatgggccgcggcatctactgcgtgctggatctgcccgaggatcatcagatcaccgctgctgacctggaagccgctatcggcgaccgcgtccagcccggcgataccgtcatcctggatagcccccacaagattcctcccttcaccagcctgaccggcggccccactgaccaccgtctgcaggtcggcgctgagatggctcagtggctggctgaccgcaaggtccagtgcgttggtttcggtgatggcgttgccatcgagggcgacgtccgcaacgttaagcccttccacgacatcctgatggctcagaactgcaccttcctggaagttctgtgcaacctggagctgctcaagaccgatactttcttcatcagctatgctccgatgaacatcatcggcctggactcctgcccgactcgcgtttacgcaatcgagggtctgcccggcttcacccgctaagttatagcaattcaaaggcttcccctctgcgggggaagcctttttctgaaaaaggagaagaaaaccatggaaggtccgatgaaaaatctgttcgacccggccggtaaggtagcactggtcactggcggcaccagcggcctgggccatgccattgccgaggcgtttttgcagaacggtgtggacgttgctgtctgcagccggcaccccgaaagtgcccccgaactggccgagttggccgccgccgaaggccgccgctacctgcccgtctactgcgacatcaccaaagaggaagatgtcgagaagatgggcgacatcatcgaaaaagagctgggccccgtcacgatgctggtcaacagcgccggcatgaacatcctgaagcatgccgaggattacgacgccgagtccttcaataaggtcatgtcgctgaacgtcctgggcacccacaatgtcagtaaaatgtgcggcaagcgctggatgatccccgcccacaagggccgcattgtcaacctgtcctctgctaaggcgttcttgggtaccgaccgcgactacaccgcctactgcgccagtaagggtgccatcaacatgtacaccgcccagctggcctgtgagtgggccaagttcggcatctcggtcaacgccattgcgccgacctttgtcgttacccccatcaacgccgaccgcctgtccgaccccgtattctacaactcgctggtcaagcgcatcccttacggacgtctgggcaccggcaaagatatggccgctgcagtccttttcctctgcagcgagggctccgagtttatcactggtgttaccctcaaagtggatggcggcgtgacctctatgcagtaatttccgcataaggagagcaaaattatgatttctggcaatatccatgaaaaaagcaacctggccgtcctgcccgagccgctgcagcgcgctgtgcagttcctgaaggacaacgacctggctgcccatgaacccggcaagtttgagctggacggcgacaagatgatcctgcaggtcatcgaccagtccaccggcccccgcgagaacctgcgccccgaatgtcaccgcaagtatatcgacgtgcagttcctggccgccggcggccccgagcgcatcggctggtatcctgacctgggcgataacgaggtggacgagaacctgctggacaccccgcgggacatctgcttctacaagaataacccgaacgcccgcgaaggtgtcatcgagatgcagcccggcagctatgccatgttcttcccttgggatgtacacatcccggccatccaggtaggggagcctgccaagatccgcaaaatcgtcatcaaggtcgcactggacacctgcctgtgacctgaagaaaggaaccgctgtggaaatcgaaaaacatctggccgaactggcccaggctgacccccagacccgccgcaccgctttagaaaacgcgctgaccgctgagggtctgaccccggagatccaggaatgtgaagcggatgagcgccgcaaggccgcccgcaactatctgctgtatacggccgacaaggacgccaaaggaccgctgttctgcgcccattacgacgcacaccccggcagtaccggcgccaacgataacgctgccgccgtctgtatcctgatcgccctggccaaagagttacagcagcgcaagataccggccacgatcgcctttttcgatggcgaggaatccggccacagcggtgccaaattgtttgaggatggccgcaagcgtgaggtgagctgcgtggtcaacctggatatgtgcggttacggcgataccatcgctgtctacgcccgcggcagcgagaaccgcgccggtgcgcggaccttctgcgccaaggagcggctggacgcccaccacggcgaactggtcaagtatatgccggagggtgacaacgtttgtttcaccacccgccgccagccggtggtcagcattgccgttatgcccaggtgggacaccaagtacctgacggccatggccgcccagggcatgggcctgctgggccgcagtcccgagttcaagatgatgctgggggagatggaagtcgcctccaccatgcacggcggcttccgcgatgccatcaagtgggtccagcccgaggccatgcagatgctgtatgactacctgctggacgccatgaccaccccgcccccggccaaaaagctgttcggcattctctgaacaactttacccgcagttccgcacagcagcaggggggcagcctcctgacagcacagctgcctgttcagataaagaaagactgccgcacagctttggcaacaaagctgcgcggcagtttttgtgtttttgttatacacttacgctgtcgatggtaaaatagcccgggtagcgctcgatcttgtccatcaggttgcccctgaagctggtcagatgctcgctgatcttcacctcgggctgcacgttgtccggcaggcccatcagcagataatcgcaaaattcccggtgctggcgggtcacacggtcgtaatcgcaatcgccatccagcgcatcgagatagcgcagccggtcgtagtgggaaaccagcccgcggatagccagccaggtgtggctgcgcccgccgaagtagtacatcagacggtggaactcgtcatccagatggatgaactcatccacggcgtcgggcatgcggggccgcaggctttcctggcggcacatgcaatcccaaagttcctgcacctggctgcggccaatcttaccagccacatcctttaataatgcactttccagcagcagacgggtggagtagccctccttgaccagcgctgggtcgatgcggctgacctgggtgccccgctgggggaagatctcgatcagccaatcgttgtgcagtgtggtgatggcttcatgcaccggggtacggctcatctggaacagcttggcaatctcgatctcactcagcggttcgccgggctttaagcggaatgtcatgatattcatgcgcagcacgcggcaggcgtactcgcggttgctctctttggggcgtggctggggaaccagcagatccatcgcagaccctcctttgttggacacatacgatatatagtctttcaactaatatatcagttaaaaatccaacatgcaacccatttggcaaaactttgtgtaaaagcatgatttttacagaaaaaatctggtaaaatcaacagttgcaattcggtttaagctgtgttatgctgataatatcaacggataagctgatatatcagcgaacgtccggcgaagcaagaaaaaagcagacacaacaagaccaccgcgctgatcaaaaaggagagaatgaatatgagtattcgcgtaccttatgaaactgtcaaatctaccgttacgcaggcattcctgaatctgggcctgagccaggagaaggctgaaaagtgcgctgagatccacaccgagagcagtctggaaggcatcgagagccacggcctgaaccgtgtgccccgctttgccgagtatgtccagaagggctgggtcgacatcaatgctgagcccgagctggtcggtgcaaagggtgctgttgagaactatgacggccacctgggcattggcactctgaacgccaccttctgcatggatcgcgctgtggccctggccaaagagcacggcattggctgtgttgccctgaagaacaccacccactggatgcgcggcggttcttacgcctggcaggctgcccaggccggtttcatcggtatcagctggaccaacaccgagagctgcatgcccatgtggggctccaaagtccccggcgtcggcaacaacccgttctgcatcgccatcccgcgtaagagcggccccatcgtcctggatatggccatgagccagtacgcttacggcaagctgggcgtctatcgtctggccggcaagcagctgcctttccccggcggcttcgataaggacggcaacctgaccagcgatcccggtgccatcgaggcttccggccgcatcctgcccaccggttactggaagggctccggcatggccatcgccctggacctggctgccgctgctatggctaacggcaagaccggcgctgatctggaccgtgagggccagggcagctgcaccggctgctgccagatcttcatcgcctacgatccgtacctgttcggcgaggaagaggagatccaggccaagtttgatgaccgcgtagccgctgctgatgctaccaccccggagaaagagggcggccatgtcacctgcccgggcgagcgcaccgctgctacccgtgcccgcaacctggctgagggtgttgttgtggatgagcaggtctggcagcagtgcctggatctggctgccggcaagatggacaccaaggacatcgccagcacctgcatcctggacaacatgaaggaagacgagaagaagtaattcttcccgctgctgaaacacaagtccctaccttattataatagacgatatagaacttattactttagagcaagtaaaggagcgttcattatgtattttgcaccgatttctcaggctaccaagtacaactatctcgatgataaattccaggctgcttacaagtggctggccgagaccgacctggacaacacccccgctggcagctatcccatctacgagggcgtgaccgctaacgtgcaggagtacaccaccttccccgcaagcgaaggctccttcgagactcacgataagttcttcgacatccagtatgtcatctccggcaaagagcagttcggcgtctgcaagcgcgagggcttggtcctgaaagaggatcaccccgagaacgacctgaagttctacgaggagcccgctatgagcggcaccgtcctgctgctgcccggcgatatgatcgtcgttgcccccgaggatgctcacaagccccgctgcgcagctggcgagccggagttcgtccgtaaggtcgttgttaaggtcaaggtctgatcttagttttgtatcatttgtatctatcgcttttgtaacaggaattattgaaaggtcgttatttcatcatgaaagtaatcaagttggctgagccttggaaaatctcttgcgttgacattgaaaagcccgtgccgaaacccggcgaggctttgatcaaggtggtcgccgccggcatctgcggcagtgacatcggtgctttccgcggcaccaatggtctggtttcttatccccgcgtcatcggccacgagctggctggcattgtggaatccatcccggagaacaacaagaacggcatcaaagtcggcgaccgtgttgtagtggacccgtacctgtactgcggccactgctatccctgccgcatcggccgtaccaactgctgcaccgacctgaaggttctgggtgtgcatgtagacggcggcatggctgagtactactgccaccccgctgatatgctcatcaagatccccgagggcatgagctgggagcaggccgctatggccgaacccctgaccatcagcctgcacggcatccatcgcggcggcctgcaggccggcgagtactgcgccatcatcggtgcaggccccatcggcctggttgccggtatggttgcccaggcttacggtgcccacgccatcctgctcgacctcgtgcaggagcgcctggacttcgccaagagccttggcatcgagtatgtcatcaactccggcaaggaagatcccgttgagcgcatcaaggaaatcaccggcggcgagatggcgcatcaggtcatggagtgctctggcgccaaccctgctatccgccagaccttcgacctggtctccaacgctggccgcatcaccctgaccggctggcccaagaaggaaaccagcctgcccaccgatgtcatcaccaagaaggaaatcgatatccgcggtgcccgcaccagtgctggcgaatttgaggaggctctggacctcatcaacagccgcaaggtcgatatgatgaagatcctgaccaagactgttaccatggacgaggctcccgataccatcgtggatatcgagaagaatcccggcaactacatgaaggtcgtcgtccgcgtcagcaatgacgactaagcattaaacaattccgtatctcaatatatctcccattaaggcagcccgcccggaagttctctcgcttccgggcaggctgctttttgtgctttatttatgtgcagtcaaataaaaaatccctgccgccaaaacggggcagggaagagaggcgcataaagctatttcaggttggggcggtcctggtcgccgtcagccttgaacagtacaaagttttccggcttgttggtaaagtagtaatactcggtgttttccagcagtggaggggtcagatagttggggatgacgctgccgtcgccctccagccgctcggtaaaaccggcggcctgccagacttcggcgggaataccggcattgtagcagtccatatattcgccgcctgcgcggtttagtatggcgtccagtgcaccacccaaacggggcagaacggcatcctcgccaatgaagtccaccagccgcaccaccggcacgcagccggtctcctcagcggttacggtgcgggtcaccacgtaggccagcagcttgccgtttccccgcgcggcccagacatcgtagtggaagtaaggataacggaaataccgccgccgcagataccaggtatccttcaccggcgtgtggggcgtggcaggcatccccagcgggatcaggtcggccgcgtcttctactttttccagccctaaatcgcgctggaccgggggcagtatgtaccgcagtggtttggccagctggtaatccttgcggcggcccagacggtaatagtggggcaggcgctcagccttccaccccaaaaactggtagaacgtgcaggtgttggggcggatgttgttgcaggccagcacgttggcatgcagcaggtcgggcagggcgttcatcagctccagccctacgccattgcggcctttgacggccacccacacgctgacccacacatcggggcggcgattggtgttggccaggatgtacccggcggcactgacgtacttgccgtcatcctcggccaccgcaaactgcgggataccgccgcggcccgcataatagtggtggtacagctccggccggttgatgagcggcagacgcatatcaaaattggcattgataaaatcgatgatcgcctgatcttcgcccagacgggccaggcggaatgttacctcagacaatggccgaacctcccgtcaccggcagcgttacgccggtaatgaagcctgcctcatccgagagcaggaacgccatagcgggcacaacgtcggccggggtggcgttgcggcccatggggttgtcctcggcagccgcctgcacaatcagatcgggggtgtctttcagaaaatgggtctccatcatgctgggggccacgcagttgaccgtgatgccgaacttggcgtactccacggccaggctcttcaccagcccgccgatggcgctcttggccatcacataagcggcagtgtttttgggcgggcagccgatggtgtagctggtctggatgaacagcacgcggccaaacttggcacgggccatggcaggcagcacggctttgcagatgcgcacggcactgtggacttcgatctccaaatccagatcaaaccggcgctggtcaaaagccttgaacttggtgttgactaccggcaaagcaggcaggtggataaagtgggtcggggccggggcgtccgctgccagcacctccacaaaagcgtccaccttggcgcggtcggaaagatctacgtcgtaggtgcgcagctggccgggatacctgcggcacaactcggccattttggccaggtcgccgcagccctgggccagaaccagcgtgtcggccggggcattgtgcagcagccgctcgatcagcgtgcggcccacatcgctggtggcgccggtgatcaggtaagtatatgccatgggaaaaacctcccttacaaatcgttaaagttacttggcaagcccggccttgatgatgccgcgggtgacccgcttgccgtcctgattggtgatgacagccttgatctcagcctcgctgccgatctcgctcacgcgctccacggtgcccttgacggtcagcgtatcgccgatgaagatgggcttggcaaacttgcactcgaccccatgcagcaggcagtgctcaccgggcaggtaaacgcccgccagggtggagaaaaagctggcccccagcatgccgtacaccacccggccgggaaagccgcggtccttggcataatcggcatcgatgtggatgggggagacatcgccggtaatggctttgaactggtccatcatttcggcggtgacggtgacggtgaattcctcactcaaaccgggcaccatctcggcaagggtatagtgattcatacatcctcctcgtgagctgtgaagctgcgaaaaaaaggcggcaccggccgcctaaaatattttttgaggtgtgcacctgcttgtaggggcgggcattgctcacccgtgggctgcaaaacaggatgtgaattacaccatccgtgcaaccagatccagcagatcaccgacgtccttcaacccgcgcacgtcagagagcttgaacttgatgttgaacttcttctcgatagcggtcagcaggttgatctgctccaggctgtcccaatcctcgatgtcatcggcgcaggtggcgcgggtgatctccagggtgtcatcatcaaaattatcgcggaaaatatcctgcacagcggccaaaatttcctgttcagtcataatagggtactcctttattttacctttaatatggtagttacctataatataccataaaacaccccgccgtgcaaggcaatttcgcgctttacaggccgtaatcttccagccgtttctgcagttcgcgctcgtcggtaatgggcacgccctgctgcaaagccaaagcgtcgccttcgggcaaaaggcgggtgtaaatttcatcgtaccgggccagcgggccgctgccgtcgatggtatacagcgccggatggccgccgttgtcttttaacagatactgcggctcggcccgctgctggccccggataaaccaccagatgcccgccgcaatgcaaagcactgccagcgcccccagcagcgaaaggtacaaatatttcgctgatttttgtgcatttcccatagtttcacgctcctttcccactagtatggacgcagtatcgccacaaaatcaaaaagttgtgaattttgtctgcgggggtatactttttctgtctgtttgtgctataatctatcctatagcattatgcgattctgtgtgacggcttttgctgtacgctttgctttattctgtgattaaggaggcggttcccatagaacccaaacagccgcgccacatttcaaccgatggcgtaaaatctaccgcaggggccaccgggcagccggtacccaagaaaaagaaaccgaagcgtaagtgccacccggtggcggcgttcttccgctttatcggctgcctgctttgcgtctgcgtcatggcggccagcgtaggcggcgtcctgctctcgatgtacatcgtgcaggtcacggcaaacgatggcgatgtcctggatctggataaccagaaaaacaaacagaccaccattgtctacgacaaaaacagcgacgagtacgccaccctgaccaagggcgagaaccgtatctggcgcgagctttccgccatgccggagaacctccagcacgcggtcatcgctatcgaggataaggacttctacaacgagcccggcatcaatatcaagcgtaccatcggtgccgcgctgaacgagtttaccgaccatgcactgtacggctcccagcagggtgcatccacgctggaacagcagctgatcaaaaacctgaccggcgataacgagaccgacaagatgcgtaaggtgcgcgagatcttccgcgccctgggtctgtccaacaagtacagcaaagagaccgtcctggaagcctacctcaacaccatcccgctgaccggtatcgtttgcggcatggaggccggcgccaacgagtactttggcaagcatgtcgaggatctgaccctctctgagtgcgccgtcctcgcatccatcaccaagaacccgaccaagtacaaccccttcaccaaccccgaacagttgatgaaacgccgcaaccacgtgctgtatgagatgtacaaccagggctacatcaccgaggatgagtataattccgcaacggcggagaccatcaaggtggtggagagcaagggcggtgccgagaacgtgacccgcacctccaacaactcctacttcaccgatgcactctactatgagttgctcaacgacctgcaggagaaggccaactacacggccgaggaagccagctcgctgatcttcaacggcggcctgcgcgtctactccaccgtcgatcccaaggtccagagcgtcatcgaggaagaactgtacaacgccgatgacgccattccggccctctggcacgaagcgccggtcgccctgcgcgactacccggcggataccagcagttgggacgatgtgcagtacgacgaagccaccggcttgcccgtcaccaaggacggctacgctgtctacggcgtcgaggacatccccgtctacgaggatgatgccgagactgaactgaagaagggcacctccaccgacccgaactatcccaacgatgacaccgtctacctctgcgtgtacgagaaagtccgcaccgaggcttcggctgcgatcctggactataacggcaacatcctgggcatcggcggcggcattggcgaaaagcagtacgacctgggcaccaaccgcgccacgatcccgcaccagaccggttctaccatgaagcccatcggcgcctactgcctggcgctggattacggcctgatcaactactcttcccaaattctggacgcgccgttctattcggctgctgataaggaagtgctgaaagagcagtactcttatatggacaagtactccgctgcagcccagtcccgcagcgacatctggcgcgattggcccaccaactacggcggtgccggcggccagggcaaccccatgctggtgtatgacgccctgcgtcagtcctacaacacggtggctgtctgggtcggcaacatggtcggcgtggattacctgtacaacttcgtgcatgatacgctggaatgcagctatatcagcgccgaaaacgatatggacctggcacctctggtgctgggcggccagagccgcggcatgaccgtggtgcagctggccggtgcctactccatcttcaacggtggtaccttcaccagcccgcactattataccgaagtggaagattacctgggcaacacggtgctggataacaccaagtatatcaacaccacccaggctatcagccccgagaccgcgcagatcatgaaccgtatgctggccaacgtcctgaagaccggcggtacggcttccagtatcggcgtgccccaggcaggcggtatggacgcggtcgccaagacaggtactaccagcaacaacaaggattacaccttcgctgccctgaccccctactacgtcacagccctgtggtggggctttgaccgcccggaggatatgtcccagtacagcggcggtaaatacggtacgcccatccagaaagcctggaagaacatgatggaagagctgcaggcagacctgccctacaaggagtttgccaccagcgaaaacgttgtggagcgtcacttcgacacctccacgggtgccatcatctccggcggcggtgccattggctactataccgaggataacatgcccgacagcagctatgcagcttcgacggatgacccctatgccgccctggcccaggccgctgccgagggtgcccaggatggcgacaccaccaccgaacccaccgagtaaaaacaaaaacacttaaacacaatgtctcctggctgtcaaacagctgggggacttttgtttgcgtaataaatacagttgtctttatacaaaaacaccggtggataaggaggggcaaaccgtcaaactgcataaattgcagggaaaatgcgggaaatttgccccaaaagacttgcataacggtgctttccgtgttatagtaaatcctgttgaaacacaaatgtacgcaaggaggggacacgatgcctgaacgtcgtttcctgttggtcgatgcagatgttctgccggaagttttcggtaaggtattgcaggccaaagagcttttagcctcgggggcagtgcccaacatttcggcagctgcccgccaggctggtatttcccgcagtgctttctataaatataaggataccgtctttgatgccgagaccggccgcgagaccatcaccgtggtggccacgctgctggataagacgggcgccctgcaggggctgctgtccggcatttcggcggcaggtgcatccatcgtgaccatcacccagtcccgcccggagaacggcgcggcccaggtggaagttaccgtgcgcaccggcaccatgcagatgacggtggacgagatgctgacccgcctgtcccgccagccctgcgtggtggagatccaccgcggcgcataaacggccttatctgcaagaaataccgaaaggggaattttctcatggctaaaattgcaattatgggctttggtaccgttggcagcggcgtgctggaagtctgccgccgcaatgcggcctccatcgcccgccgcgctggcgagccggtggaggtcaaatacatcctggacgtccgcgatttctcttcctcgccggacgccgccctgtttaccaactctatcgataccatcctcgctgaccccgaggtcagggtcgtggtggagaccatcggcggcaccaggtttgcctacccgtatgtccgccagtgcctggaaagcggccgcagtgtctgcacctccaacaaggagatggtcgctacctacggtgccgaactgctggccctggccaaggagcataacgtggccttcctgttcgaggccagcgtcggcggcggcacgcctatcatcaccccgatgcaccaatgcctggccgccaaccatatcagccagatccagggcatcgtcaatggcaccaccaactttatgctgaccaagatgaagcgcgagaacatgggctttgatgaggccctcaagatcgcccagcagcttggctatgccgagacgaaggaccccggcgacgacgtggacggccgtgacgcctgccgcaagatcgccatcctggccagcctggcctgcggtcatcatgtttaccccgataacatcccggcccgcggcatccgtgacatcacggtggccgacatccaggccgccgaaaagctggattccgccatcaagctgatcgcctggtataacgagggtgagaacggccagatggccgccggtgtggagccgatgctggtttccaatgccaaccagctggccgacgtggacgatgtgttcaacgccgtgctgatgaaaggcgatatgctgggcgatgtcgtgttctacggcaagggtgcaggcaagctgcccactgccagcgccgtggtggccgacgtcatcgacgccctgaaagagggcgcacacattcacgacagcctgttctggaaaccggcccccaaactggaaggccagctgaaggacgaggccgtctacccctggtatatccgcgtcagcggtgtgtccgccgccctgctgcccaatgtagccggtgcgggccacacggtgtttgaggccgatggtcaggccgcgtacctgatcgatgccgccaccgccgcccagatcgaggagatcagcaaaaagatcgaagtcctcggcggcaaggtggaactggcgatgaagaagctggctgaataagccgcgcggaaaaggggagagcagaaaatgatcactgttaccgtcccggccaccagcgccaatgtgggcgcaggctttgactcgctgggccttgcggtttcgatgtacaacgtttttacttttgaggaagctgaccgcatccagatcacttcggtggatggcacccacatcccgaccggctccaacaacctggtgtaccgctcggcccgtgtggtgtacgaccagctgggtatcccgatgaaggggctgcgcatcacccagaagaacaccatcccgatggcccgtggcctgggctccagctccgcctgcatcgtggccggcatcctgggtgccaacgccctgctgggcaacaagctgacccgccgtcagatgttgacgctggctacctcaattgaaggccatcccgacaacgtggccccggccatgctgggcggcttcgtcaccagtgtgatcgatgaaggccaggtctacagcgtgaaaaaagaaatcgacacagagctggcttttgccgccttcgtgccggacttccgcctgctgacgtccaaggcccgagccgccctgcccgccatggtcagccataaggacgcggtctacaacctgtcccgcgctgcgctggccaccgccgctttctgcgatggcaactatgcgctgctggacgtggctaccaaggatgtgctgcaccagcagtaccgcctgcccctcatcaccggcggcgatgaggtgtttgagttggcccaggatctgggcgcactggctgtctatatttcgggcgccgggcctaccatcatggccgttgtgcataaagatgatacagagttctttgaccgtgccgaggcggcactggcggcggatggcccgctgcatcactttacggttcatcggctgctggccgataacgtcggcgcagtggtaagctgacgctgctatagaggaggaacaggaatcctatgggattgatcgtgcaaaaattcggcggttcatcggtaaaagaccgtgaccgcatcttcaacgtggcgcgcatcgtcatgaatacgcgcaacgccggcaacgatgttgttgtggtggtctccgcccaaggagataccaccgatgacctcatcgccaaagcggccgagatcacctcggacccgtcccatcgtgagatggatatgctgctggcggctggcgaggagatctccatctcgctgctgacgatggctttgcaggagctgggcgtttccgctatcagcctgacgggctggcaggccggcttcaacaccgaccgcgcctactccaaggcccgcatcaagcgcctggacacagagcgtgtcgaaagcgaactggcccgcaaccgcgtggtcgttgtggcggggttccagggcctgaaccgctctgacgacatcaccaccctgggccgcggcggcagtgatacctctgccgtggcactggccgctgccctgcatgcagaccgctgccagatctttaccgacgtcgagggtgttttcaccgctgatccgcgcaagatccccaaggccaccaagctgaaagagatcacctttgatgaaatgctcgagctggcttccctgggtgcccaggtgctgaacaaccgcagcgtcgagttggccaaaaagtacaatgtagagctggaggtcatctccagcatcaacccggtgcccggcaccgttgttaaggaggaaaccaaagtggaaggtatgctcattaaaggcgtggcgaaggacaccgacgtcgccgttctgaccgtcaaggatgttcccgatgtgccgggtatgtccttcaagatcttcagcctgctggcccagaagaacatcaacgttgacatcatcctgcagaccaccggccgcgacggccgcaaggacatgagcttcaccgtgcccctgggcgatgccgagagcgctgtctctgccctgaagaacgctaccagccgcattggcggcggcgacatcaccgtcgataagggctgcgccaaggtctccatcgtgggtgctggcatgcagagccactccggcgtggcttccactatgttcgaggcactgttcaaccagaacatcaacattaagatgatctctaccagtgagatcaagatcagcgtcatcattgatgaggaggacgccgacaaggccgtcgccgccatccacgatgcttttatcaactaagctttttctgcatgtaaatatagagggatagggtaagcccccatgcacagtgcggtgcatgggggcttttagtatagggcaataccgcataattctaagtgccgatacggcgagcgaggtgcggcagctgctaagccaaaagcgcagataatactttgtgtattatcgagcattttggcaacgcaggtgccgtgccgcacaccgagccgcagcgaggcgcttcggagcgcaaccgccgcttgcggcggctcttggcgcggagatccgccggagcggtgcttaagccgttaggcgggaattgtgcggtgttgccaaagattaaaataactttttgccctgggcaaacttggcacttaacgcacccttgcccaggtaggcataccgctccagccgttccgcaggggtaaaactgcgcaggctgcgaagatggctgtcatccagcaccagtgcatcaaaggcatagcccggctcaaacaggccgacctgctcgccaaagtcctgccagaattcaccgccgcccacggtggccaggtacagcgcttcggtcatcgtcagcggggcctcgctctggtccacatagcgccagcgcagcttgcttacctgcacagccgcagccatcacggcaaacaggtccagcgtgtggccgcctgccacatcgctgcccaggccgatgcgccagccgccccgcagatacttggccgccggggcaatgccggcaatcacgttctcgttgctggtggggcagtgggcgatcatcacgcggttggctttcatggcggcacattcttcctcgccgctgtagatgcagtgggccatcacagtgggcacatcgccgccaaacaggccgtagcggctgtaactctcgccgtaatatttcgtgccggggcacagcgcggccacccattcgatctcgctggggttctcggagaggtggctctgggcaggtactttatactcggcggccagttcgcccagacccttcatgtactcgtcgctggcactgggggtaaagcgcggggtgatcatcgggcgcaccgggccgtcgtgcagcatatgctcgtcggcacaggtgtccagccagcggcgggtctcagccaggccggcggcaggagagggctcccggtaaaagtccgggctgttgcggtccatgcccagcttgcccacaaaggccgaaagcccggcggctttcagctggtgcatcagttccagtgtggcatcggtgtgcagcgtgccaaagatgcaggcgcgggtggtggcgctgtgcgtaaggtcccgcacaaagtagccgtagcccgcgcgggcatagtcggcatcggcgtagtgggattcctcggggtaggtgtactgctgcagccagtccagcagttccagatccatggcggtgccgcagtagctgtactgtggcgcatgcaggtgcaggtccacaaagcccggcgtgatgatctgtccactgtggtcgtagaccggcacaccggctggggctgcttcacgaaatgctccgcagcggccatcctcacacagcatatagccatcccgcacccgcagggtatccggggtgggggtatctacaaaaatgcccttaacggcaaaacgttccatatggttcctcctgatagcagaatacctatattataaccgttccacatacccaactgcaagttttttatttacttttacccattgaagcggtataatacaaatatctatttgctgtttgaaaggaataaggacttggaacgtaaacaacttgctcccggcgtgttcatcacttcgatgagtgccgctaaattcaatcgctgccgcatcacgatccatctgcgcttccctgcgaagcgtgagaccgccaccgatgccgctgtgctggccctggtgctggagcgcggctatgcggcctgccccgatatgaccgccctgtcccgccgcttggccgaactgtacggcgctgacctgggcgtggatctttccagtgccgggccggaccgcgtgctgtccgccgacatctgcggcatcaagggcacctacgcactggcgggcgagaaccttaccgacgcctacgccgacattgtgttcggcaccatctttgacccttacctcgtagacggcatcttcgaccccgaggccgtgcgcattgagaccgagacccaggcccgccgcctggaagcagagttcaactccaagcgcctatactgcgtgcgccaggcccgccgcaaattcttcggcaattccccggcgggcatcgagctgggcggttaccccggcgagctggtcaacgtcacccccgccagcctgaaagccgagtatgaccgcatcctctccactgcgtccatcgatgtgatggtgcagggcgtggacgaagcccgcgtggccgacctgctgctgcgcaagctggagagtatccgccgcgacccgcagccctttgcactgcctatggccatgccccgcaccccgctgcgccattttaaagaagaaatccccggcctgacccaggccaagctgtgcatgctgttcaccaccggcggcgagtccgacccgcccagcgtcagtatcctgcgcgtggccatgagtgtgctgggcggttccgccaccagccgtctgttccgcaacgtgcgcgaaaagcagtccctttgctactactgcggttccgccgcccagcgatccaccggcgtgatgatgatcgattccggcgttgagccgggcaaggagcagcaggctgaggccgccatcctggcggaattggagggcctgaagaacggccccatcacccaggaggaaatggacgactgccgccgtggcctgctttccagcatggacgcgctgagcgacagcctggctgcgctggaaggctggtactacggccagatcacccgcggcgaaccgctctatccgccggagtacggcaaggtgctgaccggcgccgtcaccctggatgaggttcgccaggcgctgcaaagctacagctactcggtctgctatgacgtgaccgcaaagcccggtacggcgggcaagggaggtgccgaagatgtctgattttgcaaatctgtctgcggtacaggcccgcgccgctgccgccgttggctgccagagcaccacgctgcccagcggcctgaccgtgctgtgccgcaccatgccgggttacagcagtgtgcatgccatttatgccacgtcctttggttccatccaccgcagctttacgctggacggtaaagaagttgtactgcctgccggtacggctcatttcttggagcacaaaatgtgtgagacccccaagggcgactccttcagcttctacgccaagaccggtgcttcggccaatgcctttaccagctacgaccgcacctgctacctgttctcggctacccagaaaatcgacgaaaacctcgacattctgttaggtatggtgggcaagccctggttcaccaaggccaccatcgccaaagagcagggcatcatcgggcaggagatcaagatgtacgatgacagccccgattggcggctgctcaacgcgttgttctgctgcctgtacgccgaccaccccctgcgggacgacattgccggcacggtggaaagcattgccggcctgaccccgcagatgctctacaactgcaccaaggggttctacgcgccgtccaatatggtgctgtccgtggcgggcaaaattacgctggagcaggcagtcgaagcttgcaagcgcaacggcctgtaccgcgcccgcgctgcccatgaggtggagtgggacatcccggcggataacggcccgctggcccacaaggaggcccacttcaccatgccggtcaccaagccctgcttcggcgtggcctataaagaggaacccctcgtgcccggcgacctcaagcgggaattgctgctggatatgctgtccgacctggtcgttggcgggctgaccaagctctaccgcaaactgtacgataacgccatggtcaacccggagttctccggtgactttatcgcggtgcgcggtgcctgtgccgtggcctttaccggcgagagcgacaccccgcgggaggtcgtggacctgttgcaggccgagatcgagcgcctgcgtaccgagggcatcgaacccgaggtctttacactggtgaaaaaccaggtgtacggcggcctgctgggtgatgtggaggccatcgacgatgccgccgaggaagctgccgccgcctacctgaagggccgcacgctggcggatgagatcgccgcgctggccgccctgaccgtggacgatgccaacgagctgctgcgcaccgccctgcgggaggaaaaccgcgcctacgttcagatcgacccggctgaataaaaacactcctataaggagatatacaaaatgacttatcatgttcaattccccggcctggggctggccctgaccgtcaaccgcgtggccctgtccatcggcgggttcaacatctactggtacggcgtcatcatcgccgccggcatgatgctggccctgctgtatgccttccgcaatgccgtggatttcggcatcgactcggaccgtctggtggatgttatcgccatcggcaccgttatggccatcgtctgcgcccgtatctactacgtggccatggcaccgtttaagtataatagcatctgggagatgatcgacatccgcttaggcggcattgccatctacggcgcggtcatcggcgcgttcgtgttcggcgggctggccgccaagtggcgcaagatcccgctgctgccgctgttcgacctggtctcgctgggcttcctcatcggccagggcatcggccgctggggcaacttcgtcaaccaggaggccttcggcacgaacactacgctgccctggggcatgtacagcgagggaacggaagcctacttgaagtcggtgcaggtcacactgcccgccggtatgactgtcgaccccaccgctccggtgcatccgactttcctgtatgaaagcatctggtgtctggcaggctttgtcatcctggcaagccttgtcaagcgccgcaagttcaacgggcagatcttcctgtcctatatcatctggtacggcctgggccgcagctggatcgaaggtctgcgcaccgactcgctgctcgttggcaataccggcctgcgcgccagccagctggtggccatcggctctgtcattgcagccgccatgctgcttatcatcggcctgcgcaacgctaaaggcaaacagctgcaagtcacgatggcggtcagtgacatcaagaagcaggccgaagcagggaaccgctttaccccggacaccctgcctgctaatgctccccacgccgactttgtaaaagccaccgatgagatgaaccgccgcttaaaggacctggatctggacgccccggaaatcgaggaattggaagacccggcgccgaaaacgaccgaagcaccgaagcctacagaaaatgcaacggttgaagccgaagctccggcagagccggaagaacagcggaaaaccgaaccggccgaagaagccccggcagacccagaagcagaacccgccgctgagacccaggcggaaaaaactgccccggaagaaaagtaacaccgccgccccgcagtatggcgatagatactgcatggtgtaagacccgacaccgttttgcccgcaaggacaaaaaaatacatttgaaagagggaactatcatgggagcaagtattattgacggtaaggcattggccgccgccaccaaggccgaggccgccgagaaggtcaccgcactgaaagcccagggcgtcaacccctgcctggcggtcattctggtgggcgaaacccccgccagccaggtgtatgtgcgcggcaagatcaacgattgtgcccagtgcggcatcgagagccgcagcatcaatctgcccgccgataccacgcaggagaccctgctggccgaggtgaagaagctggccgacgaccccgccgtacacggtatcctggtccagctgcccctgccggagcagatcgacgagaaggccgtcatcgacgccatcccgccggagaaggatgtggacggtttctcgcccatcaacgtgggccgcatgcagatcggcgagccttgctatctgccctgcaccccggcaggctgcatccgcatgatcgagtccaccggcaccgagatcgccggtaaaaatgccgtggtcatcggccgctccaacatcgtgggcaagcccgccgcgctgctgctgctggccaagaacgccaccgtcaccatctgccactccaagaccaagaacctgaaagaggtctgcgccgccgccgatattttggtggccgccgtgggccgcgagggctttgtcaccggcgatatggtcaagcccggcgctgtcgtcatcgacgtgggcatcaaccgcggcgctgacggcaagctgcacggggacgtcaattttgccgaggccggcgagaaggccggttacatcaccccggtgcccggcggcgttggccccatgacccgcgccatgctgatgctgaacaccgtggaggccgccgcccgccagagcggcaagaccctttgattacgaagaatttgctgtaaaatcgcccaaaaagccttgacaagccagcaaggctatggtattatactagagccgcttggtatgggctctacaagtgtgtgcttttataggtgcaacgccctactgtccagcgagacttattgaaagaggttatccacatgtacgcagttatcaaaaccggtggcaagcagtacagcgttaaggttggcgacgttgtttacgtcgagaagctgaacgctgaggctgataccgaagtcaccttcgatcaggttctcgccgttggcgaggagggctctgtcaaggtcggcgctcccgttgttgagggcgctaccgttgtggccaaggtcgtcaagaacggcaagggcaagaagctcaacatcctgacctatcgtcccaagaagggcagcatggtccgcaagggtcatcgtcagccctacaccaaggtggaaatcaccgcgatcaacggctaaggaggtaaatcacaatggcacataaaaaaggcgtaggttctaccaagaacggtcgtgattccgagtccaagcgcctcggcgtcaagcgcggcgacggtcagttcgttctggccggcaacatcctggtccgtcagcgcggcacccacatccatccgggtgagggcgtcggcatcggcagcgatgacaccctgttcgctctggtcgatggccgcgttcacttcgagcgcgttggccgtgaccgcaagcgctgcacggtcaagcagtaaaagaaccgttcgggcgggccatttcggctcgctcgttttttgtaactggctattttttaacgaggtaacacatggcaaccagtaattttattgataccgcgaccatctggctgcatgccggcaagggcggcgacggcgcggtgaccttccaccgcgaaaaattcgtggcggctggcggcccggacggcggcgacggcggtcgcggcggtgacatcatttttgtcgccgacgacaacctctccaccctgatggacttccgctacaagcgtaagtacaccgcagccgacggcgaaaacggccgcgccaagcgccagagcggcgccgacgccgatgacctggtcatccgcgtgccccgcggcactgtgctgaaagaagccgagaccggcctggtcgtggctgacctttccggttccgagccggtggtggtcgcccgcggcggccgcggcggctggggcaatagccattttgccacccccacccgccagatccccaagtttgccaagcccggcctgcccggcgaggatatgcacctgcagctggagctgaaggtcatcgcggatgtgggcctgatcggcttccccaatgtgggcaagtccaccctcatcagcatcatctcggccgcccgtcccaagatcgccaactatcatttcaccactctgacccccgtgctgggcgtggtgcgcgtcggcccggagcagagctttgtctgcgccgatattcccggcctgatcgaaggcgctgccgagggcgttggcctgggccacgacttcctgcgccatgttgagcgctgccgtctgctgctgcacgtggtggatgtttccggctgcgagggccgcgaccccaaggcggactttgagcagatcaaccacgaactggccggtttcagcgccgagctggccgaccgcccgcagatcgtgctgggcaacaagtgcgacattgccaccccggaacaggtggaggagttcaagaactatatcgaggctaagggtctgaccttcctgcccatctccgccgccacccgccagggcgtggacaacctgcccgcactggtctacagccgcctgaaggatctgcccccggtcaaggtttacgaggccgagtacaagcgcccggacaagagcgccatgccgacccgccccttcaccgtgacccgcaccggcgatcacgagtttaccgtggatgccccctggctggagcgcatcctggccggcaccaacgtcgaggactacgagagcctgcagtacttccagacacagctgggtgactccggcatcctggacgagctggtggcccagggcgttgaggaagaggacaccatcaagattggtgaatatgagtttgactacttgtactaaagtagtgcggatagaatatgctgtttgaaacaaaatctgaagtggacatccacgaaatgtccccgctggcgctggcctttgtgggcgatgcggtgctggaactgttggttcgcgcccgcctggtgggcaccacccgcctgcagccaaaccggctgcacacagtagccacccattacgtcagcgcccacgcccagaatctggagctggcggtgatcgagccgatgctgaccgatgccgaggccgccgtgctgcgccggggcaaaaacgccagcaaagccacggtggccaagcacgccaccgtgcaggagtaccgcgcctccacgggctttgagtgcctgctgggctggctttacctgcagggccgcaacgaccgcatccaggaattgttcgatgccctgtgggaagggtaccagccggaataaagcggataccctttccgtaggggccgatgctcgtcatcggcccgttaggcagccgctgtcttgcggggcgatgcaagtatcgccccctgcctataacacggcagagtcactttatgtacccgcgccatcacggcgcggcccgcctcacttgctgtttttgctgtcggtggtattggtggtattggtggtattggtggtattggtggtgcggttcgtggtcttctgctgggtacggttggtcgttttctgggtagagcggttggtcgtgttgtttgtctgattctttgccataggtggttgactcctttctgaagttcgcaagtaaaaagcgatctgcggttctggccgcaaaggtagtttgcccgcccatggcttttttatgcaaaggggaaacgtatgcaatttcctgctgattttaccgcgcgggagcaagcactgctgggcccgcgctttgcggagctgtacgcctacgccacgccgcagcctgcccgcggggtaacggtcaacggtctgcgctgcacgccggagtggttcgccgcccatgcggatttcgccgctgcgctgtcgccgttctgccccacggcctttaccaccgcgccggactttaagcccggccgccatccctggcaccacgcgggggtgttctatgcccaggagcccagcgcttcggccccggccgcgctgctggatgtacaccccggcatgaaggtggcggacctttgcgccgccccgggcggcaagaccagccagctggcggaggctttgcaggggcagggcttgctgttggccaacgagtttgtggctgcccgtgccgagatcctgcgccaaaatctggagcgcatgggtgtgaccaacgccgtcatcaccaatgaggacacagccaacctggccaaggcattacccggcgtgtttgaccgcgtgctggtggatgcgccctgctccggcgagggcatgttccgcaaggagccggtggctgcgacccagcataataacgccctggtggaacactgcgccgcactgggcgcggaaattctggaaaatgccgccgcaatgctggccccgggcggggtgctggtctactccacctgcacctttgccccgcaggaggacgaggcccagatagcggccttcctggcccgccacccggagtttaccctctgtgaactgaatgcctgcggcttcggccgccccggagaggaaaaccgtgcccccggctgcaccgacatcacccgctgccgccgcatctggcctgccgatgggggagaggggcactttatggccaagctgaagaaaagccccgacgccgaagccccggtcccggtgcgcgtgaagcccggaaaaccggccaagacgccgcccgaatggctggattttgtcaaaacaactttcccgtttttggctgaccgcccgctgacgacggcaggggattggctgctgctgccggtgccgggcagtgagctgctgaacctttccaagctgcgcatcgtgcgcggcggcgtgctggcgggctctgtgctgaaaaagcggttccagcctgcccatgcgctgtttatggcctacggtgcccggtgcacgaaccgcgaggaactgacgctggacgacccccgcacagccgcctggctgcgaggcgaggaaatcaacgccgcaacggcacaaagcggctggtgcgcggtgctggtggatggctttccgctgggcggtggcaaggccagcggcgggcgcatcaaaaaccactaccccaaaggcctgcgcagcctgcaataagggcttgaaaagcacgcaggggtgtgctataatatcttattggtaatatcggtaacgccgggtcatgcggcgctgcctcatcggatggcccggcaagggcgccgagtgaatacaaacttagggggaacgtatccatgtctggacatagcaaatggaacaatatcaagcgtaaaaaggaaaagaccgacggcgcccgcgctaaagtctttaccaaaatcggccgcgagatcgccgttgccgttaaggaaggcggcggcaaccccgcttccaactccaagctggcggctctgatcgccaaggctaaggccaacagcgtgcccaacgataacatccagcgtatcatcaagcgcgccgagggcggcgacaagaccgagtacgaagcaatgacctacgagggctacggccccggcggcatcgctgtcatggtcgagaccctgaccgacaaccgcaaccgtaccgctgccaacatgcgccactactttgacaagttcggcggaaacctgggccagatgggctgcgtcagcttcatgttcacccagaagggcgtcatcgtcgtcgacctggaggacaaggatcccgaccagctgatgatggacgcactggacgccggtgctgacgacttcgatgcaggcgaggacgccgccgaggtcgtcaccagccccgagaacttcaccgccgtgtgcgaggctctggagaagaagggctacaccttcgtttccgctgatgtcgccatggtgccttccaccaccaccaccctgaccgatcccgaccagctggtgcagatgggcaagctgctggatgccctggacgacgatgacgatgtccagaacgcatggcacagcctggagaacgaggaagacctcgaccgctaaaaacgaccctgaagagagtgaagtgaccctttgctctcttttctttttaatgcagctacgctgaaaaggaggcgaccctatgtcggaaccgctttgcccacactgcctgcagcccctgcggggccgttacgagggaaactgcccccactgcgggcgctcgctggagaaccgcaacccggagggcgccctgccgctgggcacccagctggcgggcaggtacaccattggcacctatttgagcgccgacggtgatggcctggcttaccgcggcattttgaacgaggagaagaagttcgtcctcatcaaagagtatttccccgttaccctttgcaacggccgcagccccgagggagcgctgatgcccaaagaggggaaagaagtgctgttcaagaccagccggatggactttaaggacctgtacgacgatctgcataacctcaccccggccaccggcctgaacaccatcctggacgtgatggaggaaaacaacaccgtctacgctgtggaggaaagcgaaaagggcatgaccctgacgcattatctcagcctgcgcagccgcacactgacccccgccgaggcccgcaccctgctgcagccggtgatggagggtgtggcgctgctgcacaaatccggcctgatccatcgcggcatctgcccggataacattttgctgcccatcgacggcaccgcccggctgaccggctacggcacgctggctctgcgcaccggcggcagtgagctgaaaagccagctctatcccggctatgccgcgccggaacagtactcggccgccgagttcagcggccgctacaccgacgtgtacgcgctggcagcagtctgctataagatggtcacggggcagacgcctgttgccgcgccccagcgcaaagtgcgggacagtttggaatccgcccacagcctcgaggcgggtgtgccgacctggttctctcaggtattggcctgtgccctgcggctggacccggcgcgccggatgcagacggtgcccgaactgatgagcgccctgaccgaccccaacgtggccaacgccatgtttgagcggggcgacaaccagatcagcacccgcaaaattatggcagtgtcgctggtggtcatctttattttagcggtgctgctgttctggagcctgctgggcagccgcagcgatgacaagccgacccccatccccacgcctgccgagaacagcgaggagggggcctccagctatgaggagatcgagaccatccccgacctggtgggcaagcgctacctgaccgagatcaaggacagcgacctctacgcgggctaccgcatcgtaatgaccgagcagaactcctccgaggtcgctcagggcgtcgtcatcagccaggacccgctggcgggcacgctgaagaccgaggaaaaccagatcatccggctggtggtaagcaaggggccgaacctggtggaaatgcccgacatcctgggctttacccaggccaacgccattaagcagctggatgagcgcggcatccagtaccgcatgcaggtcgttgagaatgacggcaccttcgccgagggctgcgtggccaagaccgacgtggtggccgggaccaagtttgatgccggtaagaccatcgtgaatgtgttcatcgccggggaacgggatgatacgctggtagcctccaccgccagctccgaggaagaaacggacagcggagatagccaggcggaataaagcaaaacgaaagggactttctatgacggaaagtcccttttgtttgtgtattgatatatactgcagaactacccttgcttcatccgctggtcatcccccataaacatgaacatcttgcatccgcccagcatgcggctggctactttttcggtgtagcgggcggcaaaaacgctttggtcggtgatgttggtggtgtaaatggtggggcgctcggtcagcatgcgggtattgatcagctcatacagcacgctgatggtcagcggggtgatgtactcggtgcccaggtcatccataatcagcaggtcggcttcctggcaggcggtcagccactcgtcgccgctgttgtagtcgaagtgctcgcggcccagccgggcagccagcgcggcggaactggtgtacagcacgtcatggccgccctccagcacggcgtcagcaatggccagcgccaagtgggtcttgcccaggccgctgcggcccataaacagcaggttcttgcttttgctattaaacttaacagcgtagtttttgctcaattccagcagcttggtcatgtaagcgcgggcagtcacgccaaactccggcaccagcgtgtccgggtagcggttcacgtcaaaggtgctgaactggcacagccccagcgggctggcggcgttgatctcctcccggcgcaggcggcgggccacgtcggccacacagctgcagggcacaccgccccgcatgccggtgtcctggcacagtgggcagcggaacttgggggcaaaggcttcctcgctgaaaccggcggcttgggcggcctcggcagcggccttgtcggcggcctctaaggctgcacgggcggcgtctatatcgccgcccaaagcggcggtgcgggctaacgaaagccctgcccgcatcttggcatcatcggcagcagaaagcgccggattggcggcgtaggcggcgcggcgggcggtctcggcctgcatgacggcatgctgccgccgggctgcgatctcccgctgggcagcgcggaacagttcgtctttggtgcgcatgggttagccctcctcgtcaaacatagccatccagtcgcggctggacaggggttgctgggcgctggcagcggcaggctgctggggcgcggggcgctgggtagccaagatgttgctgccggaaagctgcccctgcccgcgggcggccgacaccgtcgtgatgccctgggcgcgccaggcccgcaggatgccgtccacatagcggatggtggtcttgttgcctgcccgcagcagcgcttcttcgatcatctcgcggccaatgccccattcctcgtgccagcgggcgatggcgctgcgctcccagcgggtcagggcgtcggcggcaatgccaaactgctctgcggcttcggcacaccactgctcgcgctgcttgcagcggcgcaggtagcgctcggcatcctcgccggtctccacgccggcctcccgccagcggataagttcccgcgcaacggcggcgatggtgcgtcgtccctggcgggcaacctcggcacagcagagcaaaatcacgtcgggctgccagccgtcggtcaggtacaggccgaccaaacgctgcatctcgctgcggctcagggccttgccaaaggcggtctgggcttcctcgcacagcacggccacgtaggggtcgttcaggttggccaggtcgatcttctggggcttctccggctccgggatgggtgcgccgccgcggtcgttgaccagcagaccggcaccggcccagtattgcagggcacgtttggcagcctccacgctggacagacccagggcgcgggccatggtgcgggggtcggtgtcaccggtctgcaacaggtacagcgctgcacgaatggtatcgccgtccgtctgtgtcaggtgcgaaaccaccagctgcggtacagctaaggtgtcgccgtgatactctgccagtttataaggcatgccgcaaacctccccactttaaagtaacccttattatagcatttttgcggcgatgtgtaaagaaaactgcccaaaaacgcggcgcgcattttggctaatgcgtttattgtaattgtgctcaaaaaattgtacaatagaacaataaaagtacagggcagcgcccatcaggcgcacccggacggagggaaaatcttatggcgatgaatcttgttaaactgcccaccggcaagcccaacctgcagctgcgcgtcagcaagggccactatgccaccagccacagccacatcaactattatattgatgtcaccctcacgaagttccgcttatccgaggcccgcgctgctgcccaggaactggtacgcggctaccgcggcaccaccattatcgacaccatcctctgtctggacggcaccgaggtcatcggcgcctgcatgggcagcgagctgaccaaggcgggctacagcaatatgaacgcccaccagactatctacgtcgtcacaccggagcataccaccggcagccagctgatcttccgcgaaaacaccgcccccatgatccagaataagcacgtgctggtgctggcggcatctgtcaccaccggctacaccgtgcagggcgcggtggaggccatccggtattatggcggcgagcctgccggtgtgaccgctatcttcgccacggtggacaagtgcgccgggtatcccgtggccagcatctttgacccccacgacctgcccgactaccagagctatgatgcccacagctgcccctggtgcaaggagggcaaaaagatcgacgccctggtgaacagctttggatattcgagtttgtaacagatagctatacacgccctttcctctgcataggggagagggcgtattttcgatttccccttgacgaacgacccccaccttatttataataggaaggcttgcgaaaaaagggaggaattttgttgaatagcgagaacctgaacacgattttggctcaatacatccatgattttgcagagctttctctttctcaaacgagcggcgaggggagcctctggcaggccattgatactttcggtgccgagtgggacatcgaagcgtccgattttccggccatgtttgcccgtgccatgcagggggcggcggaccagctggacaccccggcggtgcagccggtggcgggcttaaagctgctgatgatgcgcgacagcgaggtcgagctggtgcgggagtgcttccgctggctgtataacgacgaggacgacgacctgaaaaaacgccgcggccgcgccgagatgtttgccgaccagatcaccggccgtttccgccgctgcttcccccggatgaacaaatacaccatgaccccggtccatgcggtctacttcctcaacctgtggatgccggaggaaaacttcttctacatccccgccgaggccaaggcctgggctgactttatggagtacccggcggagttcggcaacggcgccagcctggacctggcagcctactacgctatgtgcgaggatctggtcaccgccctggccgactaccccgacctcatcgcccagcataaggagcgtctgcgcacccatctgggcggcatcaacgaccggctgcacctgctggcctacgacatcctgcatgcggcctaccagcgcgggtattaccccaaaggcttctcccgcaatgccacggccaaggagcgcgccaaggccgtgaaagaaaagcagacccgcgccgagctttgcctgcaaattgccgagaaagagcaggaactgcaggaattgcaggccgccccggtggcgctgcccgacctgaccggctgccgcatcgtgcataaaatgtttggcgccggcaccgtgctgcccggcgagggccagttcatggtcatcgattttaacggtacacagaagaaattcagctacacagcgtcgctttccagcggctatctcaccgccgaggacgacagcgtgatgcagcagatgcaggattaccagaactacggcaagacctgcgacgccctgcaaaaagagctgaaaaatctgaaagatgagctggtcaagctgtaaaaccacttgacaaatccccacacatgcgggtataatatcgtatgtgtgatgcggctgtcgtacaacggctagtacatcagccttccaagctgaggacgtgggttcgactcccatcagccgctctctgaaacaaagcgcaggtacttaggtatctgcgcttttgcttttgcacatataaaacaaccgttccaaccgtacaatccgtaccaaccgttttaatcgttgcaaccgttggaaccgttgataccgttggtcataaatatgttgactcgtatatatattatacaatatatgccaccctgtacgtgtggacttggcttatcatatactaacatgcagcatcacatcccctatccgcccgtatgcacatggcaattgctgcgcggatatagctacagaatccacccctgcgggcacaaacattgctgtaagcagccattctatactacactatatacagtcgattcttattacaccaacggttccaacggttccaacggtatcaacggttgcaacgattagtacggtatgaacgattggaacggtcgaaacggttgatatagtagggtacggtatgtacggtcggagcggttgttctatactgcacatacttttaaattgtgccgcaaataacaccaaacccggcaaattgtgcgctggataacaataccagctgcaattgtgctgcgtttaacaactttgtgtgcataattattttacatattccgccttgacattggggcgggcaggcctcataataaagctggtaaaacagaacgacttagaaaaggggagcatgaccatgcgtgtaattgccggtaccgcccggggtaaaaacctgcaggcattgccgggcgaggatgtcacccgcccgactatcaaccgtgttaaggaggccatgttctccagcgtgcagtttctggtgcccggcgcccgtgtgctggacctgtttgcaggcagcggccagctgggcatcgaggcgttgtcccgcggggcaaaaagctgcatttttgtcgaccgttcgtcggatgcactggccatcgtaaaggctaactgcaaaacagcgggcgttgaccgccaaagcgacatccgccaggcggaggctctgccttttctggcaaacatccgcggcccgtttgatctggtgctgctggacccgccgttccattacgataccttaaacgaggtactgcccgccctggccgacaaagtagcccccggcggcgtggtactggccgagagcgagcgcgaagccgccctgcccgaacgcgccggggcgctggtgctggccaaacaatactattacggcaagatcatggtgagccgttacgagaaagaggaacaggcatgaacgtagaagaattgctcgatctgatggaagaaacgctggaagccggtacggctgtgccctttgcccccgccaagcgtgtggtggatgtggaccgcatgcgggacatcatcgacgaagtgcgcaacaacctgcctgacgagatccgcgaaagcaaaaagatcgtgaacgaccgcgagcagatcatgaaaaacgcccaggtggaatccgagaccatcatccagaaagccgaggagcgcgccagcgccctggtcagcgagcaggagatcgtcaaacgcagccgccagcgcgccgccgagatcctgaccgcagccaacacccaggcaaaggatttgaccagaaatgcaacggtgtactgtgaaactttgctgaaaaagtctgaggagacccttgcccgcagtgtggcggacattaaaaatacccgcatgaacctgcgcagcgccacccggcctaatcgcggcggccagggcgggcaaaaccagtaaagcgacaatcacagccctacaaaacacgccgtcatgccgcgttagcccccacatctccccaccacaaaaaaataatctgtgaaatgtagcccgcagcgggattttttcctgctgcgggcttgctttttaccccattagatggtagactaaatatacgaagtggggaattgtggtgtgaataacaacccttgtggtgaaaagtgggtggttttccaccctttccacagagttatccacaaactcaacgcggcaacgtcaaaaaacgtgccgaagatttgtagaaactgacgaaaggggagagcggctatgctggtaggccagtacgactacgctatcgacgccaaaggtcgcctgaatttccccgccaagttccgcgacgccatgggtgagacctttattgtcacccgctggctggaccactgcctggccgctttccccagtgacgagtttgaaaaggtcgccgccaagattgaagaaaaagggctggtcaagggccgcagcgtcagccgcatgctctactcctccgccgtggaggtcacgccggacaagcagggccgcatccagctgcccgcccgcctgcgggagtatgccggtctcgaccacgatgtgaccgtcatcggtaaccgcagcttcgctgagatctggaacaccgccgcctggaacggcagccaggaatccagcgacgaggactttaccgccgccatggaagcgctggatttctaaggcaacaccgcacaattcccgcctaacggcttaagcaccgcttcggcgactgcggcacggcatctgcgttgccaaaatgctcgataatacacaaagtattatctgcgcttttggctt

SEQ ID NO: 7809 - DNA, 10307 bp, Unknown
  gut microbiota DNA sequence
atgtgattgcaagcaaaacctgtaaatagaggacaacaccatggaattttcccacattcccgtacttttgcagccctgcctggatgggttgaacatcgaccccgccggcatctacctggacggcaccgccggcggcgcagggcacagcacccagatcgctaaacgtcttaccaccgggcgcttgatctcgctcgaccaggacccggatgcggtggcagtcgccaccgaaaggctcaagggcctgcccgcccaggtggtacaggcaaacttccgcgaggcagcgcgtgtccttgcggagcttgacatcccggcggtcaacggtgccctgctggacctcggcgtttccagccaccagctggacgacgcggcacgcggcttctcctaccatgccgacgccccgttggatatgcgcatgagccagcagggcccgaccgccgcggacctggtcaacaccctcgaccgcgaggagctgacccgcatcctgcgggactacggcgaggaaccctacgcctggcagattgccggtaaaattgtgaccgcgcggcaggaaaagcccatcctgactaccatgcagctggctgacctggtcgccagcgccgtgcccccggccgagcgccgcaaagccaaaaacccggcccgccgcaccttccaggctatccgcatcgccgtcaactccgaactggacgccctgaacgagggcctggacgctatcttcaactgcctggccccgggtggtcggctctgcgtcatcaccttccacagcctggaggaccgcctggtcaagaacaagttccgccgttgggcgcagcgctgcacctgcccgccggaacagcccatctgcacctgcggcggcgtgccgaaagccaggcttatcacccgcaaacccatcgaggccgatgccgaggaattggaagtcaatcgccggtcccgctcggccaagctgagagtgttggagaaggtatgagcctaaaggccccctcgcagagggagcctttagctacgcacacctgcaatgacagaaccatttaaacagatacaccgaattcagatagaggtacccaatcatgacgacagttttacttcatacaggccagacggcacccatactggaaccccgccagccggagatgcgcgtggtacgaggcggcaagcatgggctgaaccgcgcccggcagtttgccgcggtggcgctgcatgttattgccgcggcgctgctgctggggctgatcttcagcgtggtgcacagccaggcccgcattaccgagctgaacggccagatcaacgatacccgcaccggcctgactgccgcccagagcgagtacgactacctttccaccaagatgagcgacatcaccagccgcgccagcttgcaggatgtggccgagggccagctgggcctggtcaaggccgaccagagccagatcacctacatccagctggaagaacagagcgtcattgagaaaaccggcagcgacgcaggccgcgttctggtgggcatccgcaccgccgcgctgaatctgctggatagctttaatccgtaacaaacgcaggtacgagcctttttgcaaacggcacttccgccgcacgcgaaaaggctcgcctacgcatccggggataaatcccgcataaaaggtaaaatctatggcaaatacccaaccacccaggaatcccaacttaaaaagcaacgtccgcatccgcaccatcattgcggtggcggcgttcacgctgggggcatttggcctgctcatctaccagctgtacgccctgcagctgcgcgatgccgaacactaccgcaccgaggccgtgacccagcagctccaggacaccgagttgcccgccacccgcggcaacatttacagtgccaacggcaagctgctggccaaaagcaacaccgtgtggaacatcatcgctgacccggcccaatccgagaagaacggcgccacggaaaccgagatccgcaccggcgccgagcatatcgccgagctgctgaacgacggcacttccgccgatgacatctacgccaaactgaccgcccgcaacaagaatggcgagctgtaccagtaccgtgtggtggcccagaacgtggaaaaaccggtggccgacgccatcatcgaatactccaaatcctaccgcaccgcgccggaaaaggaaggggagaccggctaccgcatcgccgtcctctccaccgagcagtccaccacccgcagctacccctacggtgcgtttgcgtcgtcggtcatcggcttctgcaacaacgatgaaaatggcaagctcgtcggcgcttacggcctggagaaatcctacgaggaagatctggccggtacgccgggccgcagcatcgctgagaccaacgtcaacggcgaaattctggccaacaccgaggccgacgtccacgacgccatcgacggcaacaacctgaacctgacgctggacgaaaatgtgcaggccatcgtggaagaatatctggccgaagccatggataccttctccgtccacggccgcggcagcgctatcgtgatgaacgtcaagaccggcgcgatcctggccatggcctcgctggagcagttcgaccccaacgaccccatgaccgtctacgatgacaagatgcagaccatcctggacaagactgacgccctgaccgccgacgacatcgattggctggagggccgcctgggtgagaagaacgtggccggcatcatcgcggatggcgttatcagccaggaaaccaccgaggatgaaaatggcaataccatttccagcgaatacacccagctgcaaggtatgctgcgcgaagcccagtggaagaataagaacatcaccgagctgtacatgcccggctcgatctttaagcttatcaccgcatcggcaggtctggattccggcatcatgaacatgaaccagaccttctactgcaacggtgagctgaccgtcaaccagggcagcgagctgtgggagcacacctaccactgcgccaacggcgaggtgcataccctgcaaaacatggcccaggcgctggataacagctgcaacctctggtttatccaggcggcgcagaccttgcagcctaccgtgttttacgattatatccgggccttcggttttacccagcccaccggtgttgacctgcccagcgagacccgctggaccagcgtgtacaacgcccagcagatggccgaggtcgacaccaacctgtacaccgccgctttcggccagaacgaggccatcacccccatgcagatggctaccgccattgcggccatcgccaacggcggctacctggtcaccccgtatatcgtggattccatcaccgacgatgcgggcaacatcatcagccagaccgacaccagcgtccgccgtcaggtcatctccgaggaagtcagccaggagatcctctcgatgatggagaacaacgttgaccccaacggcaccctgagcatccgccactcctgcaagaacgcctacgtggcaggctaccgcatcggcggcaagtccggcactgccgaacgtaccgaccgccacctgcgcggcgacggcgactactacaaggccatgagcttttccgccgtgctgcccatcaacgaccccgagatcgaggtgttcgtcctgctggatgacccccgctggatccatgattatgccagccaggtcgtggcccctgttgtaggcaacatcatcagcgaagttgcgccctacctgggcatcgagcaggatgccaactacaaccccaccggcaacgtgaccgtgcagacctgcctggactacacctggaccaacgcccaggtcaccctgaaccagctgggcctgcagcataagctgatcggctccaacggcaacattgtgtaccagtaccctgtgggcggcagctcggtgcccgttggttccaccatctacctgtacaccaacaccgaccaggacgccatgaccaccgtgcctgacgtgaccggcaagagcggcagttttgcatcccaaatgctgaaagcctccaacctcaacgtccagttcgagggcgacagctccggccgggtagtatcccaaagcacagccgcagagaccagcgccgcctacggcaccatcgtgaccctgacgatggaatcggacggcagcgataccgccgatacgacggacaccaccgatacccaggttgaggaaactacggaagaagcagtagaagaaaatacagagcaataaacggcccaaaggccccctctgggaggctttccgcctgacatactactcgcatatccatagaataaggaggcaatcccatgcaaaccattcctgccaacgaactgctggctggcctgactttggccgagccggcggacatccacgctgttgttaccgacagccgcaaggtcgagcccggctgcgtgttcgtctgcttccccggtgagcgcgtcgacggccataccttcgccgccggtgcttaccggaacggcgccgcctatatcatcgccaaccaccccgtggacggcgtgcccgaggaccgcactgtcatcgtgccggacagcgcccgcgccatgatccgcatggcctccaactaccgcatgctgttcagccccaagatgatcggcgttaccggcagtgtgggaaagaccaccaccaaagagttctgctacgccgtcctctccgcctttggcaaaaccctcaagactgagggcaaccagaacaacgacatcggtgtgcccaacaccctgttccgcctggataacgacacccggtacgccgtggtggagatgggcatggaccacctgggtgagatcgagcggctggcccgctgcgcccgcccctccgccggcatcatcacgatgatcggcgtgtcccacctggaaaatctcggcacccgcgagaatatactgaaagcaaaaatggagatctgcgcaggcctgcctgacggcgcgcccctggccctgaacgccgacaacgacctgctgcccaccgccagcgtacccgcccgcctgcgccctgtatggttcggcatcgagagcgagaccgccgatgtacgcgccgcggatatccacaccggcaccgatggcacgacctttacgctggtggataaggcctacggcagctttgccgtgtccatccccaccgcgggcctgcataccgtgtacgacgccttggccgcctacgccgccgccacccgcctggggctggaccccgcccggtgcgccgccgcgctttcccgctaccaggccaccggcatgcgccagcatatcgtggagaagggcggcatcacctttatcgaggattgctacaacgccagcccggacagcatgaaagctgccctctcggtgctgaaagccctgcccaacgcgcgcaagatcgccctgctgggcgacatgctggaactgggcgacgcctgcgagagcggccaccgcgcaacaggggagtgggccgccgatgcgggtgtgtccctgctgatcgcctacggccccaacagcgcagccatggccgaagccgctaaaaaccgtggtattgcaactgtgcattgccaaacggccgcagaagtgttacaatacttgcagcagtctgtccgccccggcgatgcagtgctggccaaagccagccatgccatgaaactggatgagatcctggcggacttttacgctgctttgccgcaggcgtaacgcacagccccgtgcagccgcgcctacgttttacttgaggaatatggaggaatgactgcatggagcctactgtctccgcaattttagccgccggtgccgttggtggctttgccgttacggctatcacctgctggctgttgatcccggctttgcaccgcctgcactttggccagaccatccgcgaggaaggcccgacttggcacaacaagaaaaacggcacccccaccatgggcggccttgggtttatctttggcatcttgctcaccatcggcgtcgtgtacggggtgttccacagctctgcgccggaggtgcttggcccccagcagatggctgccggcatgctggtgctgtttctggccttcggcaacggcctgatcggcttcctcgatgacttcatcaaggtcatcaagcaccgcaatctggggcttactgcctggcagaagatcgttttgcaggtcgctgtcaccgtcgggtttatgatcggcttacacagcctgggcctgctctccaccagcgtcatgttcccggtagcgggtatggtcgatctggggctggcttactatcccatcgcgttcttcggcattatcttcctggtcaatgctgttaacctgaccgacggcctggacggcctgtgcaccggcgtgacctttgtgtccatgctgggctacctgctggcaggcagcctgctgggctttgtacatgtttcgctgctggcggccaccaccgccggcgcctgcgtgggctttctgctgtggaacttctacccggccaaagtctttatgggcgataccggcagcatgttctttggcggcatggtcacggcgctggcttttgtgatggaccgcccggagctggtgctcttcttcggcatcgtttatatctgggacgctatgactgtggtcatccagcgcatctacttcaaggccacccacggcaagcgcatctttaaaatgacccccatccaccacgcctttgagctgcgcggctggaaagaggtcaagatcgacggcttcttcgccctcatcgccgccatcggcgtggcgatgggcattttctacatctgcatcgcataatcaaccataagcaaccataagcaacaaggaggcttgcacccattggttacgcatctgtatggcattttgggtgtgatccttgaccgcacctttggtaatatcatccgcatgctgcgggtcatccgcctgcccaaagaggaacggggccatctgtcctggacctttgtgggcacgctggccgtcatattggcctacgggctgatcatgatgttctcggccagctattccagcggctacaccaaccatggcggcaacatctactacttcatcaagccccaggccatcgtggccgcggtgggctttgtcgtcatgctgggcgtgtcgcttatcaactaccgtgcgctgcggtatatgttctggacattttacgtcatcacgctggcgctgctggtgctggcgctgttcatgcccagtgacaataacggctgctaccgctgggtctacctgccgggcggcatgtccctgcagccctcggagctggccaagtttgccgtcattttgggcacggcggatattttggaccatcaccagcgggagatcaaaagcctgttccagtgtgttttcaagcccgcctgcctgctgatccccattctggttttgctgaagctggaaccccacaactcggccatgctgctgatggctatgatctttgccaccatgctggtgtgcgccggggcaggcggcgtaaagctgtgggctgttgctgtcccggccggtgcggctgtcctggcgtattttatcaagtctctggcctccggcgacggttatgcgtcggagcgtctgggcggcgtctggggcctgacccccaccgataccgccggtatgctgtggcagacccgccagagcatctacgccatctccaccggcggtctgttcggcgtgggcatcggcaacagcgtgcaaaagcaccagtggctgccctacgccgaaaacgactttatctttgccgtcgtgtgcgaggaactgggctttatcggcgccatcgcattgatcgtgctgttcggtgccctcattgtgcagggcattgccatcgccctcaacgcaccggatttcttcggctcgctgctgggcatcggcatcatggcgcaggtcgcctggcaggtgttctgccatatcggcgtggccacagcgctgctgcccaacaccggcatcagtttgccgttcttctcctacggcggcaccagcttgctgattttgctgggtgaaatgggcatcatgctaagcatatcccgcgccggaaacggccgccgtgaggcccgccgccagcgggaacaggaggaaatggaaaaccgcctgcgccagaaaagcacctaccgccgccgcagagtttgacggcagaaatctataaggcaacgccgcaggcccccaaaggggtgcagcggtctgcctgaaaaaggggagttagtatgcgtgttctgattgctgccggcggtacagccggtcatatcaacccggcgctggccattgccggtgccctgaaagccgccgagccgaccgccgagatccactttgccggccgccgcgagggcatggagtacggccttgtcacgaaggctgggtatccctttcatcacatcgagatcaacggctttcagcgccgcctgaacgccgagaacatcgtgcgcaacgtcattgccctgtggcatctggcgctgtccggtccccgcacccagaagatcctgaacgaggtcaagcctgacctggtcatcggctgcggcggttacgtcagcggccccgtggtgcgcgccgctgccaggcgtgacatcaagactgccatccacgagcagaacgccttccccggtgtgaccaacaagctgctggccaaggatgtggatgtggtactggccgccagcgctgatgcggtggagaagctgggagcccccgaaaagaccaccgtggtaggcaaccctgtccgccccgaagtgcttaccgccgaccgcgaagccgcccgccgcaacctgaaggccggcgaccgcaccgttatcctgagctttggcggcagcctgggcgctgaccgcatcaaccaggtggtggcggacctctgcgcctgggaaaagcagcagggggcgaacgtgctgcacctgcatgccaccggcagccgcggcgtagagctgttcgataagctggaaaaagaaaagggctttgcccccggtgagaacctggttgtcacgccctacatcaacaatatgccccagctgttggccgccgcagatttggtcattgcccgttccggtgcgctgacgctggccgaactggaggccgtgggccgcgcgtccatcctgatccccagccccaacgtggccgagaaccaccagtattacaacgccctggaactgcaaaaggccggtgccgccgtcgtcattgaggaaaagaacctgaccggcgaggggttgatcgaaaccgtgcagcagctgctggcccagcccggcaagctggccgagatgggcgccaacgccaagaccctgggcaacccgcacagtttggagcttatcaccgccaagctgctggaacttgtcaaataatgcaaccatattgtaaccggagtggagagcgtatccgcggtctccgctcttgtttttttgtatcgtttcttctataataaatgtaaactgtaaaagtgtgctttgtaggggcgcacagtgcgcgtccgcgggccgatgacgagcatcggcccctacattgagtattgcacggttctgtaggggcaggtgcttgtattgcggggtcgcgcagcgatctatgctcgcccctacaatctaaattatttacctgaatagaagggagggctgacccatggattataaccagcgcagccgcgggcaaaagtccggggccggtcatcctgcctgtgcaccccgccgcagcgtaagcagccgcatggggctggaaaaacgcggcgcacctgcccagcagcccccgcgcggcaatgccccgcgtcccaatcagcagcgcggccccaatcaaccgccccgcagcggccagcccccacggcaaaaccgccccggccaaaatcagtccaacaatggccgccgcccccgcccgcagcagcagatcaacccgcaaaaaagcggctacacgcccggctcgccccgccgccagcgccgcgtgacccaggcggagattttacgccgcacgcgccgccgccgctttctggggatgctggcagtgctggccgtgctggccatcggcgcgttcgtgtcggtcaacctgctgttcaaggtggccatcttccgggtcgagaacttcgaccacagcacccccgccgacaccggcatttataccgaggaagagatcgtctcggcgctgaatatcgagaaaaactccaaccttttcgccttctccactgccgaaaagaccaaggaattacaggcgcagttcccgtatctggacaaggtggaagtgaccgtccagatgcccgccaccgtggtggtgcgcctgacccccgctaccgagcgattcacctgcatgtactccggcgggtggatggtcctcagcgatgcgctacgcatcctgcggttggaggtctcccagcccgagggcatgatcctgctcaacgccaaactgccggacaatttcagccccgccatcggtcagcaggtcatcc

SEQ ID NO: 7810 - DNA, 37608 bp, Unknown
  gut microbiota DNA sequence
gcaagccctttcggctgcttgaacaatttttacttcaaaatattgtctaacttttgggggtcacttcagttctaacgcactggctggctttctccttataaatttggttacaatttaggactctacgcccagtaccacagcattaacggcttcttccaaatcaaccaccaggctgcgtttggcaaaacccaaagtggtatcattcagcgtcaccaggcaattctcaccatcgtactggtaagcacacagcgtcagggtggggtagtcggtgttgtcgaggtgtaccgtcagggcaatctcctgcttcttgtcgctcgtctcggtgttgtattcggcaatatccaggccatccacggcggacttgatatcgtcaaagtccacttcctcgccatccagcgtgtacttgctgccctttcagtttcttgcgcaaaaagccaatgtacacttctacattgttttctacggcatcggagtcaaagccccacacatgggtcaggatgctttccttcggggtgttgttctccccggcctgcatcagcaggcgcatcacatcaaattctttggcggaaagccgcatctttttctcgccgcaggtcagcgtgtcggcatccaggtccagcgtggtgttgccaaagaccagccggtccacctgcccgccctgccgccgcagcagcgcccggatacaggccaatagttccacaatgtcaaacggcttcgtcaggtagtagtccgctccggcgttcagcccctcgatgcggtcaggcaggtcggatttggccgtcagcatcaagatgggcacggtgcagcgcttttgccgcacctgacgcgccacggcgtagccgtccatgtcgggcatcatcacgtccaaaatcagcagatcataaatgccggtctcggcatactcggctccggacacgccgtcgaaagcggtctccacggtaaaaccttttcgttccagcagcgtttttagggattccgccagcagtttttcatcttctacaatcagcacacgcatcgtcagcacctcactttatgccgctattgtaccgcacgaagctgaaaagaagctgaaaatttggtgtgaaaagtgtggaaatggcaggaaacaagagatccgacgcttcacacaggcgggtacgcctgcccagttaagaatcggctgtccttcccataaaaatcattgtatttgtaagcaaaacacctgcgcaaaccaaactttcgtaagaattgcccaaaaagccttgcactttttgcatagtctgctataatggcactatcatcacagaacacgaacgggacaaaggggtcgcgtacttgcaaaagtacagcggcccctttccgttacgcacaaaggcgtgcagcactttacatcggtgccgcgcgccttttgttttggatggtgggagagttccctgtagaacaggaaaagaacagaaagagaggggcacacaatgaaaaagcgtaatcgagttcttgcacttactatggcagctgccatgtcggccagcctgttagcaggctgcggttccagcacccagcagggtggggcggctgcttccagtgaggctttggccagcaccaccgccgcagcggatggcgaggaagataacatcattcgtgtgggcgttgtctgctccatgaccggcggctcagccatctacggtgagggcgcacagaacgccattgatatggccgttgaggagatcaacggcggggactccggctataagatcgaaatcgtcaacggcggtaaggtcgctgacgatgccaaggacgccaagcaggcgatgaatgcctacaacaaggtcatggcggattcgcccgaggccatcgtcggcagcttcttctcctcggtcacgctgcccatggcagagcaggcctccaaggacggtatgctgcttctggcgaccggcgcaaccaacgccgatgtcaccttaaaaggcgacaccatcttccgcaactgcttcatcgacccgtatcagggcaagatggcggcgctgtttgccaaggataagggctttaccaaggtggcagtcatctacgccaaggacgatgactactccaacggcctgaaggatgcatttattaaaaactgcgaggccaacggcattgaggttgcctacaccggtgagtgcatgaccaccgacaccgattattcttcgcaggcggcacaggccgtggccagcggtgcagagcttttgtattatccctgcttcctcgacactgttccgctgttggttggtgcagcccgcaatgcaggcttcaccggtgccatcatgggcggtgacggctgggatggttccgacaccaccggtcttgccgcacagtttgaggattgctactttacgaaccactactccagcgaggatacagccccggctgtccagaacttcgtgcagaagtacacggaaaagtacggcaccgaaagcctgaacgcctgtgcagcgctgtattatgacgctatgtacatgctggtgcaggccgccgagaatgcaggcggcaccgacacggccagccttgtcaagggcatgaccggcatgagctttaccggtgtcggcggcgacatcacgctggacgagaacggcgacgctatcaagagcattgccgtcaacaccttcgtggacggcgcggtcaagtggaccgaaacgcttggctcggacggcgcggtcgtttccaaggcagactaaaagagaatatatcgcacctcggcgggggaaaaccacccccgcccctgtgtgtttagaaaaggggaatggaccacaatgactttctcactgttttttcaaagtttgataaacggtctgaaccagggcgcgatctacgcactgattgccctaggctacacaatggtttacggcatcatccgcatgatcaacttcgcccatggtgattttatcatgatcggtgcctacacactgttttataccatcccgcttatggtcaacgcgggtatgcccgcctggctggcggtcatcatcgccattgcggtctgtgccgtggtcggcgtgctggtcgagattttggcttaccgcccggtgcgcaaggccggccctatgtccgccctgattacggccctggccatgagcatctttttggaaaatctggccatggtgctgttcggcgccaagccccataacgtgcaggccatcttcagcctgcccaccatcacggtcggcactgtggcgctgccgttgaacgtgctgcttaccatcgccatcggcctgggcatcatgatcgccttgcagctttttgttaagaaaaccaagctcggcaaagcgatgcgcgctgtgccgcaggataaggacgcgtccactctcgtgggcatcaacgtcaacaagatcatcaccacaacgtttgccatcggttccggtttggcagcggtggcggcgcttatgtactgcgccacctatccccgcgtcaccaacgatatgggttcgatgatgggcatgaaagccttcattgcagccgtcctcggcggcatcggcatcatccccggtgcgatgctgggcggtatcctgattggtctgattgagatttttgtcaagctgtttgcccccggttggtacgaggctgtgacctacgggaccctgatcgtcatcctgctggtcaagccttccggcatcctgggcaagaacgtcggcgagaaagtgtaagggagcgtgaacaagatgacgaaacgacggctggcctcctatggcctgaacttggttggcgtcgcgctgctgtatgcgctgatcacgctggcatttacctttaacgcttttggcaaaagcactacctacatccagggcatctgcaccaccgcctgctataccattatcatggtcacgtcgttgaacctggtggttggctttatgggcgaattctcgatgggccacgcgggctttgtctcggtgggggcctatgtttccgctatcgtttccggtgcgttggccgggcatggcctgtcggacttggcgttgctgctggtcgctattttggcgggcggcctggccgccggcatcatgggcgtggccgtcggcatcccggcgctgcgcctgcggggcgactacctcgccatcgtcacaatggcttttgccgagatcatccgcgtctgcttctgcaacttttccatcaccggcggcggcaaaacgatgagcggcatcctcaagctttctacctttgaccgtgcgttctggatcatggtcgtctgcgtgaccgtcatgttcctgtttgtacgcagccgcttcggccgcaccgtgcaggccatccgcgaggattatatcgcggcctcggcctccggtatcaacgtcacctattataaggttcttaccttcgccatttcggccttcttcgcaggcattggcggcggcgtttacgcccattacatgaccgccatgatccccaccaacttcaactttaactattcggcagagctgctctccgaggtcatcatcggcggcactggctcgctgactggctccatcatcggcgcggcgttcctgtccagtctgccggagctgatgcgtgatttctccacctaccgcatgctggcctactcgatcgtgctggtgctggtcatgctcttccgtcccggcggtatctttggccggtgggagttcagcctgaaccgcctgctggacggtatccgtcaccccaaagaaaaagctgcgaaaggagcgtgaccctctatggcagcacccgtattgaaagcgcaacacatgggcatccagttcggcggcttaaaagccgtggatgattttaatatggaaatcggagagtccgagctggtcgggcttatcggccccaacggcgccggcaagactaccgtgttcaaccttattaccggcgtctataagcctaccgagggctcgttctacctttgcggcgagcggatggacggaaaaaagacctaccagatcgtccacgcaggcattgcccgcaccttccagaacattcgcctgttcaaaaaaatgacggtcatcgagaatgtcaagaccgccatgcaggcccacaccacctacagcctgaccgatgccatcttccgcaccaaaaagtactggcagcaggaggccgagatcaccgagcgggccaaagaactgctcaaagtcgtccacctttctggcaaggaagacctggaggccgacaacctgccctatggtgagcagcgccgcctggagatcgcccgtgcgctggccaccgatatgaagctgctgctcctcgatgaaccggcggcgggcatgaaccccaccgagaccgaggaactgctggagatcatcaactacatccgcaatgaatttaaagtgtccgtcctgctgatcgagcatgatatgagcctggtcatgaagatctgtgagcgcatccaagtgctggatttcggcaccaccatcgcctccggcacaccggagcagatcgccaacgacccccatgtcatcgaggcttatctgggcaaggacgagccggaggaggccgccaatgcttgagatcaaagacctgcatgtcaactacggtgccgtccacgcactgaacggcgtatccatgacggtaaacgacggcgagatcgtctccctcatcggtgccaacggcgcgggcaaaaccaccacgctgcgcaccatcaccgggctggaaaaagccgccagcgggtccatcacctttgatggccacgacctgcgcaagaccgaacccagcaagatcattacgctaaagctggcgcatgtgccggaaggtcggcacatcttcccccagatgacggtggaagagaacctggagatgggagctttcacggatcctgccgatatggccaaaacgatggccgatgtctacgagcggttcccccgcttgaaagagcgcaaacgccagctggcaggcaccctttccggcggtgagcagcagatgctggccgtgggccgagccctgatgggaaagcccaagatgattctgatggatgagccgtctatgggcctgtccccgctgctggtcaaggagattttcgagatcatcaaggaagtcaacaaacagggcatcacgatcctgttggtggagcagaacgctaaaatggcgctggccatctcggaccgcgcctacgtgttggagaccggcaccatcaccatcgaaggcgatgcccagcaactgctgaatgatccccgtgtgaaaaaggcctacctgggccagtaaaggagggcacgccatgtatccgaattatccctacttcgccgtggccatcacccgcacctgcgggtcgggcggcggcagttacatcggcaaaaagctggcgaaggattttgacattgatctctacgaccgcaagctgctgcgcctggcagccgaggacagcggcatcaacgaaaagatctttgccgccgccgatgaaaacaccaggaaaacgctactctaccgtgtatcccagcatgtctacgacggcagctttatcccaccggagagcggcaacttcatcagcgaccaaaacctgttcaactaccaggctaaggtcctgcgggaactgctgaacaatgaaagctatatctgtgtaggccgcgcggcagactttgtactgaaggataagcccaatgtcctcaccgtctacatcgatgccccttacgaggaccgcatcgaccgggagatgaagcgccagggcatcggccgcagccaggccatccgctacatcgacaagctggaccactaccgggagagttactacaaatatcacaccggccgccagtggaagcgggtagaaaactacgacctctgcctggacagcgccgccattgggctggacaactgcgtagaggtcatcaaaaaagtcatcgagctgaaatttggggtgaaatgcccgcagtaaaacttggaaaaacgcccgctatcataaaacaggggaggaaagagttatggaagcacttgcatattacgatggaaagatcggcacgccggaagaattgatggtcccgttcaacgaccgcgtacatttctttggcgatggcgtctatgatgccaccgtcggtgccaatggcaaggtgtacctgatgcaggaccacctcgaccgcttctataccagtgccaaggcgctggatattcacatcccgatgccgaaagaggaactgggcaagctgctgaccgacctgctggccaaggtggatggcaccacccacttcgtctactggcaggtcacccgcggcgttgagacccgcaaccacgtctacgccgaggatctgcccggcaagctgtgggtgtccatccgacccaaccacctgaacgatcccgatgtgcccatcaagctggacaccgccgaagacacccgtttttatcactgcaacatcaaaacgctgaacctgctgcccagtgtagttgccgcccagcacgccaagcgcatcggcgtacaggagaccgtgttccatcgtggcgacatcgtgaccgagtgcgctcactccaatgtgtctatcctgaaagatggtgtcttctactcccaccccaacgatgagttcatcctgcggggcatcgccaagacccacatgatccaggcctgctaccggctgggcatcacggtcatggaaaagtgctttacgttggatgatttgaaaaacgccgatgaaattatcgtgacctcctcctccaacttctgcctgcatgcctgcgaggtggatggtcagcctgcaggtggcaaggaccccgccatgctcaaggccatccaggacgaggtgctgcgcgagtactttgcctacaccgggaaaaccaccgtggtagattgaacagggggtggaccgcatgacccgcgatgaactggaaaaacgcaacgtaggcgaaaacctcgatgcgctgatgaacctcgacccccgcggctacggtgtctgccgcattttgtatgcaggcagccgcgccttcaccggcgagccgctgacgatgcacgccgcccaggtgttgtacgacagcgtaaaagaaaacgacctggtgtacattttggttggatttgttctgctgccacaccgtgtgccggagatggacggcacggtcagcgccatgctgctggcccgcgcactggtcatggcattcaacgccaagccggtcatcgtctgccccagcgacagtgtgcaggccattgaaaagtgcgccgccgtggtgggcctgcatatttacgaagacctggacaccgtgcaggaattgccactgagcatgggcgtggtggcctttactaaggataaggccgccgcccccgcccaggccgccaagctggccgcccgtaaacctgcggcggtcgtctcggtggaagccagcggtgccaacactttgggtgtttaccacaatgccgtgggcaaggatgtgactgagatgcaggccaagagtgaagctctctgggatctgctgcgtacccagggcgtgcccaacattgccattggcgatctgggcaacgagatcggcatgggcaccattgctgaccatatcaaaaagtacgtgccctttaccgacaaaggcgagtgccagtgcggctgcggcgggggcattttaagcgccaccaaagccgataacatcatcacggccacctgttctgactggggatgctacgggttgatggcggcgctggcgtaccttaaaaaggatatggagattctgcaccacgaggagatggaatccgaagtgatgcgggtggctgcgcgcaatggttttatcgatatgaccggctcgctgctgccgggcatcgacggtttcagcacccggatgaacgtgggcatcgtcagtttgatgcgccagtgcacggcctacgcggtgcggttctcccacaactcggatcactggttcggcccggtgctggcaaagcatttctttgattgatttcgcggaaagggggcggcggccatgctgccgtttacggtacacccggtgggggacagcgccctgctggcagtttttacgcagcgcattgcgccggagatcggcgcggccgtggcggcgctgaacacccgcgttctgtccgccaacatctccggcgtggacgagaccgtgcccgcctttgcctcgctgatggtcacctacgacccattggtgaccgactatgatgccgtggccgccgccatgcaaaagctggccgatgtccctgatgcggacagcaccgccgagaacggcaagcttgtcacgatccctgtctgctatggcggcgagtttggccccgacctgtcctttgtggcccggcacgcgggtctgaccgagcaggaggtcatcgccctgcacacagggcgggattaccgcatttatatgctgggctttctgcccggcttcccgtatctgggcgggctggatgaacggctgtttaccccgcggttgggtacgccgcgcacagcgatccctgctggatcagtgggaatcggcggcgaacagaccggcatctatcccattgccagcccgggcggctggcagctcatcggccgcacgccgctcaaactgtttgacccggctgcgggcacgctgccctatgcggcgggcgaccacatccggtttacgcccatcacaaaagcagaatttaatgccctggcgcaaaaggagggggcggtatgagcctgaaagtgctggaccccggcccgctgactaccgtgcaggacgcaggccgcaccggctatgccgccaaaggctatcgcgtctgcggcgcggcggacagctacgcctaccgtttgggtaacatgctgatcggcaacacaccgggcgcggcggtgctggaatgtaccctgcggggcgcagccctgcaatttgaaaccgacaccgtttttgccttaaccggggccgtaagccctgccgcgctggacggtgtacctgtgccgtactacgcaccgctgtttgccaaagcgggcagtacgctgcaaatgggcatggcatccaccggcctgcgcagttatcttgccgtgggcggcggcatagccaccctgccggtgctgggcagccgcgccaccgatttgaaatgctgcatcggcgggttggatggccgcaagctggccaaaggagataccctgcctaccgggctgtgtgatacgacggccttatggcaaaaaatcatcacccgccatctggaccgcctcttgcaagatacctgtatcactaccgccctgcatcccgtgcgcacacttggtacgcaaacttttccgttgctgcgtgccgtgcccggcccgcaggatgccgcttttacctccgctggcctgcacatctttacccatggtgtgtaccagctgactcctaactgtgaccgcatggcctgcaagctggccgggcctgccatcgagatgaaatacggcgcggacatcctgtctgacggcatcgcggcaggctcggtacaaatttctgccgacagccaacccattgtgatgctgaccgaccaccagaccaccggcggttacgccaagattgccactgtcatctcggccgatctgcccgtactggcccagctgcgcccggggcaggcggtggcctttgctttcgtctcccccgcccaggctgtccgggccgcccgccggcaggcagcaattttacagcaaattgccgcgcgcctactataaataaagaggtgtatccccatgacctattccgccgccacccccgccgagatccgcgccatgattcgcacgggccagctcacggcccccaccaccggctactgcgatggctacgctcagggaaatctggtggtgctgcctaaagcgctggcgtgggacttcctgctgttttgccagcgcaaccccaaggcctgcccgctgctggaagttgccgatgccgggcagcgtagcttttcccagtttgcgccgggcagcgatattgcccgcgacatcccgcgctaccgcatttaccgaaacggcgagctggctgaggaaaccaccgatgtgacgcactattttgaagaacggaacgatttggtcagtttcctcatcgggtgcagcttctcttttgagtcggcgcttctcgaagctgacattcccgtgcgccagatcgaagagggcgtcaacgtacctatgtacaatacgaacattccctgcacaccggcgggggtgttcagcggcaatatggtggtcagcatgcggcctattccgtatgcccaggtgcccgcagcggtggccatcacggcgggcatgccccgcgtccacggcgcgccagttcaaattggtacgcccgaagccatcggcatcaccgacctggctcacccggactatggtgacgccgtcaccatccgccccggagagacgccggtgttctggccctgcggagtcacgccccaggcagtggtcatgcactccaaaccggcgttttgcatcacccatgcgccgggacatatgtttatcaccgatgtcaaaaataccgcgctgaaattttaaagggggctttgcaatgccgtccattgatttgaactgtgatttgggcgaaagctttggcgcctacaccatcggcatggatgccgagattctgccctacattacctcggccaacattgcctgcggttttcacgcaggcgatccgtccgtcatgcaaaaaagcgtgctgctgtgcaaaaagtatggtgtgcaggtgggtgcccatcccggcctgccggatctgcagggcttcggccgccgcaaaatggcgatttcgtccgccgaggcggaagcgggcgtgatgtaccaaatcggcgcactaaaggccttctgcgaagcagccggtgtgccgctgcaccacgtcaaaccccatggtgcgctgtacaatatggccgccaaggaccctgcgctggccgcggccatctgccgtgcggtgcaggccgcggcccccggtgcggtgctgctggcgctctccggcagtgagatggtcaaggccgcccacgccatcggtttgcccgtggccagcgaggtgttcgctgaccgcggctataagccggacggcaccctcgtgccccgcggaacccccggtgcgatgattacggacgaggacaccgccattgcgcgggtgctgcaaatggccaaacagggtaccgtccaggcagacgatggcagcacggtggcgctgcaggccgattcagtctgtgtccatggcgatggccccaaggcgctggcctttgtgcaaaagatctccgccgccctgcccgccgctggggtagagattaaagcgttttaatatattctaacactttgcgccggtctgcacaggccgacgcttttctttttatccgttatgcccttgcacttccccgcgcattgtgttatacttgctaccgtaaaattgaatacgacagcaggtgccttttgatgccgcattttgcgcatagaaaagggtaaaagggaagcaggtgcaaatcccgcacgatctcgtcactgtgataagggagcctgccgccagggtgcttttgcatcggtcactgggtgtttacccgggaaggcggcggtgggcgttgatctttcagccaggaaacctgcctgctgccgggtacgggggcaaacgccccagatcacgaggaattggttgtaccgtaaagaacctgttaaaagcacggggccttttgtgttgccattctgcatgcaaaaggcctcgttttttagtgggcctactctggtgtacgcctttttgtgtctgcggtcgtcctgccctgtaccgcccatcggttatatgagaaaggaagcagaacacatgagaagaatcaactggaaaaagcccgccgctgtggcagccgccctggccctgtccaccgcactgctggctggctgtggcagcaccgccgcttcttctgacagcatggccgaaagcaccaccgtcagcgagagcgagagcaccgcagaggaagccgaagaaggagatgctgacgaggtggccgcaaagaactgcgcagacctgatcgacgccatctacgtgcaggagcgcaccgatgacaccgacgcccagtgcgaagccgccaaggctgcctgggatgccctgaccgacacccagaaggaaatggtcgagggtgagaacgctgaccccgagtacttcggccgcgacaccggcgacgccagcaaggacgacccccgcaacgaagatgaaatcggcgagaacgagctgctggtcgtcagctttggcacctctttcaacggcagccgcgcggccgacatcaagggcatcgaggatgctctgcaggccgctaacccggattggtccgtccgtcgcgccttcaccgcccagatcatcatcaaccatgtccaggcccgtgacggcgagaagatcgacaacatggagcaggccctcgaccgcgctgttgccaacggtgtcaagaacctggtcgtccagcccacccatttgatgcacggcgccgagtacgacgagatgtgcgaagccatcgacgaatacaaggataagttcgagagcgtttccatcgccgagcccctgctgggcgaggttggcgctgatgccaccgtcatcaacgaggataaggaagccgtagccaccgccatcaccaccgaggccgtcaagaccgccggttatgaggatgccgcggctgctgccgccgatggcaccgctttcgtgttcatgggccatggcacttcccacaccgccaaggtcagctacagccagatgcagaccaccatggagaccctgggctatgacaacgtcttcatcggcaccgtcgagggcgagccggaggataccgcctgtgaggctgtcatcgagaaagtcaaggaagctggttataccaaggtcgtcctgcgcccgctgatggtcgttgccggtgaccacgccaacaatgatatggccggtgcggacgaggattcttggctgagccagttcaacgccgctggctgctttgacagcgtcgacacccagattgccggtctgggcgagattgctgacatccagcagatctacgttaatcacaccaaggcagccatggatgccctgaacggctgattttttacggcaacaccgcacaattcccgcccttcgggcttaagcatcgctccggcagctgcaaagcacaatctgcgttgcaaaaatgctcgagaatacacaaagtattctctgcgctttttgcttagcagcttgtacttttcgcttgccgtatcggcacttagaattatgcggtcttgccttacattctgcccgaaggggaaagccttcgggcagtttttggttttgcttacccttaatgcacgcatttataggggccgatgctcgtatcggcccggtgccgatattacccttgcagtatacgttgtaaacttaataaaattaataaaataaggtaggaaagtacacatgaaaaagttccagatcgtatccctgaccctggccgctgccctgctgctggcaggctgcggcgcatccgaatccgccgctgccagcgggagcagcagcgaggcggtctccaccgttgagaccgcccctgctgaaagtgagagcgagagcgaagcccccgccgccgaggctgccctgccggacgacatctacaccgcagactttaacaccgacagcagcatgttccacgtcaacgaagcctgcaatggcaagggcaccctgaccgtggaaaacggcgaaatgacgatgcacgtcagcctgcagtcccagaagatcgtcaacctgtatctgggtatggccgctgacgcccctgaccatgaggacgaatggctgcagcccaccatcgataccgtgacctactccgacggcacaagtgacgaagtttacggctttgacatccctgtcgcggctgtggacaccgacttccagctggctatcctgggcaccaagggtacctggtacgaccatgttgtcagcgtgtccaacgccgtgcccgctgtcgatggcggcgatgccgctgcggcggaagtccctgccgacggcacctacacctgcgctgtcacgctggagggcggcagcggccgcgctgctgtggacagccccgctgccctgaccgtagtcgacggtaccatgaccgccaccatcgtgtggagcagccccaactacgactacatgctcatcgacggcgaaaagtacctgcccaccaacactgagggcaactccacctttgagatccccgtggccgcgctggacactgccctggctgtcaccgccgacaccgttgcaatgagcaccccccatgagatcgattacaccttgacctttgacagcaccacgctggccgctgctgaatgaagcggcttataatgctggccgccctgcccgcgctgctgctggcagggtgcgcggcccagccagcggcctccggcacggagacgctgaccgtcaccggcagctaccccttgcagtacgcccagcagttcaccattgatgagtgcgagggcggctattacctcattaccatcgatggtacgcgctatctggtcgtgcctgagggggagaacgcgccagccgagctggatgcggacattaccgttttacagcagcctatcgagaatatttacctcgtgtcctcctccgccatggaccccatcatcagtatcgatgggctggatacggtggcgctttccggtacgcaggccgataactggtatctggatgcagccaaaaccgccatggaaaacggccagatcgcctacgcgggcaagtatagtgcgcccgattatgagacgattcttgccgccaactgcggcctggccatcgaaaacacgatgatctaccacacgcccgaagtgaaggaacagctggaaaaattcggggtgccggtgctggtggagcgctccagctacgagagcggccccctggcccggatggagtgggtcaagctgtacggtgtgctgctgggcaagactgaagaggccgagcaggtctttgacgacgccgtgcagcgcattgcaccgctggaaaatgaatccgccaccggcaaaaccgtggcgttcttctccatcacctccaataatctggccactgtgcgcaagggcggcgattatgtcgccaaaatgatcgagatggcgggcggcgactatgtcttctccgacctgacggacagcggcaacaacctggccaccgtcaacatttcgctggaggatttctacgccggggccaaggacgccgatgtgctgatctacaacagcaccatcgagggcgagatccgcacgatggacgagttgatcgccaaatgcccgctgctggcacagttcaaggccgtgcagcagggcaacgtctggtgcaccgcgcaaagccttttccagcaaagcatggagatgcccaacctgatcctggacatgaataaagtctttgccgagggcacacccgacgagagtgaattgaaatttttgacgaaaatcacctgataactaccccaaatgccgcttgcccaacactgtaggggccgatgcctgcatcggcccgcaggcgggcaatgcccgcctctacaagcaaaatgcaaaggataacaccatgcacacccgaaagcgcctgacaattgcatacctcgctatggcggcggctctgttggtgctgtttgccctcaacctgttttggggcagcgtggcgctttcgcccgccgatgtggtcaatgccctgctgggccgtgggcaggatgtactgaccagcaacattttgctgcagctgcgcctgccccgcgccgtcatggtcgttctgctgggggcagcgttatcggtggccgggtatctgctgcaaactttttttgccaaccccattgcggggcctttcgtcatgggcatttccagcggggccaagctggccgtggcgctgaccatggtggtgtttttaaaccgcggcctattaacgaactccctcaccttgattttggctgctttcgccggggctatggctgccatgctgtttgtgctggctgtggcacgccgcgtgcagcgtatgagcattttggtcatctgcggcgtcatgatcggttacatctgctccgccatcaccgatattgtggtggcctttgcccaggattccaacatcgtcaacctgcacaactggtctatgggaagcttctccggcatgacctggggcaatgttggcacggcggccgccattacgctgccctgcctggcggcggcgtttttactgtctaagcccatggccgcctaccagatgggtgaatcctacgccgccagcgtgggcgtttcggtgcgcagcttttcggtgttgctggtgctgctgtccagcctgctggcggcctgtgtcacagcatttgccgggccaatctctttcgtcggcattgcggtgccgcacctggtcaagcaggcgttaggcagcgccaagccgctgcatgtgctgccgggctgcgccttgggcggggcatcgttctgcctgctgtgtgacctgatcgcccgcagcctgtttgcgccgacggagctgtccatcagttcggtcacggcggtatttggtgcgccggtggtcatctggctgctggtgcgccaccacagcggggaggggacaacatgagctactgcgagacccaaagccttgccatcggctacggtgccccgctgctgcgggacatctctctgcaggccgagtgcggcaggattttggccttcatcggccccaacggtgcgggcaaatctaccttattaaaaacgctggccgggcagctggcgacccagagcggcgcggtattgctggacggaaaaacgctgaccacctacacccccaacgcacgcgcccgcaagctggcactgatgctgccccacatggcacgcaccgagctgaccacctgctttgacgtggccgccgctggccgctacccctacaccgggcgtctgggcatcctctcggatgaggataagcagcaggtgcgtgacgccctgcatctggtacaggcagacgaactggccgcgcgggatttcacaaaaatcagcgacggtcagcgccagcgcgtattgctggcccgggcggtctgccagcagccggaaatcttgctgctggacgagcctacgtcttttttggatgtaaaaggcaaggctgagctgatggctgttttgcaaaagctggcccacgagaagaatgtggccatcatcgtgaccctgcatgagctggaactggcccaaaagctggccgacgcggtcgtctgcgtttcgccacagggcgtttccggtgtacttacgcccaaagaggcgtttgcaagaaaaaatatctgccacctgttcgacctttcggacgagcagtacactgccctgtttagcgaaaagcccaaacctaaatttgagcattacatccgcagcgggcaaaaactgctgcgctgcggctacaccaccggcacctgcgcagcgctgggggcggcgggggcggcccgtctgctgctgaccggccacacgccagaaagcgtcggcctgcgtacccccaagggcatcgtagtcgaggttgcaccccaattctgccgccgcacggcaaccggcgcggagtgcgccattgtaaaggatggcggagatgacattgatgccaccaccggcctgccggtcgttgccgaggttacgcttctgccttatgccccgcataccgtcaccatcgacggcggcgcaggcgtgggccgtgtgaccaaacccggcctggaccagcctgtgggcgcagcggccatcaaccacgtgccgcgccagatgattaccgaagcattattaaaagaagccgagaccgccggttacagcggcggcttctcggtgatcatccgcatcgagggcggcgaacaggccgctaagcgcacctttaacccgcgcctgggggtcgaaggcggcctgtcggtgctgggcaccagcggcattgtggagccgatgagccagcaggcgctgctggattcgttgcaactggaaatccaccaggccgccctgcacagccgccgcctgattctggcccccggcaactatgggctggattacctggcccaaaactacccggaactgcatgagatccctattgtaaaagtctccaatttcattggggaagcgttggatatggccgcagcagaacattttgcggaagtcctccttgtcggccatgtgggcaagctggtcaagctggcgggcggaatcatgaacacccactccaagcaggccgattgccgcaccgagctgttctgtacccatgcggcactctgtggggcggatacggcaacctgccgcgccctgatggatgccgctaccaccgacgcatgcctggatattttaaccgctgccaacctgaaaaaaaccgtaatggcaagcctgctgcaggccatccaactgcatctggaccgccgcgcggcggaagccttcacggtaggggcggtacttttctccaaccaaagcggcccgctgggccagacccaacaggccgaaaaactgctgcaaagctggaaaggaaactgacatggtacattttgtgggggcgggccccggcgcaccggatcttatcactcagcgcggcgcggctctgctgcagacggcggattgcatcatctacgcgggcagcctggtcaacccggccctgctggggctggccaaggcggattgcaccatctacaacagcgccgaaatgacgctggagcaggtgctggccgtgatgcgcaaaaacgaagcagcgcacaaaatcacggtgcgcctgcatacgggcgacccttgcctgtatggtgccatccgggagcagatggacgccctggacgccgacggcatcccctacgatgacacccccggcgtgtccagtttttgcggggcagccgcggccctgaacgccgaatataccctgcccggcgtgagccagacggtcatcatcacccgcatagagggccgtaccccggtgcccgagggcgagcgcctggccagcctagccgtgcatggggccactatggtcattttcctgtccattggtctggtggacaaagtgcaggccgcgcttttacagggggcttacaccgaggcgacccccgccgccgtggtttacaaagctacctggccggagcaaaagaccgtgcactgcaccgtgggcaccttggccgccagcacccgcgcggcaggcattaccaaaatcgcgctgatcgtggtgggggacttcctggccgcgcagtacgaccgcagcaagctttatgaccccacttttaccaccgaataccgcaaaggagcgccgcaatgacctgcgcgtatcttgcctttaccagcaaggggctggcgctggcccggaagcttgcggcggcccagcctggtgatgtggcccgcagcggcgaaaacggcgtgacccttgccaattggactgctgcgcagtttgcacaaagtgacgcaattgtttttgtgggggctgtcggcattgccgtgcgagccatcgcgcctcactgccgcagcaaggccaccgaccccgccgttgtagtgctggatgagtgcggccgctttgcgatcccactgctctccggccatctgggcggtgccaacgatctggcccgtcggctggcgaaagcatacggcgcggtgccggtcatcactaccgccaccgacgccaacggtgtgtttgccgtggatgagtgggccaagcaccagcactgccttgtggtagagccggcgcgcatcagaaaggtaagcagcgccctgctggcgggccgtaccgtgcgttttgccagtgattggccgatacagggcacaccgccagccggtgtggaaccggctggtgatgccgcacaggcaagttttgccctgacgataaccccgacgatgacgtccaacgccctgcacattatcccgcgtattgctgtattgggcatcggctgcaagcggggtacacctgccgacaagctggcggacgcatttgctgccttttgcgccgaaacgaaactggccccgcaaagcattgccgccgcggccagcattgacttaaaaaaggatgaacttggcctggcagaattcggccaaaagcagggctggctcgttaccttttataccgccgacgaactgcgcgccgtgccggggcagtttgcccattcagactttgtgcaaagcatcaccggcgtggataacgtctgcgagcgcgccgctgtgctggccgcaggcggccccgtgtgggcgcacaaatgggcgcgggacggtgtaacttttgccgtggcactacgcccctttaccccggattggagatggaacgatggctgacgcaatgttgtacgtggtgggccttggccccggcgacgcccgctacctgactgcccaggcgcaaaccgccttacaggccgccgacgtgctgtgcggctacacggtctatatcgacctggtgcgccccctgtacccggacaaagaagtgtataccaccggcatgacgaaggaaatcgaccgctgccgctgggcgctggagactgcgcaaagcggcaagacggtagcgttggtctgctccggcgatgcaggcgtgtacggcatggccagcccgctgctggaactggcacagggctacccaagcgtgacagtggagatcgtgcccggcctgacggcggccttaagcggcggcgcggtgctgggcgctccattggcgcacgatttctgtgtgatctctctttcggatcggctcacgccctggaccgtcatcgaaaagcggctggcctgcgcggcgatgggggacttctgtgcggcactgtacaacccgtcctccaagggccgggcagattatctgcaaaaagccgtgcggatcttactgcaaaacggcaaggcaccgcagacgatctgcggcatcgtgcgcaacattggccgcgaggggcaggctgctagcctgctgacgctggccgagctggaaaacacggcggtggacatgttcactaccgtgtacatcggcaacgcggccacccgggcgctgggcggcaaaatggtcacacccagggggtatcgcggcgtatgaaggtagtcattttcagcggcacgaccgagggacgggcgctttcccgcgccgtggccgcccttgggatagaagctacggtctgtgtggcaacagagttaggggctgaagagcaggggcgtacccccggcatcacagtgtgcactggccgcctggatgccgatgccatggcggcacttttgcagggcgcggccctctgcgtggatgccacccacccctatgccaccgaggctacccgcaacatctgcgcggcggctgcggcagtgggtgtggaatatcaccgcctgctgcgccccgccagtgacctgcctgcaggcagtgtggtgctgcaaaccgccgcccaggccgcggcgtacctggcgggcaaaccgggcaatatcctgctggccaccggcgctaaggaactgcccgcctttgcacctctggaccccgcacggctttacccccgcgtgttgcctacgctggcgggtattaccgcctgcgagacagcgggcatcccacaccgcaacattattgccatgcaggggccgtttacccgtgaattgaatgtggcggtcatgcgccaattccatattgcctatatggtcaccaaggatggcggcgcggcgggcggctttgcagagaaggcgcaggccgccgcccagtgcggtgtacagctgatcgtgctgcgccgccccgaggaacagggcgagaccgccgaaacgattttgcaacgatgcagggagcttttatgaaaatcacattggtcggcatgggcagcggcacccccggcagcctgacgatgcaggggctaaacgccctgcgggaagcggagcttattatcggtgcccgccgcctattggaaagcctgcccgatggttgcaccgggaaccgtgcgccgctttataagatcgaggagatctgcgcactgctgcgaacgaccgaagccgcccacgtggccgtggcctatagcggcgacaccggcttttactccggcgcatcggccttgtgccgtgcgctggatgcggcgggcctgtcctacatggtctgcccgggactttccagcgtgcagctgctggccgccgcgctgggctgcccctggcaggattggaagctggtcagcgcccacggctgtgcctgcaccccggccctggtgtgcagtgcagatacaccgacctttttcctgaccggcggcagcgagacacccgccaccctttgcgaaaaactaacgcaaagcagctgcgggaatgtgcaggcaacggtgggggaaaacctgggcaccgctgcccagcgccttgtgcgcggcacggcgcaggaacttgcccggcaggagtttgcggctttaagtgtgctgttggtggaaccttgccctgccttgcagcgccgcgtacccggcctgccggacgaagccttcatccgcggcaaaacgccgatgaccaagcaggaggtccgcgccgccgtactggccaaactggccgtgcgtcccggcgacatcttgtgggacgtgggcgcgggcaccggcagcgtcagcgtggagatggcgctggccgcccctgcgggccaggtctacgccgttgagtgtgatgccgatgcctgcgagctgatccgccggaaccgcgctaaattccatgccgaaaacctgcatctgaccgcaggcaaggcccccgaagtgctggtaaattggcccgccccggatgctgttttcatcggcggcagcaagggcaatctggcggccattatggatgcagcgctggtcgccaacccggccgtgcggctttgcatcagcgccattgcactggaaactttgcagcaggccatcgctgtactggcggcccacggtttgactgcccaggtcacgcagatcgccgtcagccgcagcaaagcggcgggcagcctgcacttgctgatggccaacaacccggtttttttaattgtgagggagtaacatgctgcagctggttttggcggcgccgcgctccggcagcggtaaaacgaccgccgcctgcgccctgttggcggcgctgcaggcgcggggggagtatccctgtgcctttaaatcggggccggattatattgacccgatgttccaccgcgccgtgctgggcgtggaaagccataaccttgacctgtttttctccatcccggctacggtgcgccgcctgtacgcccaaaacgcggcaggccatggcgcggcggtggtggaaggcgctatgggctattacgacggcctgggcggcaccagtgccaccgccagtgcttggcatctggcggacacgctgggtctgccggtgctgctggtggtgcggcccaagggtgccagcctgaccctggcggccgagctgcgggggctcatggcgttccgtacaccgcatcatctggcgggcatactgctcaatgattgcagcgaaactttgtacaaactgctggccccgatgttagaaaaggagaccagcctgccggtggtaggttacctgccgccgctgcaggaggctgccatcgagagccgccacctggggttgaaaaccgcaggggagattgcagacctgcagaataaaataaaaattttgtcggatgctgcacagaaaaccatcgattggccgcactttgccgccttgtttgattgccccgcgcctgccgcggccccgcgcaccgtgcccccggctaacgtgcgtattgctgtggcgcgggatgccgcgttctgctttacttacgccgaaacactggaagctttgcaggaaaaaggcgcggagctgtgctttttcagccccctgcaggatacggcactgccccccaatatcggcggcctgtacctgccgggcggctacccggaactgtatgctgcccagctggcagccaacaccgccatgcgcagcgccgtaaaaacggctgtggaaagcggcctgcctacggtggctgagtgcggcgggttcctctacctgggccaaacgctggaggatgcggacggcaaaacctaccccatggcgggtgttttgcccgggcaaggcgtaaaaattggccgcctggtacggttcggctatgccgcattgactgccaacgccgacagcatgttgtttgcggcaggggagaccctgccgatccacgagttccaccactgggattcgaccgccaacggcacggactttaccgctgtcaaaaccaacggtcgcagctgggcctgcggcttcgccaacgcacatttgtatgcgggatttccgcacctgtactggtcgggcacacccttgccgcaacgctttgtgaccgcggcctgccgctatataaaggaagaaccatgaccgaaaacgaactgaaaaccttattaaaaacggtgacgccgcctaataaagccgcccgtgccgccgcgcacgcccactgggccgcacttgccaaacccctgggcggtctgggccggctggaaacgatggtggaggatgccgccgccctgatggggacagagacgccggatcttgccaaccgtgccgtgctggtgctgtgcgccgataacggcgtggtggcccagggtgtcagccagacagacgccagcgtgacccgtacggtgctggaaaaccttgccgcccgccgtaccagcgtttgtcgcatggcagcggccgcccactgcgccgttgtgcctgtggatatgggcattgccggaacaccggtggccggggtcatcaactgccgcgtcgccctcggcacggcggacttcacccaaggcccggccatgtcccgcgctcaggctgtgcagtccatcgcctgcggtatcgagctggtacaggcgcaaaaacgccagggcgtacagatgttggccaccggtgagatgggcatcggcaacaccaccacctccagcgccgtggccagcgtactgttgggccgccctgtgcaggagatgaccggccgtggtgcgggactttccgacgaaggcttgcgccgcaagatcgatgctatccggcgcggcattgtcgttaaccgccccgatgcggccgacccgctgggcgtgttggcggccttgggcggctttgacatcgccggattgtgcggtgtatttttaggcggtgcactggaaaatgtacctatccttatggatggcttcatcagcggcgtggcggcgctgtgcgctgtgcggctgtgcccggctgcggccaaggctgcgtttgccagccatgtttccagcgagccggccgcccgcctggtactggaagaactcgataaaaaaccgcttatcaccgccaatctgcacttaggcgaaggcacaggcgcagtggccagcctgccgctgtgggatatggcccttgcggtctacaacggctgctattcgtttgccgagggcggcatcacgccgtacaccccgcaatgctgacgctggtcatcggcggctcggccagcgggaaaagcgcctttgcagagtcgctctgcctgcaaagccccctgccgcgcacctacctggctaccatgcaggtgtgggacgctgagtgtgctgcccgtgtggcccggcaccgcgccatgcgggcgcaaaaacagtttgacacggtggagtgcccactgcatcttgatcggctgattttgccccggcgcggtacagtgctgctggaggacctgggcaatttaacggccaacgaactctacgcccccgacggcgcaggggagaaaacggctgatgccgttgtaaacggccttgcaaaactggccgcgcagtgcgataatttgattgttgtatccaacgaggtctttcgcggtggggccaactatgccggcgataccgaccgctacctgctggcgctggcacagatcaacaacgcaaccgctacccgtgccgacgccgtggtgcgggttgtatgcggcatcccacgttattataaagggggctaaacccatgacagctttgcagacgatcgcggtggcgttcgccatgttttcggcgctgccgatgccgcagtttgcctggaacgagaaaaacatgcggtacgctctctgcgcatttccgctcatcggcgtggtgatcggcgcgctgtggtgcctgtgcggtgccctgcctttgccggattttgcccgcgcggcagggttctgcctgatgccggtgtgggtcacgggcggcatccatctggacggctacgccgacacctgcgatgccctttccagctacggcgacaccgccaaaaagctggaaattttaaaggacccccactgcggtgcgttcgctgttatccggctgtgcagttactttatagcctacttggctctgtgtgtctgcgtgcagtttaccccgcgcgtgggtgtgttgtggacattagcactggtgggggagcgggcgctctccgggctggcggtggcagcgttccccatggcaaaaaacaccggcctggcccatacttttgccacggcggcggataaaaccaacgtgcgccgcgtgttgacggtgctctgtgtgctgctgggcgaggccctcgtcgctttgggcggctgggcactggtgctggcggcctgtgccgtgtttgtacggtactaccacgcagccaaaaaccagttcggcggcactacgggtgacctggccgggtggtttttgcaaaaatgtgagatctggatgctggcggcgctggccgcctgccaatggctgggggtgctgtaaatgctttttgttaccggacccctttacagcgataaacgcgcgtttgcccaaaagttcggcggacggcagatttgtgatgtgcaaaatctggccgccaacgccacggatctagaaaaactggccgacgaactggccgcctatgatgtggtcatcgccaccgaaattggcggcggcatcgtgcccatcgacccggccgagcgcgccgcgcgggaagccgccggccgtctggcctgcctgctggccgcgcgggcaagctgcgtggtggaaatgttctgcggcctgcccacggtattgaaaggagaactgccggaatgttgatttatttactgcgccacggtctgaccgagtacaacgcccaaaagcgctaccagggccagcgggacatcccgctttcgcccgagggcctggcccagctgcgctgcgccgatattgacccgaaggtcgtctatatttccacgctgcagcgcacagcccagacggcgaaggtactgttccccaaggcaaagcttgtgccggtggacgggctgaaagaaatgtgcttcggcagttttgaggggcgcaattacgtggagatggagcacgatcctgactatcaggcctgggtcgccgccaactgcgaaagctcctgcccggacggtgagcgcaaggatgaattctcggaccgtatctgcaagacttttgcggcgctggtggacaaggcgctggcggacggtgaggacatgctggtgattttggcccatggcggtacccagatggccgcgctggagcgttacgccctgccccaacgaggctactacaagtggtgcggccccaacgcgggcggctatgtgctggatgcacgcgattgggccgcgcagcacgtactgcacctggtcaagaccgtgcagtacaccaaggagagtatatgctgatattttgggcggtgctgggcggttttgtgctggatgccatttttgcggacccggcctggctgcctcacccggtggtgctgatgggccggtgcatctcggcactggaaaaacgcctgcgcgccgccctgcccacaacaccgcagggcgagctgctgggcgggggtatcgtggctgctgtgctgccgctgggcactctgctggtcaccggcgcggcctgctggctggcggccaaactgcacccggcgctggggctggccctgcaaatgttctggtgcgggcaggcccttgcggccaaaggccttaagcaggaaagcatgaacgtgtataaggaactgcaaaaaggcgacctgcctgctgcccgcaaggcggtggcccgcatcgtgggacgcgatacccaaagcctgactgccgaaggcgtgaccaaagcggcggtggagactgtggccgagaacgccagcgacggcgtcattgctccgctgttctacatgctgatcggcggtgcaccgctggcgctgacctacaaagccatcaatacgatggacagcatgctgggctataaaaacgagaagtatctctattttggacgctgtgccgctaaactggacgacgtggccaactggcagcccagccgcctggccgggttgttgtgggtggccgctgcggccctgaccgggggcagcgccgccggtgcgtggaaaatttggcgccgggaccgacgcaaccacgccagccccaacagcgcccagactgagagcgcctgcgccggggcgctgggtgtgcagctggcaggcccggcctactattttggcgaatattacaataagccgacgatcggcgacccgctgcggcccattgagccgcaggacatcgtgcgggccaaccgcatgatgtacgccgaaagcctgctggccctggcactggggctggcggtgcggctgctttttgttttgtgagggaatgcagatgaaactggtacatggcggcgattgggccggctaccggactgagtttggccgggacgcgctggatttttcggccaacgtcagcccgctggggctgcctgcgggggtggcggcggccatcgcggcggcactgcccacggcagaccgctacccagaccccctttgccgggaactgcgggccaagctggccgtggccgaggatgtgcccgccgattggctgttgtgcggcaacggcgcggcggatttgatcttccgccttgctttggctgtccgcccgcgccgcgccctgctgcctgcgcccacctttgccgagtacgcggcggcgctggatacggtcggctgtgaagttacgcggtttacgctggatgccgccaacgatttcgcagtgacggatgcctttatcaacgctgtaacgccggaaacagacatggtgtttctctgccagcctaacaaccccacggggcaggtaacgccgcccgcactggtagaaaagctgctgcaccgctgtgccgcctgcggggccgctctggtagtggatgaatgctttttggactttttgtccgaccgggacactttgactgcaaaaacatttttacacgaggcaacgaatcttatcatcttaaaagcttttaccaaactctacgccatggcgggcgtccgtttgggctatgcactgtgcagcaacgccgatctgttagccaaaatgcaggcggcgggtcagccttgggctgtgtccagcctggcccaggccgcgggcattgcagcgttgcaggagaccgcttacgccgatgccgtccgtgccctgattgctgaccaacgccccaaaatggcggcaggcctgcgggcgctggggctgtatgtcatcgatgggcaggccaactatctgctgtttaaggcaccggctgattttggcgaagctctgcgccagcacggcgcagtagtgcgcagctgcgctaattatccggggctggacgctgcctggtaccgcaccgctgtgcgcacggcagctgagaatgaccaactgctgcaaatcatgggggaggtgctggcatgagcagcgcaaaatgcatcatggtgcagggcacgatgagcggtgcgggcaagagcctgttgtgcgcggcgctctgccgtatttttgcccaggacggctacaaaactgcccccttcaaaagccagaacatggcgctgaacagctttgtcacccgggatggcctggaaatgggccgtgcccaggtggtgcaggcccaggccgcgggcgtggagccggacgtgcggatgaaccccatcctgctcaagcccagcagcgacatcggcagccaggtcatcgttaatggcgaggtgcggggcaacatgcccgccaaggagtatttccgccacaagcgtgccctgatccccgacattttgcaggcctacaacagcctggccgaggagtttgacatcattgttatcgagggcgcaggcagcccggctgagatcaacctgaaagctgatgacatcgtcaatatgggcctggccaagctggtggacgcgccggtgctgttggccggcgacatcgaccgcggcggcgtgtttgcccagctgtacggcacggtggaactgctggagccggaggagcgggcacgcatacaagggcttgtcatcaacaaattccgtggggacgtggaaattttgcgcccaggcttgtcgatgctggaagaaaagacacacctgcccgtggtgggcgtggtgccctatttaaaggtggatattgaggacgaggactccctctctgaccgcctacagcagaaaaacgccgtcaagccgctggatgtggcgattttacgcctgccccatatctccaactttaccgattttatgccgctggaacagcaccccctgctgggcgtgcgctacgtgcagaccacgcgggagctgggcgcgccggacctggtgattctgcccggcaccaaaaacactatggacgacctgctctggctgcggcaatccgggctggaagccgctgtgcaaaagctggcggcgggtggcacgccggtgctgggcgtctgcggcggctaccagatgttggggaaaacgctggatgattccactggcaccgagagcggccatccccagactctgcgcggcctgggcctgctgccgacccggacggttttcaccaacgaaaaacgccgcactcaatccacagccacaaccgccgccccctttgcaggggcggaactcgccggctacgagatccataccggccgtacatctatacaggagcagggcgcacccttttgcaccctggcggacggcacgcccgagggctgcgtgcagggcaatgtgttcggcacctacctgcacggcctgtttgacagcggcgagctgaccgagcggctggccgaactgctttgccgccgcaagggcattgccatggaaagcgctgcgcccatcacgatgcaggcctaccgcgaacagcagtttgacctgctggccgatggcgtgcgccatgccctggacatgcccgccgtctacgccgccatggggctgaccggcccaaaggaggaacgcacatgaccccgcagcatcacctgcccgccgatattgagcgcaccagcatgagcatcatcaccgaggaactggcccagcgtaggctggaggtcccgccggagaatgcggcggtcgtcaagcgggtcatccatactacggccgatttcgactacgcgcaaaacttgcactttacccccgctgcggtggcagcaggcattgccgccatgcacgagggcgtgaccatcatcaccgataccaacatggcgctggcgggcatcaccaagccgggccttgccaagctgggcgggcaggccgtgtgctttatggccgaccccgccgtggcggctgccgccaaagaagctggcaccacccgcgccgtagctgccatgcacaaggccgcgcaggaatacccccgcgcggtgctggccgtgggcaacgcccccacggccctgctggccattaccgaggaaatcgaaaacggtctgcgtcccgcgctggtcattggtgtgcccgttggctttgtcaatgtagtggaaagcaaggaacggctgtttgccacatgcgggcagtacggtgtcccggccattgtggctatgggacgcaagggcggcagcaacgtggcggcggccatctgcaatgcgctgctctatcaggctgccgaaatgttggaccccaaggcccgcggctggcagtaagaaacaacaggggaggggacaccgtcatgtatgtggattgggactactacaaaatcttttactacgtggccaagtaccaaaactttaccaaggctgcccgcgtgctgggcagcaaccagcccaacatcacccatacgatgaacaagttggaagaccagctgcattgcgtgctgttcatccgctccaatcggggcgtcacgctgacgccggagggcgagaacctttacgcccgcatctcctccgccgctgtgcagatccaggatgccgaggaggagttgagcgccagcgccagcctttcccacggcgcgatcagcatcagcgctaccgagaccgcgttgaacatctatctgtcggagcagctgcggggctttcacgcccggtaccccggcatccggctgcgcatcacgaaccactccaccctgcaggccgtgcaggcggtaaaaaacggcgaggtagactttgccgtcgttaccacccctgccgagaccagcagtgacttgaaacgggtcgcgctgatgcccttcaacgagattttggtcggcggccccagctttgccgagttggccgggcgcaccctcgccctgcaggagttgaccgcctacccgctcatcatgctggaaaacggaagtatgagccgcatcttctatcgccagtttttcttagagcataacgccgagctgaaacccgacatcgaagccggcaccaccgaccaaatgctgacgctggtgcgcagtgacctgggcctggcctttgtgccggagccgatggcccgcggcaacctgcatcgcaagcgcattttgcagatgaatttgcaggaggctatcccgtcccgctcggtttgcctggtctacgacccccgccgcccgctaaataccgccgcgcgggagttccgccaccagctgttggaatcagcgaaaaacaaacaaaagtaaacaaaaagccagccgcgcctgcatcgctgtgcacacgatacaggcgcggttggctttccttgctttttgggggtaacagggttaggaacgcaacacgctctgcaggctttccagggctgcaaggcgtgcgctgatggcaaatacactggcggcgtgggtcaactcttctgaccgcgcgtccgcaggaatgatacgcgccaatacggtgctgtggtcgatggcatcgaaccggacacccgcctggcggcaaagctctacagtacgggaggcacagcccggcatggtagccagggcggcaaccgcatcctctaccggggcgggctgtgcagcgccggtatcgctgagttctttgcccagcaccgtgccgaaatgccgtgccgcgcggcggctttcgcttttgccaaaggtatcctcggcggtcatatccagctccagcggctcccgcacaaaatcagtatagcgccgggccagcttggtgtattcccgctgcaattctttcttcgttaactccgtataacgcatttttcccactcctctaccttttcaggtccaaggaccattatagcggggaccggcacctgtgtaaaatgtattatgcgtataactgatatacaaaatttgtataactgcacaccccggcaaaagtgtgctatactaaaaaccaaatcatgcatttatcataataaggagagtgtgaccatgaccttacagcagctgcggtacgtgaccgccattgcagaggccggcactttaagcgaagccgcccgccgcttttatattgcccagcccagcctgacggcctcgctgcgtgaactggaggaggagctgggcctgacgatcttccgccgcaccaaccgcggcgcggtgctgacgccggaaggtgaggaatttctcggctatgcgcggcaggtgctggcccagatggacttaatggaagaaaagtacctgggagcggcaccggtcaagcatcaattctgcgtgtccacccagcactactcctttgcagtggaagcctttgtggagctgctgcgggagtacggcggcccggagtacgacttccgcatccgcgagacccagacctacgagctgatcgaggatgtggccctattgcgcagcgaggtcggcgtgctttacttaaataaggataacgagaccgtcctgcgcaaggtcatccgggagcatgacctgcagtttacgccgctgtttacggccaagccgcatgtatttgtcagcgcgtccagcccgctggcggccaagcccgccgtcacgctggacgacctggccccatacccgcgcctttcctacgagcagggcgagcacaacgccttttatttttccgaagaaattttaagcacccgggacagcaaaaaagacatcctcgtcagcgaccgcgccacgctgttcaacctgctcatcggcctgaacggctataccatttgcagcggcgtcatcagtgagtcattgaacggtcccaatatcgtggccgtgcccctgctggtggatgatgctatgcaaatcggctacctgacccacaagcaggtccaaccggggctgtttggcaaacggtatattgagattttgcaaaggcacacagcgcaataaactgtagtatagttttaacctatatcaaacccacaaaagccgatattttacaacaagcgcatcgtgctgtatactgtacctatcaacaaacacaataaaatttcacatagagaggtacataactatggctacactgcgctccccgttccgttacgattttgtgggcagcttcctgcgtccgcaggctatcaagaccgcccgcgccgagttcaaggctggcgagatcacccgcgggcagctgaccgctgtggaaaatgaacaaatcaccctgctcatcgaaaagcaaaagcgcgccggctaccacgccatcaccgatggcgaattccgccgcagctattggcacctggactttatgtggggctttgccggtatcgacgagatcgagctggaccacggctactacttccagggagaggaaaccacccatggttccatccgcgtcagcggcaaaatcagcggcgaaaatcatccttttgtcgagcattacaagttcgttaaacagttcgaggacgagaactgcatcgcccgacagacgatgcctgctcccgcccagctgctggccgagctttaccgcgaggataacggcaaaaacaccgacgccgtttacccagaccatgagcagctgctgcaggacattgccgccgcctaccgcacggtcatccgtgacctgtacaatgcaggctgccgcagcatccagttcgacgactgcacttggggcatgttctgcgaccctaactatcaggcctttatcgcccaggcaggcgtcaagctggaagatcaggccaacgagtacctgcgcctgaacaatctggctttggagggccgccctgctgacttggctctgaccacccatgtctgccgcggcaactatcactccacctgggccagccgtggcggctacgctcccattgcacccatcctgtttgcccacgagaacgtggacgccttctacctggagttcgacgacgagcgctccggcaactttgagccgctgcagtacgtggctgagggcaaaaaagtcgtgctaggccttatcaccaccaagtctccgcggctggaggataaggctgccgtcatcgcccgcatccacgaagccgaaaagtacatcccgctggatcgcctctgcctcagcccgcagtgcggctttgcctcctgcgaaatcggcaacaagctgaccgacctcgagcagtggaacaaactcaaactggtgaaagagattgctgaagaagtctggggtaagtaacagacacccccgaaactaaatacaaagccgcaccctgttgtccggcaaaactacccgacagcagggcgcactttgttatacagatattttatggatggcgaaagtgcagcgcgttttacagatcactgctttttagtttatcgatcagctttgcataaacgtgggtgacaaaccatggctcggtggactttgccaacgcttcttcaggcgtgaaccaggccacgccgctgttttcgtcttcctttatagatacggcctcatcggagtcggcctccaataggtaagtgacgtttaaatgcaggtggctggatacatactgcccctttttgacatgcccgtccacagtgagggattccagcgaatagatgtccggtgatacaggacgcacattggcaataccagcttcctctttgacttcccgcaaggctaccgccagcaggtctgtctcaccgtccgcgtgcccacccagccaggaccaggaattgtatatgttgtggtacaccaacagcaccttgcggcggtcccggttcaccacccaggccgaggcagttatgtgtgccaccttattctgccgcgtaaaggcgtcatcgtggtcctgtatccaatgcaggatcaattccctgtcggcggcctcctgctcattataaggtatataggcggcaatttggttcagcagtttctcacgtgtcatcttggcggcactcctttataataggtatatccccattataaagcagaaatccgccgtgtaaaccagatcatttgcgggaacaacaggcaaaatatgtactaatgttgtgaatatatgatgagcatcaaaataaaaccaccgcaaatagtatattttcatgagaatatccatcacatgtaagtttggaattcaattttgttgaaatttggaaaaatgtgttgacaaacgcttgcggcggtggtattatatacaagctgtccggcgggacacccccgtaaggacagcacagcaggaccttgaaaattgaacaaaactgaaacttgtggaaccttgaacgtgggtttggaaacccacgataatcaattccaaatttacaagtaattcatacaggacgcaagcgattgtgtctgagtgattacagagatttaacgcttttaaatggcgattaaataccatttataaagagtttgatcctggctcaggacgaacgctggcggcgcgcctaacacatgcaagtcgaacggagctgagaggagcttgcttttcttagcttagtggcgaacgggtgagtaacgcgtgagtaacctgccctggagtgggggacaacagttggaaacgactgctaataccgcataagcccacggtatcgcatggtactgagggaaaaggatttattcgcttcaggatggactcgcgtccaattagctagttggtgaggtaacgg

SEQ ID NO: 7811 - DNA, 2501 bp, Unknown
  gut microbiota DNA sequence
tcgtgcaattctcgatacgaattccagcagtgaggtcatagcagtgctgcggatgttctgctatccggcctcgctgttagatgccaccgacagtatgaattatctggacaacggcatccgtatcgtggacgaaaccggtcagaccgtctatgcccgcaacagcggtgtggatgctttggacgaagccgtgcgcctgttggccgaggatggcagcgagaccgccgcgcttgagcagggggtgctctataaaagccggatggaagtcagcggctggagcatttattactatctggacaaagcgaacatcacgaaagaattgcagccgattttgaatacaacgattttggtggtgttgatttgcctgttcctttccattgcagtcattaacctgttggctacagccctgacccgccgcatcctgaaattacaggagtacgcagaatatgtggcagaagggcatctggataaggaactttctaccacggataccgatgaaatcggcgtggtgacaaacagcatggggcagatgacgcaccggctgaatgatatgatccatcaggtctatacgatggagatcgaaaagaaagccagtgagctgcgcgccctacaggcgatgatcaacccacatttcctgtacaacagtctgtccaacatcaagtggaaggcgctgcgctccggcaatgatgacatcagcgagataacgggattgctggcaaaattctaccgcacctgcctgaacaacggtcagcctttaaccacggtgcgttcggagctggaaaacatcaaggcgtatgtgcgtatccaacagctgacccatgacaacggctttgatgccgaatacgacattgaggaaagccagcttgattaccggatgctcaacttcatgctgcagcccatcgtggaaaatgccgtcaagcacggcttagagtatgaagaggaggacggaaaagggcatatccgcatcgaatgccgcggcaaggatgagttcatcgtgttccgcgtcatcaacaatggcggcgctatcgacctgcaaaaggtaaccgaagtcatgcgcacccccggtacagggtacggtatttataatatctgtgagcgcattgagctgtattacggtcccggcagcggacttttcccctctatcacagaggacggcgagacctgcttcaccttaaaactgaaccgcacattggaaaaagaaacacccactgaagcctgattgcaccccaccgatacaatttctgtcggtggggtgttctgtaaaatagtgttagttttcgaaaaaatgttctatttcgcattttggacatttcgggtacaataaagccatcgaaagcagaacacactgcaaggaggaaaacaaacatgaaaaaagcaatcgcatccgtgctcgcagcgtcgatggctctgtccctcgccgcctgcggtggctcctctaccgccacctctagcagcaccgccactgagagcactgccagcagcactacggcagaaagcaccgcatccggtgacaaggttacgctgcgcatgacctactggaacagcgaggacaccgtcaaggcactgcttgactatctgggcgaggctgttcccgatgttcagatcgagtatcagttcatcgacaactccaactacgacaccatcgtggatacccagctttctgccggtgaaggtcccgacatcatctgcgaatctcccgcttctgccctgaagcacgcaaaacttggctatctggccgatgtgagcgacctcggcgcgaagttctctgatgccggcacttccgtttacagctatgacggcaagacttacgcattgcccggcatctcttggttcgagggcatctactacaatgttgatctgttcgagcagaacaacattgcactgcccaccacctttgacgagtatctggatgtctgcaagaagttccaagacctcggcatcaagccgctggctgccggtctgaaatcttgggagccgatgctgaagaactccatggcgtttgtcactgccgagtacctctccaccgatgagggtaaagacttcggcggcaaatatcgcgagggtcaggctactctgaacggcacttggaatccgtacctcgaaaagtggagcgagatgatcaccagcggtgtttacaccaccgatatgaccggtatggaccacgatcaggctctggaagagttcgccaccggcaatgccgctatgttctgctccggcccgtgggatctggaggccatccagtccaagaaccccgacctcaacctcaacatgatgcctttctacggcaccaaggccagcgccggctggctgatcggcggccccggctgcggcttcgccgttaacgagaacagcgccaacaaggaagcagccctcaaggttctggctgctatcgctaccgaggaaggtcagaaggccctgtgggagaacaaccagggtggctcctcctacatgagtggcgtttcctttgatctgcctgaggtctactccagcatttccaccgccat

SEQ ID NO: 7812 - DNA, 1257 bp, Unknown
  gut microbiota DNA sequence
ggaaccggctatgagcattaccggctccggggcacacggcatcatcgccaccatgccgctctatgcggcctacaaggtgcgcggctattccgaggaaatgctgctgcgcgccacggcattgagctatcttgtctgtatgtacatcaaggaatattccggtaagctgtccgcattctgcggctgtgccattgcggcgggtaccggcatggcctgcgggctggtgttgctgcggggcggcagtaccaaaactatggcgcataccatcaacaatttagcttccagtattaccggcatgatatgcgacggcggcaaccagggctgtaccatgaaaggcattgttgccgtggacgccgcgtggcaggcagtatcactggccgaaaagcaggcgtatatttacaatgtccacggaatcaacggcgcaacaccggaacagaccatgcgcaacatggggctgattgcctcccccggtatggtgggaacggaaaagacgattgtggagattttgcaggataaacaagcaaaggagtaacacagcatggaaaagcagagcaaggtctatcggacttacttacagattctgaaagaggaacttattccggcaatgggctgcaccgagccgatttccattgcctacgcggccgccaaagcgcgggaggttctgggctgtacgccggatatggtaaaaatcggtgtcagcaacaatatcattaaaaatgtcaagagcgtggttgttcccaacaccgatggcatgaaaggcattgaggccgcagccgcggcgggcattgtgggcggccatgccgacaaggcactggaagttatctcggaagtgacggcagagcagaaaggctccatgcgcagttttatgaaagaagtcccgatttcggtggaggccatcgacaacggctttatctttgatattatcgtggcactgtatcacggcgcggattctgcggtggtgcgcatttgccggtatcacacaaacattgtgtttatccagaaaaacaatgacattctgttggacaataccgcggcagaaagcaaaccggcctgcggcggcgataatcccgccgaggacggcctgtccgacaggaacctgctgacaatcgcggatattttcgactttgccaacacctgtgatacggcagacgtctgcccggtgctggatacccagattcagtacaacacccagatttccgaggaaggcttgctgggtgattacggtgccaacatcggttctaccatgctcaaattttatgg

SEQ ID NO: 7813 - DNA, 18181 bp, Unknown
  gut microbiota DNA sequence
taagccgtcaggcgggaattgtgcggtattgccttataaaagtaacttattatccgttatttgcaagctctgtttccagctggtcccacacggcgctgaaattgtaggggaactgctcgtcctcctcggccagccagcggcggtaggcgtccagctcggccactgccggggcttttacgcggcggtaggccgtgatggtgtagccgttgcccatgtcaaattctgccgccacctcaaagcagtgcagggtctcgacattctccaaaaaggcgctgttgatcttctcggtatggttgctggggtcaaagggcgtgcaggtcagcacgatctgtgccgtaaacagttctttcgggaaggcatcgttgcccgggttgaccgcaccgtaagccagaatggagcggatgctctcgtccggcagggccgccgcgcggaagacatcggcactgtaggttaggccgtggcagatcatgtaggcggagttgtccccctcgcagtttttccgcaggaagtcgttcacctcggcgatctgggccatatcggtgcgctcgttatcgatggtgaaaaacaggccgctgtaccacgcgccgggcagcttgataggcatcagctggctgcatcccgcaaagttgatagcgcaccccacgctgaccagcgcggccagggcgcggcgcagccatttgccgggcaggttcgccgccagcagagccagcatgtacagccccagcaggtaaaacggcgccaccgccagtgattggtggtcatccatgttctgcactttggtcacgagaaagacggtgagcaccgaaccaacggccgataatacagttagaaatcttgtttgttttttatacagtgcgtacaaaatcccgattacaaacaaaatcccaatgaaataccccaggtagacccgctggtggtccagctcggccaaaaagccgccggtctggtaggtggcgtagcggtcgctgtagtcggcctttacgatgcgccagaacatgggcaccagcggcacgcccacgcaaatcagcgatgtaacggcaaatctcacaaaacgaagggctgcggtcccctgcttttgcaatgcagcccgtaccagcacccacacgccgtacagtacaaaaaaggctaccacggtaaacatgtagctgcggcgggtcagcatcaacaggccggtaaaggcagccatgctcaccagccgcgccggggcaggggctgagaaatcatacccgatgcccagtgccagcagcatcagcgcaaaggccacacccagcaggtccggcatgccgcggtacagcgcaatatgcaaaagcggcagcagggtggtcatggccaggcccagcgcggtaaacaggcggggcgctttgggccggcactggcggcgcagcaccgccagcagcacccatgcgctgtaatagaccagcgtgggcaccaaaagcccgcacagcagcgcaaaggtgttggccgtgcgcggcgtgaacataaagaacggctcggccagcaaattgatgaccagcggcgcgtaatcattgaaccaggtcttatagatcgtcgaacctacgccggtaaatacgccgtctgcaaagttggattccagccggatctgcaggttatagtaggtggcattgtcccacaggtacaggctttgccgccccaccatagcgtgcaggtaaaaggcggcgctggccgcgatgcagatggccagcaccacggcgtcgaacttcgtcagccgggcatccagcgctttggccgcgcggcggtaaaggcaccaggtgcccagcaccgccgtgcaggagagcagcagcagccatacatccaccgggtgccgcccgctgcccagcatatcaatgccctgcagcgcgggcacaaagtgcgccacggtgctgcacacaaatttaacggcaaagatacacaacagaagcaggacggcccgctctgcacgggtcatcctgccgtaaaaattatgcagttttgtttggagtgttgatttttgcaaaacaatagctccttgatggttggattcagccgctccctattgtgggggtcgatgcgcgcatccgcccctgcagcagcaaaggtattacttcgcctgcataaacagctggcggttctgccacaggtagatgcagccggacagcagcgtggccgcgccgcacagccagcacagcaccacggtcaccaggctgaccacgcccacatcggtaggcccggccagcgcggcggcaaagtaatagaagatgatggtcaacatctgcagcacggtcttgaccttgccccacatattggcggcaatcaccgtgccggtctcggcggcaatcatccgcacacctgccaccgcaaactcgcggaacaagatcacggccagcacaatgggcgagcatacaccatccaccaccatataaataaaggcggcggtggtcaggcacttatcggccagcgggtccatgaacttgccaaaatcggtgaccagatggtttttccgggcaatataaccgtccaggaaatcggtgatgctggccacggtgaagataatgcccgctaccagcgagaaggtcgcgttaaaatccgccgtgccatacttggccagtgcggcaaacaccataaacaccggtaccaaaacaacacgcatcattgtaagtttattgggcagattcataccttagtcctccagcttttcttccacgtagccgtacaggtcgtaagtgtcagagtcagtgatggtcacgttatagaacgcgccggtctccagcggggtatcagcgggggtcagcacgttgccgtcgatttccgggcaatcggccttggagcgcagcagatacatgccggtctcgtcgtccacaccgtcgcagacacattccagcgtttggccgaccttttcgccttcgcgctcggcgctgacttcggcctgcagttccatgatatggtccgcgcggcgctgtttggtctcctcgtccagttggccgtccatcttggcggccacggtgttttcctcggccgagtaggcaaagcagcccaagcggtcaaacttcatcgtcttaacaaagtcgcacagctcggcgtactgctcctcggtctcgccggggaagcccgcgatcagcgtggtgcgcagcgtgatgccggggatggccttgcgcaggcggtggatggcgtcctcaatttccttgcggccgccgcggcggttcatcgccttcagcacggcgtcgtcgcaatgctggatgggcaggtccaggtacggcaccaccttggtgttgcggaccagcgcggcgataaattcatcggtgatacgttcaggataggcatacagcacacggatccagcggatgccgtcgatggcctgcagctcgtccagcagctggcaaaccgcgcccggcttgccccaatcctcgccataagcggtggggtcctgagcgaccagaatcagctccttgacgccttcccctgccagccagcgggcctcggccacgcaatctttaatttcacggctgcgcagcgggccgcggataagcgggatggcgcagtagtggcagcggttgttgcagccctcggcaatttttaagtacgcatagtggcgcggggtggagataacacgggcaccgcccaactgcatatcggtcttggggccgtagctctcggtctggcccgcaccggcagcgcaaaggcggcgcacgatggcaggcaacgcggcgttggagccaatgccgacaacggcgtcgacctcggggatctcctgcacgatctgctgcttatagcgctcggccaggcagccggtgacgacgaccttcaggtccgggttctgctgcttgtactggcaggccatcagaatgttttcgatggcttcggccttggcggactcgataaagccgcaggtgttgatgataatgatgtctgcttcggccgggtccgccacggtggtgtggccgtccttgatgagggcgtggcagaaaacgtcggcgtccacctggtttttggggcagccgagggagataatcgcaatcttcatagaacttcctttatatacagtatgtttttgcgctgtcaatcctccgccagcgcggcgcggatgacactgtggctgaacccgcggcgggccagcgcggccgctacctggtcccgcttgccggcggccagtttggcggcatagtgccgctccaccagggcgcgggcattggccagttcagggtcttcgccgtcatcggcttcggcatacagtgcttccacggcttcggcagcggtatcgcggtcgatacccttcgccgtcaggtccagcaaaatttcgcggcgggatttccgcttgcgcagcagctccgcggcacggcggcgggcaaaatcggcatcgttcaaaaggcccagttccccggcgcgcgccacagcgtaagcggcgctgtgctcgtcgaacttgcggcagagtttctggtacagttcccccgccgcatggtcccgcagcgagagataatccatggccttatccagcgcacggcgggtgtcgctctgcttgcgcaggtcctcgatctgccattcttccagcaggtcttcctcgtgcaggtcagccttggcaaaggtatctgcatcaagggagaaggcaaactcgccgtcaaaaaacagcgccatgcggccttttttcgtttccttgatttgtgtcagctggggcattattcatcaaccatgatgtccaggtctacctcactgccggtggtcttggcagcggggacggaggctgcggcaggggcttccccatcggcggccggcttaacgatttccgaggggtccagcggcttcacggtgccctttttaccggcggccagcaggcggtccgcattggcacgcacgatcttctcgatctcgtccgagatctccgggtgctctttcaggaagatcttggcattatcgcggccctggcccaggcggacatcgccgtagttgaaccaggcgccgctcttctgcacaacgcccagcttgacgcccaggtccaaaatctcaccgattttagagatgccctcgccgaacatgatgtcaaactcagcctcgcggaacggcggggccaccttgtttttcacgaccttggcgcgggtgcggttgccgatgaaggcgccggtggagtccttcaggccctcgatacggcgcacgtcgatacgcacgctggagtagtatttcagcgcgcggccgccggtggtgacctcggggctgccgtagaccacgccgaccttctcacgcagctggttgatgaagatgcagacggtgttcgtcttgccgataacgccggtcagcttacgcagagcctggctcatcaggcgggcctgcaggccgacatggctgtcgcccatctcgccctcgatttcggctttgggcaccatggcagcgaccgagtccacgatgatggcatcgatagcgccggagcgcaccagtgcttcgcagatctccatggcctgctcaccggtatccggctggctgaccagcaggctgtcaatgtctacgcccagcgcggcggcgtacacggggtccagcgcatgctcaacgtcgatgaacgcgacctcgccgcccatcttctgggcttcggccaggatgtgcagcgccagcgtagttttaccagaggattcggggccgtagacctcgatgatacggccgcggggcacaccgccgatacccagggccaggtccaggcccaggctgccggtggggatggcgtcgacctgcatggcgatgttggcgcccagcttcatcacagcgcctttgccaaactgtttttcgatctgcgccagggccgtttccagtgcctgcttcttgtcagaggccgggccgggggtcttgggtgtcgtatctttttttgctgccatggttttgctctccttttatctcaaaaacacaattgcaaggtagtacaggggtattatttcccagatgcacctattatacacgattttcacgtgcagtacaaccgtttgttgtgttttagtggtaccttaaacaggattttcaagcggttttcggaaaaaaactacccggtcattgccgcctgcatccttgcggcaggtgccagcctgccaaccggcagccttgcccagctccagcacagcctcggcctgggcgtagccgatctccagcaccagccagccgccggggcgcaccgcatcgtaatactggcgcaccagcacgcggtaaaagtccaggccgtccgcgccgccgtccagcgccatggccggctccctggcggtctcgggcattaaattctgcatctcgcgggccgtcaggtaaggcggattggagatgatgaggtcggcgctctccggctcgatctgggtatagtagttcatcacgtcgccgcgctcggcctgggtggccttgccgcccagcgccgccacattggcggtcaggtagggccaggcgtcatggctcaactccacgcaggtcaccttggcactgggcacagcgcgggcaatgcccaggcccaggcagccggtaccggcgcacaggtcgtagacgaccggggcctcgctgtccttcagcagctcgatggcggtctcgcagacgacctcgctgtcggcacgggggcaaagcacgccgcggccgaccttgagggtaaagtccagaaagtcccactcccccagcaggtattgcaggggttcgcggcccgcgcggcgctcggccagcacctgcaggcgggaggcttcctcggcggtggggccgtcgtccagcctgtggtcacggcctgtcacaaatgtatacaactgcgccgcgtcaaagcgggcatcgggcaccccggccatcatcagccgggcgcaaagtttttgatatgcagcgttcaccagcgggcttcctcctgattttcgggcagtaccggggtcactgccgcaatagcaacttcgatcatcgagtcgtccggctcaaaggtcgtcagcctctgcatccacagccccggctgggatacgatacgggacagcacgctgtgggagcggccggcccactttagaatttcatagcacacgcccactagcagcgggaacatgcacagcttgtacacgatgcgcagaccggtgctggtccagggcagcaccgcatacaaaaagatgctgatgataatgaccaagatcataaaactggtgccgcatcggggatggaaccggctctgcttgcggatgttttccacggtcagcggcaggcccgcctcgtagcaggcgatggtcttatgctcggcgccgtggtactcaaacacgcggtgcagttccttcatgcgggtacacaggaacatatataaaaggaagatggccattttcagcgcaccttctaaaatcacgcgcccccagcggcccagcgggataaagcggatgagctgcccggtcaaaaaggtgggcagaaaggtgaacaaaaacagcgccagcgccacaccggcaaaggcagcgcaggtcatcagcacgttctggaacaccgggccggtgtgctcgtccagccatttgtccagcttgctttccggctcggcgtcctcgacgccctccatagccacatcggcggcgtgcatcaggtacttgtagcctttgtacaggttctcggccatgttgcagacgccgcgcagcagcggcactttgttgtaccagcgagtcacgaccttatcgtaggtcaggtcgatggtcccatccggcttgcgcacggcacagcagatcttctcggggccgcgcatcatgatgccttccatcaaggcctggccgccgacggaagtgcgaaattcattgggcatagtttctccttggccgttttatacggtataacattatattttctcgtgcaggtgttcctgcccggggtggtagaccggcagcgtgatgctgaccgtggtcccctgccccagggtggaggcaatatccacgcgcccgcccagcgcggtgatgatctcatccaccactgccagaccgatgccggagccccgcaccgagtttttggctttgaaaaatttctgtttgaccttttccaggtcgtcgggtgcaatgccgcggccctggtcgcgcaccgccgccgtgaccaaatccccccgccgggtcagcgtgaggaagatggttccgtccggctcggagtatttgatggcgttgtccaggatgttgatgaacacctggtgcagccgcgccgggtccgcccacaccgggtaggggtcgggcggttcctcgtagacgaagtgcagcccttcctgccggatgcgggcctccacaaacagggccgcgtcggtggcctcggccaccaagtccaacacctggcagttcagtttgatgccgttctgcaaacgggaaaaatccagcagttcttccaccatcgtgtacaggcggtcggtctcggtaccgatgaccgaaagcccgcgctggtagttcttatccgtggggtcgtcgatgttgccgatggtctcgacccagcctttgatagaggtcagcggggtgcgcagctcatggctgaccgaggagatgaactcattcttcagccgatcggtctcggccaggtcctcggccatctggttgatggtcttgcacaggcgacccacctcgtcgttataccggttgtccggcaggcgcacctgcaaatcgccttttgcaatttttgtcgctgttgcttcaatttcccccagcggccgcacgatggagcgcacaaaaaacagcccgctccaaatcgtgaacaccagcaccagcacacccacgccggtggcggcggtaacggtgttccaccactggcggtccaccagcgtcaggctggtgacaaggcgcatggccgccacattgccggccgcgtagggcaccagctcggtcacagccatcacccgttcgccctggggcgtggtgaagatgtcgtgccctttgccgctggcggaagtctgcgccgacagaaagtcggtgccgtcggtcaggtcgcgtgtcatggtgccgctgctggtggccaggatgaccccctgggcgtccagcagcataaactcgaacttgtccttttcgtcgaactgctcgacggtgcggcgcagggcctggccgcggctctcggaggtctcgttggcgtcgcccgccgtgccggtggcctgcaagcggcccgcaatggtggaaaagcggctctccgccgcccgctgcacgctgccgtacagttcccgataatcggtatagaggaacatcacttcagccgccaggatcaccagcacggtgatcagcaggctgccccgcacccaccgcttggtaatgccggctgccgccattgagggttcctcctttcctgttctatgttatcgctcgcttctaaggctccctctgtgagggagccattcgctcacttacgcattccaccggtatccatacccccacacggttaaaatgtgctgggggctgctgggttcgtcttcgatcttcatgcgcaggcggcggatgttcacatccacgatcttcacatcgccgaaataattcttgccccatacgccttccaagatcttctcccgcaccagcgctgtgccggggttgcggaagaacagctccatgatctggaactccacctgggtcaggtcgatggccgtgccgtttttgtacagcatgcggctcttttcatccagcacaaaggggccgctgataagttgctcctgctcctcggcgggtttggcgggcacgccgccccgcttgatgcggcgggtcaatgcttccagccgggccaccagctccgacaccgagaagggcttggtaatgtaatcgtccgcaccgatggacagcccgcggatcttatcgctctcctgccctttggccgacacgataatgatgccgatctcgttgttctcgcggcggatcgtctcgcacagactcaaaccgtccattccgggcagcataatgtccagcagggcggcgtcgcactcctcgccatggtgcatcagttctagggcgcgctcagcactgggggcctccacaacctcccagccggccattttcaggttcagggcgaccatttcgcggatgctcgcttcgtcttctacgaccagaactcgtttcatagcctatcctttctttacgccgtgcccaacagcacggtattgctcttgatatagtccatgctcaaaccgtagtagcttgtcaccatgcgggcctgcagctgctggctgccgatggtggcgatgcgctcgtactcgatgctttccggctcgtctaggtccaccacgcgcatctcacagtacacaacggtaccctcgcggttgcagatcagccagccggtgctgctctggttgccccggatcatgatgctgccgtgcatcgattccggcaatgccataaagaagttttccttgctgtcatacacgccgaacaggctgttgccgccgctgttgttggcgtagtccttccacagcaaaaacaccagccgcttgtccaccggggtctgcaggtcgccgccgtcatcgatctccgccgggatgtccacggtgccgttgccgtcgatgtcgcggctcagcagctcagtgtggtagcgcagcgtgctgcgctgggggtcgctcaggcccggcggatggtacggctgcagcgagccggactcggcatcatacaggataatgtccgataccatcgcgttgccgtcggcccaggcatccatcaccaggtaggcggcatcatcccggccagtgcccgcgtgcagggccgcgcatccgttgtagctgcccgcgcccagcgccaatgtctggatggagcggaactcgccgtccacattggtcagcagttgcagggtcacgccgcccatctcattttccggcagggccagcaccaggtcggtagtgtccttcttgccggtcaggtcggccagcagcagttgggtgtagctctggctgatgacggtggtgatgttctccccatcatattgatacaccacgcaatagctgtcaccctgggcgctgctgtagccgacgaccagctgttgggactcggcgtttttcaggttggcagtgttgaagttttctacttcgctggacaggccttccaccgtgcggctgacccgccagctgtcttcgccgctgggttccagcacagccaggcagacgttggagccggtggtgtcggcagtatacagcacagcggcttcgtcctcaccgtcaccgtcccaatcgccaaaggcaaagggcgacaagaaatcaccgctggccgggtattttagggtagcgctgccgcccaggtagctgttcagcgccttttgcagtgcgctgctctcccccgacaactgcggtgcccgcagcagggtctccacatccccgtagctgctgcacccggtgaggaggagggccaaaaagaccagggccagcgccagtttttgttttgtctgtttcatctgtgccgccctccctttccgatattaatacagagtatagtatagcacatttacggcaaagccgcaatgcccaggagcatgagcaggcagccggcggcggcacctaaaatgccgggcaggcggtgggccggggcgaaggccgtgggcagcagttgggccagggcgacccagatcataatgcctgccaccagcaccatcgtgccggtcaaaaatccggttgtgaacaggctgcggaacaaaaacagtgccaccagggcgcccgccggttcggccagaccggagaccagtgccgccagtgcgcctttggcccggctgttggtggcataggcaaagggcaccgccactgccagaccttcggggatattgtgcagggcaatagcaagggctgtgcgcaggccgagggcggggtcagctgttccggcaaagagggtcagcaccccctccgggaagttatgcagcagcaaggccgtgccggttatcaatgccgtgcgcatagctttggtgcgagcggtgttctggccgtattttgcggccagctcagtttcctcgggcagcaggcggcccagcaatccggcggcgagcatacccaaggccaacagcgttacgattgctcccccacagggaagcggctgcagatagccgctgtaaaattccagtgcttcgggcatcagatccgccagcgacgcggtaagcattacgccaccggcgaagcctgcactggcggcaagcatagtttcgctgggttttgccagcgcggccaatgcgccgcccaaacctgttgataatccggccaaagttgtaagtacgattggtgatgcctgcatatgcaattccccccttgggggactgtatgccctagatgcagcgcgtatgctataacaaaacaccccctgtccagctatgccgccagacaaagggtgttttattattgtattaaaagttctttcggttcctttctttcaagaaaggaacaaatcccccgtaattagtacccgctgcccgcctcaccggaggtcagcagtttgacagcacgggaggtgcccaggcgatcggcgccgaggtcgaggaacttctcgatgtcctcgacggtggagatgccgccggcggccttgatcttgcagcggcccttgacatgctcggcgaacagctcgatgtcatggaaggttgcaccgccggtggagaaaccggtggaagtcttgatgaaatcagcaccggcctcgggcacgatgtcgcacatcttgattttctcttcctcggtcagcaggcaggtctcgataatgaccttcagcaccttgtcaccgacggcagccttgacggcagcaatatcattgcgcacgtcatcgtactgtttgttcttcagccagccgatgttgatgaccatgtccacctcggacgcgccgttttccacagcagtcttagcttcaaaagctttgctcttggtgtccatagcgcccagagggaagccgaccacgcagcagaccggcacgcggcccgccatgtactcggccgccttggcaacatagcaggtgttaatgcagacggatgcgcaatggttggcgatggcctcatcgcacagggtctggatctggggccaggtggcctcgggtttcagcagggtgtggtccaccttgccgagcatttcttctttcgtgtacttcaacggaaattttcccccttatcgcaatgtttgcacaggcgggcctggtgcaggcccagcgctgcaaagacgatggacgtaatgctgacggtagcgccaatgatgccaaggatcaaaccaaccagacggaacgcatggccgcgcactttctgtttcataggggatgcctcctttttgggtcgtaactttttatgtaccagccgttttgcctcgtgggtcaataacggatgatgcagcgcaaattttgccaccttaaaaacaagcatgatctgctccttcgggtgtaaattttacttctttttaaaaatcagcaccttgctgaaaatgtagttggacaaaatcacgatcacctggctgaacagcttgacgcccatcgcccacagcttggcattggccacagcaaagccgacgcgggggcccagcaggctgacgcccgtccagataatgacctggtccatgaccatggtggcgatgcggcaggatacaaactgcccgaactccgcccaggccgctttaccggtgttctggcttttgaacacaaaggtgcggttcgtccaataggcaaagaggatgcagatgacgttatccaggacattgccgataccggtggcaaaggccgtgcccagtgccgcctggaatacagcaaagaccaccaggttcagcagtgttgccagcccgccaaagaacaggtaggccaagccctcgtaatatttgttgataagatctttgattttttgcatgacggctcccgttttgccctttcgcttgtaggggtcgatgctcgcatccgcccctacagttgagggtgattgcctaatactaaaaaaggggcctgcctgttactacaggcaggccccttaacggttgcttacagattattcagcatcctcggcctcgtcgaggcaagccttcatggacaggctgatgcgcttgcggtcgaagtcgacagccgtcagcttaacgcggacttcgtcgccaaccttcagcacgtcagaaaccttattcacgcgctcattgctgatctcgctgatgtgaaccaggccatcgataccgggcatgatgcggacgaaagcaccaaacttggtgatggaaacgacgggagcggtgaactcggtgccgacggggacctcattctccagcttgacccaggggttgtcctcttccttcttgtagcccagggagaccttctggttctcgggatcgtagctcttgacgtagacttcgatctcgtcgccaacactgacaacctcagagggatgcttgatgttggaccagctcagctcgctaatgtggcacaggccgtcaacgccgccgacatccacgaaagcgccgtaagaggtcaggctcttaacaacgcccttgtactgcttgccgacctcgacgttagcccagaactcctcacgcttagccttgttggcctcagcagtgaccttgttgatggagccgacgatcttgcggccagcgcactcggtgataaccagctgaacgtgctggccaaccagcttggtgtaatcctcgtcgcggcgcatggtagcctgagagcggggaacaaagacgcgaacgcccttgacgttgacaacaacgccgcccttgttggcttccataacgtcaccttccataacggtgccgttctcagcagcctcggaaacgtccttcatacccttctgggcctcgaaacggacgcgggaaagggtatcgacgccttcctggtcgttggtcttgataacgaccagatccagatcgtcgtctaccttaacaaggtcttccatcttagcgttggggtcatggctcatctcgcgcagggtgacaacaccggtgtgcttggaaccatcgataccgacgacacactccgtcggggaaacgctgatgaccttggcttttacgattttacctgcgtacaggggctttgcttcggatgcagcgagcatctcctcaaagctcatgtcgtcacggatctcttcactcatactgttaagtacctcctcaattatagacgaaggcgttgaagccccggccgttacgcccactgtcacagcatctttcagccatgccgggtcgagttcatcagcagtctcgacgttgatggctacagcatgccgtgcagcgacctgtaaaagcttttgggtattggaagaatgatgaccaccaatgacgaccatatgatcgcatttttggctgaggtcttccgcttcctgttgcctcgcccacgttgcattacatattgtatcaaaaatttcggcttttgtacactgtttttttaaaaattccttgcacttttcccagctttccacacggaaagtcgtctgcgccaccacatagatagatttttgttgcaaaagttccgggagcattttctccagttcttccagattggcgaaaactttcacttttccctttgtgtgtccgacaatcccctgcacttcagggtggcttgcgtcgcccgcaaccaacaaaagtgcatgattttcgtctgccctcatagcaattttatggatttttgctacgaacgggcaggtagcatcatgatacgccaggcggcgtgtgcttatttcgtcgtagaccgtctggggcacgccgtggctgcggatgatgacctcgtacccatcgggcacgctggccacatcggggcaggtcagggcgcctttggcctccagatcctccaccacctgggggttgtggatcagcgggccgagggtggccactttgtggccgtcggccagcaggtcataggtcagcttgactgcgcggtccacgccaaagcagaaccccgcggtcttggcacggataatattcatcgttatacctcgtttttcaggttatgcgccctgggtctctccctctgctgcttcgggcagtgcgggcttttcggcgggctgtgctgcctcggcgggttgtgcggcgggctgtggctccccggcaggcttcgccttttcggcagccttgggggcggggtcgtcggcctcaacagtctcggctgcctgcacgtcaaaagcgttggctttcagcagggcttccagctcgtccttcaggcggttcttcatgcggcgcagttcggcgatcttgtggctctggtccttgatctgcaggtcagcggcggggatggcctcgccaaagacgatgcgcaccttgcagaagagatgcagccgcccgtccttggtgccgtagatgatgcgcaccggcagcatatcggccccggctgcagcagcaatgacgaacgcgccgctcttgatcatgcccaatttaccggtcttggtacgggtgccctcggggaagatcatgacgccggtgccgtttttgcactcgttcgtaattttttccagcgtgacggtgtcgcccttgccgcgctcgatggacaccgcgcccatgcagcgcaggaaccaccccgccaacggatttttgaacagttcctctttggccaggatgcgcaggcgcttccagtcaaaaatcgtaatggcgatgagcacagggtccaggttggcgatatggttgggcgcaatgacgtaggcacggccatcccggacggctttcaggttttcgcggccgatgacctggatgcggaacacgatgtgcgccagcacccagacgatgggcagcaggatccaatacaacagcatagcgcgtcccccttaaatatgtgcaagaatcgtgcgcttgagcagctcgaagctttcgtcaaagccgatgtcgctggtgtccaccaggatggcatcgtcggcctgcttcagcggggcgatggcccggtgggtatcctggtagtcgcgctgccggatgtcggccagcacggtggcgaagtcggcaggctggcctttttcttccagttccttgcggcggcgctcggcgcgggcctcggcgctggcggtgaggaaaattttcacggtagcgttgggcagcaccacggtgccgatgtcccggccatccatcaggatgttctggtccgcagccagcccgcgctgggtgtccagcagaaaggcgcgcaccggcggatgggccgacacagcggaggccgccatgccgatgttctcggcgcggatggcgtcgctgacgtcctcgccgttaaggtagatgtgctgggcgccgtccaccaggcggatggccagcttgatttggggcagcagcgccgttacagcggcttcgtccttggggtcgaccccggcgcgcacggcgtacaggccgatggaacggtacatagcgccggtatccacatagacgtagccgagatctttcgccagccgtttcgccaggctggattttcccgccccggagggcccatcaattgctacagagatcatttttatcaccttttataaataaaatctttttatcaaccgtcctatgcagggggcgatgcttgcatcggcccctacatccacctcagggcaatttgtagggggtggcgtcctcgacgccccgcacctcacatcgcccttaccgctgcctgcgcggtggaccaagcgatctgcaaattgtacccgccggtgcgggcgtccacgtccagcacttcgccggcaaagtacagcccactgcacagcttgctggccatggtcttgggggccacttccttcacgtccacgccgccggcggtgaccacggcgtgctccttgtcgcccagggccgtgaccggcacctgccagtgcttgcacagctgcaccagcgcctgcttctgctcctttgtaatttgcgcggcgcgggtcgcggggtcgacgccccacttttccaccgccaccggccgcatcgagttgggcagcagcttggccagcgcgccctggacgctgtgggcgccctgctcggcaaaatcgcgggtcaggcggtcgtacagcgtcttttcatccagcgcgggctttaagtcaaactcgcagatataacggtgcttcgctatatcctcaatataggtactggccgagagcaccagcggcccggacaggccaaaatgggtaaacagcgcttcgccctgctcggtgaacagctccttgccgtcgcacaacagggtcagccgcacgttgcgcagggccagacccatcatgcggcggcaggccgggtccgggctgatgaggctgcacaaactgggctgcggcgtcacgatggtatgtcccgcctgccgcgccagcttgtagccgctaccgtcgctgccggtggccgggtagctgatgccgccggtggcgatgagggtgttctctgcccgcagtgtctcgccccggtcggtgacagcgcccttgcagacgccatcct

SEQ ID NO: 7814 - DNA, 5986 bp, Unknown
  gut microbiota DNA sequence
aagctgcagacgttgcaggaggttggccttgggtatatccagctgggtcaggccgctacaacgctttctggcggcgaagcccagcgcgttaagctggccaacgagctggcccgccgagacaccgggcagaccgtgtatatcctggatgagcccaccaccggccttcatgtggccgacgtgcatcgcctggtcaaggtgctggacaagctggtggatgccggcaacacggtcatcatcattgagcacaacctggatgtcatcaagcgcgccgactatatcatcgaccttggccccgagggcggcagcggcggcggtacggtcgttgccaccggcacgcccgaggaagtggccgagaaccccaactccttcaccggccagtacctcaaacccatgctggcccgcgccaaagagctgcaggaaaaagccaaataagattttgtaagaagcccccagcctgttgcacttgaacaggctgggggttgtttattctgtcgtatcttcttttttcgccgggatctttgtctctgccacttccgatacatccggcatggcgctgtttttggccaccgggatgaaccgcttggcaaacttacccttgccgcggctgcgcacataaaagtagccgatgatggagaaggtcagcgcgccgataaagttgacgaacagatcctccatcgtatccagcaggccgatgtccaggtacccgcccaggcccagggctgtctgggtgccgtccgcctgcacggcaattacatcagtgatgttgtgcagcaccaccgggtggttgccgccggtagggtccagcatgatggagccgatactctgtaccacggtgtccttctgcatatccaaaaagaacagctggtccatcgtgcactcaaaaaattcccaaatgacgccgacggtcatcgagaagcagaacgccacaatggccagatacagcggcgacaggtggaaccgcgcgctgttgtgccggttcaaaatatccagcagggagaagccgatggccgcgcagagaaacccgttcagcgtatgcagcaccgtgtcccagtaggggaaggtgacgtagtatgcgccaatctcgcccatgatctccgccgcataaataaacagcaggatgatgatttcgagggtgtttggcagtgcaatatctaactttcgctccagcatgctgggtaccataaacaggaacagcgtcagcacacagagaaagacgttctcaaaattgcggttaaaaatctgcgccaacatcaccaggatgaccgaagcccgcagcaggatatacaccagcgtgaccgagcgctttgtccgccaggcatcctgaaaggcctcgcgtttttgctgctttttactttccattccttctcctttaatccagggtaaaatctttcgggtccagctccggcagcacctggcggtgcggtacacgcatcagcggatcgtagctgaacttacggcagcaatagtaaggggatactacacctttttgcttgcacaggatcatcttggggtcggcggcaggggcgccgtgcaggcaataggcgcaggcgggagcaattttactgccataatagggttttctaaacatatcctcaccttatcgtgcaaaattatacttatattgtattataaatgtttttgtaacctttgtaaagcagtgtgcaaagaaacaccgccgccaccacagcggcatccggcggcaggcggcacattggtacgacccgcggggccagcgtgctgaacacggtctgctcctgcggcagcgcccaaagcagcaggcgcaccagcaggggaaagaggacggcatgcagcaggcggcttatggcaagcatccgcatcggcacccggccttgcagcaacagccgcagctggccccatacggagaatcccagcaggctcatcgccagacagatgccgtatagcgccgccttgccgccaagggctgcgaacgccgcgcacccggctgtgatttcacacgccgcactgacgcaggccgcggcggagtcaggcaagggcgcaaccgacaataaaacacctgccgccacgcggaaaaaaatcacacagccgcaaagatccaggcaggtggaagcggcggacgatattgccgttggcagggatatttcttgcttttcctttttgcacggcacctctcttaccccgtgtgcatccgctttaggcagcatcggcaggcaaaaccccgctgccagcaggttggccgccagctgccctgcatacagcagtgctcccagtgaggtactgcccaacagcagcccgccgatataacccaccacgaacccggggccggagcagcagcccagcatcatcagcagcgcggcatcccgggccgatatgcgcccggccacccgcagctgtgccgtcagccgggcacacactgcgtacccgcccagccaggaggccagcagcgctgcggctgtatcctcattttgcaggcccagcagacgagcctgcgggcgcagcagagctttcggtaaggccatgcccaccagcagctcacacaccaccataaaggggaacagcgccgggagcaggctgcccacacacagccgggcaccgtccgcaaagccctgtgccgctgcctgcggtctgcttagcagccccaggcaaagcagggccaacgccgccatttccaaccactgccgccgcaaaagatggttcataactcgcagccctccgcgtatattgttactgaaattgggactttttgcaaaggagggaacgccgatgaagctgcgcaagctgaccaaaaagcgttcccgccaactgctgccctccccgggggatctgtttgctcagccgcccgccgccttttatcgcctgccggaatttgaattgcgcggaagcagcctgctgacccgcggctgccgccgggtgctggaattcggccccgaaaagatatgcctggacatgggcagctttacagtaacattttatggcgcggcgctgcaaatagaatccctgaccggaaaaagcctgatcctgaccggcaagatccgccgcatcgactttgccaacaagtggggtgaggagccatgaagacccgcctgcacaccgccgatgtgctgacctttacgctgaccggcgcggagccccagtgcgccctgacactggcggccctgcatgacattcggctgttccatatccgtgcgttgcccagcggagttcaggcgcagattgccggggtcgattggccgcggctgcaagcgctgctgggggatgaccgctggaccgtaaagctgctgcggtgccgcgggccgggcggatttttggagcagctggccttacgtcccggcctgccactgggtgcagcctgggcgtttttggtgacactactgctcagccgttttgtctggacgatcgattttgaaccgctagatgccgacgcacaagccagcctgcgccagcttttggcagggcaggacatctgtgagggaacactgctgaccaaggacgccctggctcaggtccaggccctcgccctgcagcaaagcgaccgctttggctggatcagcctaaatttcaccggtggccgcctgtttgtggaaagtaccgaggccgagcaccagaccatagaagccccgccgacccagaccgcactgtacgcggcagcggcgggggaggtcaccgccattgaagccgaaagcggtttttgtgctgtgaccgtcggccagcaggtgcaggcgggggacctgctcgtagatgtgcagcgattggaccgcaagggtaacccggtgctgcagggggcctccggccgggtgttggcccgggtagagaaaagctacagcgccgcacagccctactatcccacacagctcacgctgaccgggcgcagtgctgccgcagaaagctggcagctgctgggacgggagctttaccggacggaggcgcccgccgactacaccggcaccaccgagatcgactacctgccgctgcacatcggccgcgtcacgcttccgggcgttatccagcgcacaaacacctgggaaactgccgccacgccctgccactacagcgagtccaccgcccaagcactggccctgcgagcctgccgggcacagctgtacagggaattcccggacgctatcatcgaagcagaacgccgcagtatcgacccaggagaggatgccgcggcctgcactgtgacctacattttttgcgcaaatatcgccgaaaagccgtaaaattataccacttttttcctgcccttgtaggaacgtcaaaaggcgttgaaaaattttgtgcaacattcacagtttcttttgtaaaaaactgtgatataatctaaatgtagaaatgtagtacgcagggaggatcaccatttggcagagcgttctattgaactggacagcatcgagctggccgccgcgatttttggcaattgcgatcaaaatatccatcttctagagaaggagtttcacgtaaccgctgtgtgccgtggctctgtgctgcggttcaccggtgccgaagcggacgttgatgccgccgctcacgcggtggacggcatggttaccctgatggaaaatcacaccccgctggaagaacagaccgtgcgctactgcatcagcctggcccgcgggggcgaggaaaagcgcctgcgggaactgaccgacgatttcgttgctgtcaccgccaagggccgccccatccaccccaagaccctggggcagaaggaatacctggccgccatccgtagccacgccattaccttcggcgtggggcctgcgggtaccggcaaaacctacttggcggtcgccatggcggtaaaggcctttaaatccaaggatgtcagccgcattattctgacccgccctgcggtagaagcaggcgaaaagctgggctttctgcccggcgacctgcaaaacaaggtcgacccctatctgcgcccgctgtatgacggtttgtttgacctgctgggggcggagactttccagaaattgtttgaaaaacaggtcattgaggtagcacccctggcctacatgcgcggccgcacgctggacgatgcctttatcattttggacgaagcgcagaacactacacctgagcagatgaagatgttcctgacacgtatgggcgtgggcagcaaggtggtcgtgaccggcgacgtgacccaggtcgacctgccggataaagtgcgcagcggcctggtggacgccttgcaggtgctgcgcgacgtggacggcattgctcaggtgcgcctgaccgagaaagacgttgtgcgccaccgtctggtgcagcagatcgtcaaagcctatgaaaaagccgcagccggcacgctgcgttgaaactgaaccaatacacaatcacataaacaggaggttgatccctatgtccaataaggtgttgatcacgaacgatcagaatgttgtaaagatcccctcagggctgcgtatcctcatccgccgcagctgcaatgctgtgctggactttgaaaagttcgacggccccgcggaaatcagcgttacctttgtggataacaaccgcatccacgagctgaacaatgagtaccgccacaaggactctgccaccgacgtgctgagcttcccccttggtgaaaacggcgagtatgacatcgacgaggacaacggctgcaagctgctgggcgacatcgtcatctcgatggagcgcgccatggagcaggctgagctgtacggccacagcctacagcgcgaggttgcatacctgactgttcactcgatgctgcatctgctgggctacgaccacgaggccggcggactggaggctgtgcgtatgcgcgagaaagaagaagctgtgctgattcagctgggcctgccgcgcaccgtttcctacaccagcgatgagatctgatttagcgcgctttgcgcgcggctttgtctacgcatggaacggcatccgcgccgcagtaaaagaggaacggaacttccgttttcacctctgtgctgccttttacgcgtttgtggcggcctactgggccgggctgagtgccgtg

SEQ ID NO: 7815 - DNA, 13159 bp, Unknown
  gut microbiota DNA sequence
ccaaatgcccgccggagacgtagacgatctgcgggtcctgcatcagtttgatgaggtcctgctgcatctggtcggagaagaaatcctgattaggaaaaatcagcaaaatgcggcctttcagcgctctaaaatccgcctcggtcacgggagtctggttcatcaggtcttccagcaggccggtgatgtgcatgtcctttgtctgctggaagtccttgaagatcgtctcaaacatatcccgcgcgtaggcggcttcctcggcgctttcattgcggagatggctcatgcccgattggatcaggcgcggcttcagcctttcgtagttgcagtgggccatgtaccatagcgcgaggggtacaaagaaatacttcttcttcagcgttttcagcgtagctgcgtccatgccgccggtggagaccagtaccagcccgccgacctcgttcgggtacttctgggtgtagatctgcgccaccatgccgctgtcactggcaccaatgaaaatggggctggcgatacccagtttaacaaaaaaggcatgcatgcccaccaccagcgcctggttggtgcgcagctcccgcgggtagtcaaacaacatcacatatccctccccttaggtgggcaaatcgtgaattagctaaaactaactgcattgcccctattatacgtcacctcccccgtcgtttcaacaacaaaataacacaaaagggccgccgcacagggaaaaatccccgcgcagcggcccgtttattataataaggttacgccatggcgttgcgcacggcggtgtagtcgtccatggcggcgccctcggcgtacagcgagtactgcatgtcgccgtcaaaccagcgggaccagaggccgccgttttcggtggtgatgacggtcacatcgccctcacggccgttgcctaaggtcgtgccattctcccacacgccggaaatatcgccggtatccttggcggcgcgcagcgtgtaggtgccgccgttgtaggcgaaggtatactggccgatagggttcttctcttcgtcgtcgatggtcgcccaggcttcgtcagtcagctccaggtcggcggggcgcttcatggccgagccgatggcctcgttcacctcgtccaggctggcgcggtcggtgatgggactggggatctgggtgttgtccgcggcatcctcggcggtctcagtcacggtagacgtgctggtgctctcgggggtagtcgtggaggagtcggccgttttgctgctgcaggcggttaagacaatgctcattgcagcggtgcagacagcggcagcgagaaaagcggaaataatacgtttcatagttgtgttctccctactgatgataaaaattccctcataccctgcattgtgtgcaggagtttgcggtttatgtattcgatagggcccttacacacctataaaccgaaaaattccgcccggcgttacaccaagcggaaaacttttttataaaggcaacaccgcacaattcccgcctaacggcttaagcaccgctccggcggctgcggcacggcaactgcgttgccaaaatgctcgataatacacaaagtattatctgcgcttttggcttagcatctgccgcacctctctcgccgtatcggcacttagaattatgcggtattgcctaaaatttttagcgggccagccagccgccgtccacggccagggtgtagccgttcacgtaagcggcggcgtccgacgccaggaagatggccgcgccgcccacatcggcaggggtgccccagcggcctgccgggatgcgggctaggatctcctcgctgcgatcttcatcctggcgcagctggttggtgttgttggtggccatgtagcccggtgcgatggcgttaacgttgatgccgtacttggcccactcgttggccagggccttggtcatgcccatgacggcgcttttgctgctggtgtaggcgggtacgcggatgccgccctgaaagctgagcatcgaggcaatgttgatgatcttgccgccctttttgtcggcgacccactgcttggccacggcctgggagaggaagaacaccatcttctcgttcaggaaatccacggcgtcccagttctcgggggtgacgtcgatggcgtcgcaccgcttgatgataccggcgttgttgaccagaatgtcgatgcggtcagcgtgggcgtggacctgctccaggatagaatcgatggcggcaaagtccgaaaggtcggcgcggacctcggcaaactggccgccctcagcggcgatcttggcggcggtctcgtcgcagctgcggcgggctacgccgaaaacgtgggcaccggcagctgccagcgccacgcagatgccctggcccaggccggtgttggcgcccgtgaccacagcgtttttaccgttcagcgaaaagagattcataatatcattcattgcgttttcctcctgtagtgcttgacctttgtactgtcaacatggtactattataaaaagataaagtacgaaatacaaacaaaacagggcaataaactatcaaaaatgtaccaaacacaaaatttgaacaggcgggggaaaatggaacagatcaaagcgaacgaaacgctggtagacagttctctgcgggagactaagatgcacggcaccgtggatttcccggtgggcgtgtatctggacgacttctcggacttcaaaaacggttacatctgctggcactggcacgaggaaattcagatctcctggatcatcgagggcgagttcctctgccagatggaggggcgcacggtgcatctgcaccccggcgaattgatattcgtcaaccggggtgtgctgcaccagatctacccggtgcaaaaggggtacggcaagctgtacgcctttatatgggacccggagttcctcagcggcagtgcggaaggtgcggtgtatcaggaggcctttgaggcgatgctgaaaagcggcccccgctgcctgaccctggccgagaccgcgcaggctcccggcgggcaggccgtgggcgaagcactgcgggccattgtggcgctgtacacgcagcacccggcactgtatcatttgcagataaaaattttgcttagccagatctggctgctgctctgccgccaggaaggcgaagcgcccgaaccgatgaccccggagcgggaacgggacgaggagcgcttgaagcgcgccatgaactacatgcacacccactacggcgagcatttcagcctggaagagctggcccggcaggccttgaccagccgcagcgagttatgccggtgtttccgccggatgctggggatgccgcccaaggagtttttgatgcagtaccgcatccagcaggcggagatcttgcttaaaaattcggcgtacagcattgccgaagtggccgagtttacgggctttagcagccccagccactttggaagctgctttttgcggtatgtggggtgtacaccgagggaatataggaaatcgctgtaagcagcggctttcggtgttccgccaccatgcggcggacacctcgatattaagttgcaacttaccaaggctttcctttttttgtgaccaaaaaaggaaacgaaaaagtcccgctgttgcgaggcggcgcgcttggcggccaaaacgatggccgccatccagcaaagctgggccgctctccttattgaccccttcagggcctaaattcctctataaatctgccaattacccccgcataaacccgcagcacccaaactctgcaaaatccagaaagcccagtgatttataaaacgccacagttttaggcgtattatccgtcaccaattggatctgccggacattcttatatcgttccagcaccgccttaagcagcgcagtgccgatgccctgtctttgtcttgccgggtacaccagaatatcctgcacaagcactatggtggtaccatcgcccaccacccgcacaatgccgagcagttccccgttttcatatgccgccaaaacaagcagagaatttttgtacccgcgctccaatgcaggcatatcttccgtatacgctgtccagccaacttgcgtatacaactgcaaaatttcatcggccttgaatttagtatattcttttatttccatgtttctctccatgattcctaaattatattcccagtataccataaccccctatacaacgcaaaaaatctccctggctgcatcgtctcaaacacagccagggagattgcaattttacaaaatcttacagctcgcagggggtaaagccgttcttgcccagcacctgcaccttggtgtagccaagctctttcaggtgggcggcggcttcctcgaaaccgtaggtcagggccttggtgtcgtgggcgtcggcggtgatgaccacgttgccggagagcaccagccactccttcaagatagcgtccgaggggaaataatccttgcggaagccgcggtaggcggcggatgtgtttacttccagcacgcagcggctgcgggctgcggccatcagagccgaggtagccgcagcggtgtagcgcgggtcgttctcgtcaaagaacttgttgccgtcattgatctttttgatcaggtcaaagtggcccaggatggtgggcttcttctcggcaaccttggccacgttggcgaagtaggcctcggccacagccagaccgtcgccgtcaaaatcgtcatcgatgcaggcgcgcaggtcttcctcgcgccaatcgatctcgtaatatttgccggttttggggcccttgacatagtgggcactgccgatgaagtaatcgtaagcataggggtcgtcgtcactgaaaagatcccattccagcccgcacaggatgtccattttgccggcatagcgctctttcagcttggcgatcgttgccttgtacagcgacgtgcggctctgggtcatgcaatactccaagtcgcagggggtgtggctgtggccgctgaaacccagcgtctgcaggccagccttccacgcggttactgccatttcctccagcgtatttttgccgtcgcacagttttgaatgaacgtgaacggaacttttcaggtactccctggccatattactgcatcctttcctgcttaaccttatggtcgatgacatgccgcttttccagctctttggtaatatcctcgaccgaaatgcccagttcgatcatcagcaccatgacgtggtacgccaggtcgctgatctcgtaaatcgtctcttctttatcgcgttttgcgccggcgatgatgacctcggtggattcctcgccgacctttttcaggatcttttccagacccttatcaaacagataggtggtgtagctgccctctttcgggtcagtcttgcggccctcgatgagctcgtacagcccctgccaggtgaactgcttcagctcgtccgacacatacaccgggttgaagaagcagctctcggcccccgtgtggcaggcggggccgtttttgataacgtcgatgaccagtgcgtccttgtcgcaatcggcagtgatggataccacacgctgcacattgccggaagtctcgcccttacgccaaatttcctggcggctgcgggaccagaacacggtgcgaccctcggcaatcgtcagggccagggtctcggcgttcatgtaagcgagggtcagtacctctttggtgtagtgatcctgcacgatggcggggatcagaccgttcgcatcaaatttcagcgtcttagtgttttccgtaatttccatagtgaaatacccctaacaataagatagttttattgtactattttctgtgcattttggcaagtggttttcgcggtcatacccgcatttcgataccattgcttcgcagatactgtttcagcgcgccgatctccacctgcttggtgtggaagatggacgccgccagcccggcatctacggcggggtgattgcggaacagctccacaaagtcgtccatcttacctgcgccgcccgaggcaatgatgggcaccgcgcaccgcgcggccacggcgtccagcagctccaaatcgaagccgttcttcacgccgtcggtatcgatggagttgaccaccagctcacctgcaccgtttttgacgccctgctccagccaatccagcgcatcgatgccggtgttctcgcgcccgcctttggcaaacagcataaatttgccgtccacacgtttaatatcggcggaaagcaccacgcactggttgccgtatttctgcgctgccgccgggatgatgcccgggttgcggatggcgccggagtttacgctgaccttgtcggcaccgcatttcagcacacggtcgaagtcgtccagcgtgttgatgccgccgcccaccgtcagcgggataaagatctggctggcaacttcccgcaaaatatcggtgaacaggccgcggccctcaacgctggcggtgatgtcgtaaaacaccagctcgtctgcgccggatgcgttgtagtagcgcgccatttcgacaggatcggccatgtcctgcaggccctcaaaattcacgcccttgacaacgcggccgtttttgacgtcgagacacggaataattcgctttgttatcatacaactttcctcccctgccgatttagtcctggtacaggcgcacggcctgcgccaggtcgatggccccggtgtagatggatttgcctaaaatggcggcgtggcagtgcattttttgcagctcggccagttcgtccagcgccgcaatgccgccggaagcggtaatttccagcccggggatggtcagcagttcgcggtacaggtccatgttggtgccctgcatcgtgccgtcccgggaaatatcagtggcgatgatagccttgacgcccaccccggcgcagcggcggcagaacgccacgcccggctcgggggtaacttccttccagccgttcactgctaccaggccgtttttcatgtcgacgcccacggcaatctgtgcgccgtacttctgcgccatctcggcggtaaaggcaaagtttttcacggcgatggtgcccaggatgcagcggtccacgcctaaatccaggtagcgcttgatgcgctcctcgtcccggatgccgccgccgacctcgatctttaagccgccctgtttggcaatggcggcgatggtctgcaggttggcggtggtgtcgtccttggcgccgtccaggtcaacaacgtgcaggtacttggctccggcggtcacaaaggctttggcctgggccacggggtcggcgttgtagacggtcatctggtcgtagtcgccctggtagagacgcacggcctggccgccccgcaggtcaatggcaggatataatttcatagtgtccctccgttcagcttacagttcggcaaaggctttcagcagccgaaggccggtatcgccggatttctccgggtggaactgggtgccgtagacattgccgctgcgcaccgcgccggtgacagggatgctgtactcgctggtggcaagggtcgaagcagcgcagtttttggcgtagtagctgtgcacgtagtagacgtactcgccgtttttcacgtacttgaacagcgggtcgttctcgcgtccgggcacgatgtccagtgcgttccagccgatgtgcggtacttttaagctggcatcggtcaggtcgtccgccagcgggcagacctcgccggggatgaggcccaggccggcgtgttcgccgtactcgaagcttttgtcaaacagcagctgcatgcctaagcagatgcccagcagcggcttggtctcaacttccttttttagtgcgggcaccaggccggtagcctccagcttggccatggcgtcgccgaaggcacccacgccgggcagcaggatatggctggcggcatgcaggtcggcggcttcatgggtcacccgcacctcagcccccaggctccgcacgctggacgacaagctgaacaggttccccacaccgtaatcaacaatagcaatcatatagttccctcccctatggtaaagctaaaattgcagcgatttccgtaaacagcaattggtcggtatcatattgataaattcgcccgtcagcatcggcatagcggataaaagtgccagtagggctggccgcatttttttcagaaatatctacctgccacatggtcagcgaagcgccatcgccaaaaacgagttggcattcgtcgccatcgggggcgtccttttgcaccttccccgccccggccgtcgtgatgcggcggcacaggcggctggcctggtccgtggtgatgggcacatcctcgtcctgccaggtcatgcgcagggacattttgttggatgcggccaaactggcggaaaaatcattgataaaacgtcgataccgcaattgataccgtgccgcatacaccaacatgccgatgcaggttgctgccaccagaaacccaaaggccgccagaacggccgcacccggcgtaatgtgctgccgccgggccggttggcgctggatgcggtcatacatgtccatatcaggcacctaaaatctcatccaacgctgcaaagaagcgctgcatctcggcgtcggtgccgatggtgatgcgcagatagttggaaatgcgcggcgcgttgaaatggcggatgaggatgccctgcgcccgcaatttctcaaaaatttccttgcagggcatgtggtcggtggtggcaaacaggaaattggtggccgagtcaaacacggtaaaaccgcgctggcgcaaaccttcggtggcggcggtgcgggtggccagcagcttggcggtcacctcgtggaagtaggcctcgtcccggatggcggccgtacccgcggcctgggtcatcgagttgacgttgtagggactgtagctgaacttgacgcggttcatgtcggtgatcagccccggccgggcgatgcagtagcccagccgcgcgcccgccaggttgtgggtcttggagaaagtgtgcgtgataacgaggttctcgtacttttccagcagcggtaggcagctggacccggcaggggcaaactctacataggtctcgtccaccaccacaatgttgtcgggattggtacgcagcacttcctcaatggcggccacgggggccagcaggctggtgggggcgttggggttggcaatcacgatcgtctcgtgcaggccgcagtactttttcaagtcgatggtcaggtcgtcctccagcgggatgacatgctgcggaatatgcagcagatcgcacaaaactgggtaaaaactgtaggttacatcggcaaaggccagcggcgtgttttcatcgcagaacgcccgcagggccagcagcaggttctcgtcgctgccgttgccgcacaaaatattctccggctgcacgccccagtgggcagcgatggcctcgttcagtgcgcggttggacaggtccgagtacagccgcagccccggcaccgccgccgccaccgccgccgccacaccgggcgcgggcgggtatgggttttcgttggcgttgagcttgacaaggtcgtcaattttcagctgctcgccgggcacatacggctccagcgcagccagcgttttggtaaaatagcggctcatgggctcactcccccttttgctcgtcctcaaatcggatggtcacgctcttggcgtgggcgtgcaggccctcgtgctcggcaaagttggcgatgcgggcctggacctcgcccagggcttcgcgggtgtagtagatgaagctggacttcttgacgaaatcatccacgcccagggggctgctgaaccgcgcggtgccgctggtgggcagggtatggttggggccggcaaagtaatcgcccagggcctcgggcacgttcttgcccaggaaaatgctgcccgcgttctggatgtcgttcaaaacggcaaacgggtcgtccacgcagatctccagatgctccggcgcaataatgttcacggcgtcgatggccttcttcatgtcatcggtgacgatgatcttaccgttggtgtccacgctggcgcgggcaatggcggcgcggggcagctgcgggatctgcacttccagctcggcctgcacggccttggccaggtcccagctgtcggtgaccagcaccggcgtggccagcttgtcgtgctcggcctggctcaacaggtcggcggcgacccaggcggggctgcaggtgccgtcggccaaaaccaggatttccgacgggccggcaatcatatcgatgccgactttaccaaaaaccttgcgcttggcggtggccacgtaaatgttgccggggccgacgatcttatccacagcgggcacgctctcggtgccgtaggccagggcggccacggcttgggcaccaccggtcttaaagatgcagtcgatgccggcaatcaccgccgccgccaggataccggcgttgaccttgccgtccttgccggctggggtggtcatgacgatctgctgcacgcccgcgaccttggcggggatgacgtccatcagcacggtagaggggtaggctgccgtgccgccgggcacgtaaacgcccgcgcgctggatgggggtgtacttctggcccagcaccatgccggggcggtcgttcagtacaaagttcttgtgcagctgctgctcgtggaagtggcggatgttggaagcggccattttcagcgtggtaataaattccgggtcgccggcttccagttcggcaaaggcctcgtcgatttcggcctgggtgacctgtacgctggtcagctgggcgtggtcaaacttggcggcgtaatccagcagggcggcatcgccgcgggcacgcacatcggcaatgatggcgtcgacggtggcctccacgtcggcttcggcgcggatgtcacggttcaaaatttcttcgggctttacttcatcaaaatcatacaggcggatcattgtgcaagggcctccttcattttggtaagcagctcagtaagctgggcgtatttgaacttgtagctggctttgttggcaataaaccgggccgagatgggcataaattcttcaatcacggtcaggtcgttttcctttaaggtggtgcccgtctcgacaatatcgacgatgacgtcggagagacctaaaatcggcgcaagctcgatggagccgttgagcttgacaatgtcgatatcgcggccccggcgctcgtagtggtcgcgggcaatgttgacgaacttggtcgctacccgcagtgcgcggctctcatcatccacaaaattcctggggccggccacgcacatgcggcacttgcccatgccggtgtccagcagctcgtagacgtccgcgccggactcggtcaaaatatccttgcccacgatgccgatgtcggccgcgccatgttcgacgtagatggctacgtcgctgggtttgaccaggaagtaccgcaccccggcttcggggttctccaccaccagtttgcgggtgtcgttgtagtcctcgttggcgctgtaacctgccccggccagcagagcgtaggctttgtcgcccaggcgccccttgggcagggcaatgttcagccaggtcttttccccgccctgctgctgtactggcggcagcggtgcggccagacgttccagctcgtctaagtacatcgcaaagccgatggccttagcgccgggggtaaagcgctgcatcaggtagtcgtactggccgcctttgagcaccgcgcgggggatgcccgccgcgtagccggtaaaaacgatgccgttgtaatactcggcttcatcggccatgctcaggtccagctgcaggccgcggccagcttcgcccagggcgttttgcagggccagcagttcggccagtgcggctttctgcgaggggctgatggcggctgccttggcggcggtaagggtggccccgaacggcccgtgcagggtaagcaaaccgcaaagggcatcggctccggcttcatcagcaccggcctgcaacgcagccttgcgcagctcgtgttcgtttttggcgcacagcagttccaccagccgggcgtgggccgtggcaggcacatccaacacatccagcaggccggtcacaaagcccatgtggctgacttccagtacggtgggaacatccagcgcggccaggctggccagtgccaggcgcagcacctcggcctgggcggcttcgtccacctcgcccatgcactccaggcccatctggtggatggtctggaaggtgtggctctcgcggctggcacggcagacttcctcattataataaaagcgtttgcactcgccgggggcgggctgggccgtcttggcgatggacagcgtcacgtccggcttgatggctcgtagtttgccgtccaggtcggtaaaggtgatgacctgcgggtccggcagaaagcgctggtactcctgatacagggcatactcctcaaaccgggaggcgcggtatttgcgatagccgccctgctcgtacagggcacgcaggcggaaggtagcctgctcggcgggggtgaaattttgtaaagtcagctccataatacgtctcctacctctcttttccataacaacattatactttagcgcagtaaagatgtaaagcgtcaaacaagaaatctgtacaaatttgggtgcggctgcttggcgaaaacggcaataaaatagcaaaaaggcgcacctttgcaaccaaagatgcgccttgcggtttcttatcagcccttgcagccctgttcgtcccaatcaccaaaatcagccgggtcggcaatcttggtaacgtccagcttgccgtcctcggtcttggggacttccacggcacccagctcaacggggttggcgttgggggtgtcatctccagcgggggcctgcacaggggcggcctccgcttcgggagcttcttctatgggagcggcagcggtttcttcaggtgcagcgggggcttcttcggcctcggcagacgcatcgtcagcgggctcggcggtctcggcagtgccatcctcggcgtctgcttcatcctccgggccccaaatatgctcgtactcctcggtatgctcgttacggttcaaaaagtaagccgcggcgcccacagcggcagcgccaatcgtcagtccaaccagctttttcagtaaagacatcgtatgatcctctcaatcgccttacggcacggcattttccgggaaaacatctgtgtttcaacggaatacgtacatcatagcgcaaacaccgccattttgcaaggggctatttttaaaatttatgcaaaaagtttgcctttagttttgcccatgctcctgcagccaggcgcgcagttcaggggtatcggcccagtagc

SEQ ID NO: 7816 - DNA, 13291 bp, Unknown
  gut microbiota DNA sequence
aagtctcctatgataaacacaagaaaaacatgtacggctcccctgccacggggagccttttgcgttaccagcgggtgtgctggacggccttgtccaggtcggccagggtcttttccgcgcccttggccagcttgtggacggtcttgcgcatcatgcgctggtcctgggtggcaaggcagacggccgccgcacccacagccatgccgacagcagtgccggccattgtcgaaaactgcataacaatgcctccttttcgggtcctcgtgcctagcatgccccgggtaggcgcggctatgcagcaaaatgaggcggaaaaatcaggcaaaaaagcaggttcgcccaattcagcctttttttatgcggcggtttatggtagaatagcagtgttgaaaaaggaacaaacgcgaacgaacaaaaggaatctgaccatgtccaatgcacccaaaactgtattagccatccatgacctgccgggctttggccgggcggcgctgtcggtcatcgtgccggtgctgtcctgcctgggcgtgcaggcggtggcgctgcccacggcggtgctgtccacccacacgggcgggctgggcaccccggctaagctctccaaccccggttacggccctgcggcgctggcgcattaccagcggctgggcctgcggtttgactgcatctactctggctatctggcggaccctacccaggccaagctggtggagcaggcctttgaactgtggccccgcgccttaaaagtggtggacccggtgctgggcgacggcgggcggctgtacaaggggctgggggccgatatggtcccggctatgtacaacctgtgcagcaaggcgaacctgatcgtgcccaatgtgactgaggctgcactgctgctgggcgacccgctgcccggtgtgggcagcagcgaacaggcggccgagcaggccgcgcggctgacccgcatcgccccgcaggtggtggtcaccggcgtgacgggcctttccgacgggcggtgcatcggctgtgtgggcgcggcccgcggcgggcagggatactcggtcaagacgccgttgatcccccgcatgtaccacggcaccggggatattttcggtgcggtgctggtgggacgcattttgcagggcaacgtgccccaggccgccgtgcaggcggcggctgcgttcgtgagtgagtgcatccgccagacgcccgaaggcaccgacgaacgtctgggcgtgtggctggaagccgccctgcccaaactgatgcagcaataagataatgtgaggatgtacataaacctatgccaactttgaacattgtactggtggagccgcagatcccccaaaactccggcaatgtcgcccgcacctgcgcggtgaccggggcacggctgcacctggtggggccgatgggctttaccgtggacgacaaaaaattaaagcgagccgggcttgactattggcaccaccttgatataacatattataaagatctcgcggatttttttgccaaaaatcaggggccgtttttctactttacctctaaggggccgcgccgccacgtggacgtacagtacccggacggcgcttacctggtatttggccgcgaggatgcgggtctgccggaggaactgctggccgcccatgaggccgactgcgtgcgcatgccgatgcgccgcggcgagcgatgcctgaacctttccaacgctgttgcggtaggtgcctacgaggctttgcggcagtgggattttgccgaactggagacccacggacagctgacccgttatgaatggagtgaggacgtaaaatgagcaagatcggttttttgacggattcctgttccgatattccgcaggagcttgcggacaaatacggcattgaggtggtgggcttccccatcaacctggatggcaccgagtatatggagcgcaaggactttaccaacgaccagttttatgagatgatgcgcaaggcccagggcgtgcccaccaccgccgccatcacccagctgcagtggtgcgaaatttacgagcgctatgtggacgagggctacaccgacctggtgcacctgagcatcaacgccgccggttccagcacctacaacaacgccatcaaaggcgccgagatgctggccgaggagcgccccgaccataagctgaagattcagatcatcgacagccacacctattcgatgccctacggctggtatttctgcgagtgcgcccgcaaggtgcgcaacggcggcgagctttccacctgtgtggacgagctgaagcgcaagctggactgcgtggagatctgcctggcggcttacagcctgaagcagatgaagaagtccggccgcgtcagcgctgccgctgccgtggtgggcgacctgctgggcatccgtcccatcatcagcctgaacgccggtgtctccaaggtcgaggccaaggtgcgcggtgatgccgctgtgcccccggccatgatcaaatgggtggagagccgcgtcgactcgatgaaggacaccccctacatggtggcctacacctccagcactgccaagcgggacgagctggtgaagctgtgcaaaaaggcctttggccatgcgccgatgatcgtcttccaactgggtggcgtggtcagcgccaacaccggcccggacggtattgccattgtatacgagggtaagccccgcaacctggaggcttacaccccggaactgccgtaattttagggatgagcaacaatcgcaggctctctcccccacccgctttgcgggaccgcttacgcggccgggcccctctgtcgctgcgcggcatctccccccactgtggggcgtcaccctcgcagagggggcctttacgaaagaaaataagattttcgccgcagcctattgcaaggggctgcggcttttgttataataatcttttgttgagcaacttaggattttaggctccgccgcagttttgcggcgcaaaccgatggcaggctggcggtctgctatacggtcaaaatctatccgccggagtattgtatgaatcagaaatccatgtccgtcaagcgccttgtgcgctgtgctgtcattgcagcgctctacgttgtgctgtgcctggtgctgcagccgttctcctacggcgcggtgcaggtgcgtgtggccgaggcattctgcctgctgcctgtctttggcgccgagtatatcatcggcgtcacgctgggctgctttctggccaacctgctgggctcgaccgtgatcgacgtcatctttggcacgctggctaccctgctggcctgtctggtcacctacaagctgcgcgatgtgcgcatcaagggactggccattccggcgtccctgccgcctgttatctttaatatgatcatcgtgggcgcgttcgagatcaccttcttcttctcggatagtgcccccacggccgccatggctgcgttcaatgcggtcacggtcggcatcggcgaggtcatcagctgcacgatcctgggcgtggccctggtcaagctgatcgagaccaacgccagcctgaagaagatctttacagaagaataatgaggtaacctatgcgcccggaactgattttgtgggattggaacggtaccctgctggatgatgtggaactttgtgtagacgcgctcaaccgtctgctggaaaagcatgcctatccgcagcggtacgaccgcgatcagtaccgggcaatttttggtttcccgattgaagaatattacgtccgcgccgggtttgatttcagccgccacagctttgccatgctggccgaggaatatatggacgactacatccccgccagcgcggcctgcccgctggtagagggcgcgatagaagcgctggatgccttccgcgcggcggggctgcggcaggtgatcttatcggccagcccggtgcccacgctgacccgccaggccggggaacgccatgtgacgggttactttgaccgcctgctgggtttgggcgacatctacgccaaaagtaaggtggaactgggccggcgctttatgcaggaggagggcatcaatcctgcccgcgcagtgatgatcggggattcggtacacgattttgaggtggcgcaggccatgggaacggcctgtgtgctgcaatgcagcggccaccagaaccggcagtcgttggcagccaccggcgcaccggtagtagagggcctgcgcgaagccgcgcagttgatcttggggtaaagcattatagtaaggggaaggtaaaatgtctgaccgtgtaaaaggtgcctgcctgacgatgggtggtgcggcatgctggggtgtttcgggctgcatgggacagtacctgtttacccgcgaaaacatggactccacctggctggtacctatccggctgtttctggctgggctgatcttgtgcacgttctactttatcaaggaccgcaggatgctgttcgacccgtggaacgcgaagaaaaatccccgcaacctgctggatctgctcatttacggcctggcgggcgtaagctgctgccagttcacctactttttgaccatccagctttccagcgcgggcatgggcaccattttgcaggacctttcccccgtcatcatcctgctggtggtctgcatccagcagcaccgcgggccgcgtctgtttgaaatttgcagcattttgttggccctcatcggtgtgtttctgcttaccactcacggcagcctgaccgatctggccatcagcccggccgcgctgctgtccggcattgccagcgcctgctgcgtggtcatctacaccatgtggcccaaaaagctgcagcagcagtaccccacccccatgctgcagggctgggcattcttgatgggcggcacgatgttcgccctcatcttccgcccctggacgatgaactacgtgcccaccgccatgggggtattcggcatctttaccgtggtggtgctgggcaacgtgctggcgttcagcctgtacatgtcaggcgtgccgctcatcggcccccagcggtcgagcctgtacagctttgccgagccggtcaccgctgccatcatcagcacgcttgtgctgggcagcccttttaccgtgtgggatgccatgggttttggctgtattttcctgatgctggtgctgctgagcctgcccgccagggctaaaaactaaatatatttgtaaatacacccgcgcaggtttgacagcaagccctgtgcgggtgtattatagtaaggtatgtaagtgctatatagctgccctgtcccgggcggcggaaaatacaggggattttataatgtctttttttgaaaaactgtttggttccttctcggacaaggaactgaagcgcatcaacccgctgaaggacaaggtcctggccctggagccggagatgcagaagctgaccgacgagcagctgcaggccaagacgactgagttcaaggcgcgcctggaaaaaggcgaaacgctggacgacctgctgcccgaggcttttgccgtctgccgtgaggctgactggcgtgtgctgggcatgaagccctaccccgtgcagatcatcggcggcattgtgctgcaccgcgcctgcatcgctgagatgcagaccggtgaaggcaagaccctggtggccaccatgcccgtttacctcaacgccctgactggcaaaggcgtgcatgttatcaccgtcaacgattacctggcccgccgcgatagtgagtggatgggcaaagtctaccgcttcctgggcctgaccgtcggcctggtggtgcacggcgttgaggccaacgaccgcaaggccgcctacgctgctgatgtcacctacggcaccaacaacgagttcgggtttgattacctgcgcgataacatggtcgtttacaaggccaacatggtgcagcgcggccacgcctacgccatcgtcgacgaggtggactccatcctcatcgacgaagctcgtaccccgctgatcatcagcggcaagggcgaggactccagcgtgatgtacaagcgcgccgacgactttgccaagacactgaagaagagcgttatcgtggaactggacgacaaggtagccgctgaggagcaggtcgacggcgattatgtcgtggacgaaaagcgcaagaccgctactttgaccgaatccggcgtgcagaaggccgaagccttcttccatgtggagaacctggccgacgccgacaatatgtccctgcgccactacattgacggcgccatcaaagcccgcggcgttatgcaccgtgacatcgactacatcgtcaaagagggcgaggtcatcatcgttgacgagttcaccggccgtctgatgtatggccgccgcttcaacgacggcctgcaccaggccatcgaggccaaggaaggcgtgaccgttgctgccgagagcaagaccctggccaccgttaccttccagaactacttccgtatgtatgacaagctggccggtatgaccggtacggcttccaccgaggctgacgagttcagcgagatctacggcctgaacatcgtcagcatccccaccaacaagccccgcgcccgcaaggacttgccggacagcgtgtacaagaccgtcaacggcaagtacaacgccgtcatcgagcaggtggccgaatgccacgccaagggccagcccgttctggtcggcaccgtcagtgtcgaaaagagcgaggctctctccaagctgctgaagaagaagggcatcgagcataacgtgctgaacgccaagcagcacgagcgcgaagccgagatcgtcgcccaggccggtaagcagggtgctgtgaccatcgccaccaacatggccggccgtggtaccgatattatgctgggcggcaacgtgtcctacatggccaaggccgctctgcgcaaggagctgagccgcgacctgaccaaggacctggcccagctgaaagacgagtacgagcacgccaaggcccgcgccaaggctgccggtaccgagctgcccaccccgccggaggagaccatcgacgcccagctggagcacctgatgaccgagtgcgacggccacgccgagaccgaggacgacgccgtactgcatgcccgccagcgctttgaggagctgtgcgaggagtttgagccggaaatcaagcgcgaagctgctgctgtgcgcgaggccggcggcctgttcatcatcggtaccgagcgccacgagagccgccgtatcgacaaccagctgcgcggccgtgccggccgtcagggcgaccccggtgcttcccgcttcttcctcagcctggaagatgacctgatgcgcatcttcggcggtgagcgcgtgcagaacctgatggacagcctgggcttggaagaggatgtgcccatcgagaataagctcatcaccaacaccatcgagagcgcccagaagaagctggaagcctccaactttgccatccgtaaacaggtgctgcagtacgacgacgtcatgaaccagcagcgcgagatcatctacaaacagcgccagatggtgctggacggtgaggacatcagcgataagctgcatgagatgatgcgccagtccatcgacgacgcctgcaccaactacctgaacggtgagaccgccgacgattgggatttcgccggtctgcgccgccacttcatgaactggctgtgcctgcccagtgacttcaactacaccaaggaccagctggaggatctgaccaaggagggcatcgccgatgagctgtataagcgcggtatggacatcctgaccgccaaggagaagaagtacggctccaagacgatgcgcgaactggagcgtatctgcctgctgcgcaacgtcgactccaagtggatggatcacatcgacaacatggatcagctcaagcagggcatgggcctgcgcggctacggccagcatgaccccgtggtcgagtaccgcattgaaggctttgccatgttcgatgagatgatcgcctccatccgtgaggatgccgtgcacatgctgctgaccatcgagatccgccagcagaacgccgagccgaagcgtgagcagatcgccaagcccaccggcgagggtgcacccacccaagctggcaccaagggtgccgcccccgtgcgcgtgaccaagatcggccgcaacgatccctgcccctgcggcagcggcctgaagtggaaaaagtgcacctgcaaagagtaccaccccgacctgtaaactaaaagccaaggcgcaccgttacatggcggtgcgcctttttaagtatgaggtatgtttatgaaagcacgtatcatccaggagccgcggtgtgtgctgctgtggcggtttgacgagaaaaacgccgggtatgacgacctggcccatgcagcgcgggcctataagctgaagatccgctgcatcggggacggcgacctggctgccaaggtgggcgacctgtgccgggggctgccctcccctgcctttgcgccgctgattaaggtcagcgaccgccccgccatgatcgtgagcggcctgcgccacgataccggcgagctggggcatttcctcgacctcgtcaaggctggcggggcggagttcccgctgcggggcatggtgacccctaccagcaaaaactggacgctgctgcagcttttgcaagagctgaacagcgagcacgagaccgtggccgggggcaaagcatgaagcgactgctggccctggggctggcggcgatctgcctggcctgtgccctgcccttgaccgcctgcacgccccagcaaaagctgtacagcgccagctggtttgacatgtttgacactgtcacgatggtgcagggctacgccgccagccaggaagaatgggacacccaggccgatgccctgcacgacgatttggagcattaccaccagctgtttgacatttaccaccactacgacggcatggtgaacctgtacgacgtcaacgcccgtgccgggcaggaaccggtgcaggtcagccgggagttattcgactttttgcagctgtgcaagaccagcggtgagacactggcgggcggtgcggtgaacattgcggcgggggctgtgctgagcctgtggcacgatgcccgcgagagcgagaatcctgccccgcctgcggcagatgccatctccgaagccctgcagcactgcaacttggacgacctgctgctggactccggcaccctgactgtggctttttccgatccggccatgacgctggacgtgggagctgccgccaagggctacaccgctgtgcaggcgggccaagcagcccgggagcgcgggctgacccatgccctgctgaacatgggcggcaacgtctataccaccggccccaaggccgacggcagtgcctggcgcgtgggggtggaaaacccctggcccggtgaggatgcgccgcagtacgtgcagaccgtggagctgaccggcggtgactcgctgatcgtcagcggtgattaccagcggtactttacctacgagggcaaacgctactcccacctgatcgatttgaccacaggctgcccggctgcctattacagcagcgttgcggtgtattccagcccggatgaggggctgggagacttgttctccaccgcccttttctgcctgccgccggagcagagccggcaggtggccgacgacaacggcctggccgtgctgtggctgggcacggacggcgaggttgccgcccagaccgacaactggccgggtaaagcagtataaccaatagcagataaaaaacaaagcaccgctgtacgtgaaatttacgtacaacggtgcttttgctatatgtgctgaaaagcctccctctgcgagggaggtggcccgaagggccgaagggagaaactttgccttaagctctctcccccacccgcttcgcggaggcactctcccagagggggccttcaaggggcggcactttattgttccgcgctcagcaagatgcggtcgttgtccagtgcgtggccgacgttttcggcaaagcgctgcagcaggccgtctaccgtcatgtgggcgcgctcctcgtcggctacgtccagcacgatgcggccatggtccatcatcagcgtgcggttgcccaaggtaagggcgtcgtgcatgttgtgggtgatcatcagacaggtgatgtggttctccgccacaatctttttggtcagatccagcaccttttccgccgtggcggggtccaaagcggcggtgtgttcgtccagcagcagcagcttgggggtgacgagggtcgccatcagcagcgtcagtgcctggcgctggccgccggagagcaggccgacgggctgtttcatgcggtcctccaaccccagacccagggcggagagcttctcggcaaagaggtcgcgatcctttttggagatgcgggagaaggacgacgtgtgcccggacgcccgcaggtaggccagcgcgaggttttcctcaatggtcatgtggggggccgtgccgcgcagcgggtcctggaacatgcgaccgatgtacttggagcggcggtagtccggcataaacgtgatgtcctggccatccagcgtgatggtaccagtatccgagatgaactcgcctgcaatggcgttgaacatcgtggacttgcctgcgccgttggagccgacgatggtggcaaagtcgccgtctttcaaattcaggtcgatcttttgcagagccagcttttcgttgacggtgccggggttaaaggttttgctgatgtttttcagttcaagcacggcgggcaccttctttctcggcttgggagcggcggcggcggaacgctgcgcgggaccggatggtgggggcggcgatggccagcgccacgatgacggcggaaatcagcttgagacattccgacgggacgttggcgcgcagggccagcgcgatgatgaagcggtagatgacactgcctgccacagccgccgcggccttggtccacatgccgccacggccaaacagcgtctcgccaatgatgagggacgccaggccgatgaccaccatgccggtgcccaggttgatgtcggcagatttctggtactgggccagtacggcgccggaaagggacgtcatggcgttggaaatgcacaggccaatcgtgatggtgaacgccgtgttgatggaggaggcacgcaccatgtcggggttatcgccggtggcgcggatggaaaggcccatccgggtgcccaggaacaggatcaacagcaggcagacgaccacggtgatgaccgcggccaccagcagcttgtacgggaacacatcgccaaaaagcgcctgtgccatcgtaaagatggtctgcgttttcagcattggcacgttggaggaaaagcccataaccgccaggttgacggtgtacagccccgtgttggtgatgatgccggcgaggatcgacggcacgcccaggcgggtttgcaaagtggctgtgacaaagccggaagccgcaccggcggcaatagccaaaaacagacccagcaccgggtgcccggccaccgcggcggtagccgagaccgcgcaccccagggtaaaggtgccgtcggtactcatatcggcgatatttaagatacggaagctgaggaacagcgccatagccaccagtgcgtagatgaagccaagctccagcgcactgaagacggttgcagcggtaaacatgggcaaaacgtccttcctgatttgatggggtactgtataaaaagggagggcagctcggcgtgggccttgcctgcacctccctttggggagttaagatttattcggcggtggtctctacttcgaccacggtgccggccagatcattgaaagcgctgtagtccaggtccagggctgcggcggtctcggtgttgacggtgatgatgccgccgtccatgacgtggtactcaggcacggtgccggtctccaggatgtccagcgccatatcggcggtgtaggtgcccagttcggtatagttgacgccgcaggtggcgaaagcgccggcggtgacgaagctgtcggcaccggtgtagaacgggatgcccgcattggtcagcgtctcagagacggcagcagcggcggccatgaccacgttatccgtgggggtaaagacggcgtcgacctggcccaccagggcgttggcggcggtcatgatctcatcgttggtgttgccggtcttttctacgtaagcgatgcccttggcatccaggtaagccttggcctcggcaatgggggtggtggagttggcctcggagttggagtagagcaggccgatggtcttggcctcgggctggacggcgaagatcatgtccatgatggactgggtgttcagcgcgtcggaggtgccggtgacatagtcgatgtcggtcaggtcagcggcggcggggtccgagatggcggcgtagatgaccggggtcttggtggactcgcaggcggtggccatgcactgggcggccagcgtggcgatgggaatgacggcatcgtaaccatcggagacgacctgggtgccgatctggttcagcgtggtggcgtcgttctggccgttgaaatccttgtactcaatggtgatgcccttctcggcggccttggcgtccagctcggcctcgatggcggtgcggatctcatccaggctggcgtggtccagctgctggacgatggcgaccttgtaggtggtggcgtcggcggcggatcccgtggtggaatctgccgcggcggaagaagcagtgctttcggcagcagaagaagcggtagaagcggaggcaccgcaggcggacagagaagtgagcatagcggcggcggtcataacagcaacgaactttttcatggtaattactccttgttttgtaaattggtttgttgtttggcaggctttacaaaacagattgccatcgctctttcaaagtaatgtgtttcatcgttcatttcccctcttgtgctgtgtaaggaataaaaaactgcccttgcacagaaatcctcctgtgcaagggcagataacaatttatctgtggtgccaccttgcttgccgcaactataaactgcggccactctgtagggaaccaacattcccctgccctgtaacgggagctgcccgtcagcggatactcaagactttggcctttttccccgtgccctccgcgaaccattatgctgtcccgctttgcgccccattcccagcaacaggggctctctgtggctgcgctgtcagctttactttcgcttcattggtttaaagcatttataccacactgttcccgttttgtcaacggctttttgcaaaaaactttttaagaatctgtatcttcttcttcatttgtcgttgtatcgtccactttatcgtgcaggatcagcagcttggcggcccactcccctgccggggtgtcggtattttccataaaggcagcgctggcggcaaaggggctgtcctcgccgcacagggacacgatggggcaaa

SEQ ID NO: 7817 - DNA, 30668 bp, Unknown
  gut microbiota DNA sequence
cgtcggatttggcaagcacttcctgcatgcgggcggccagggcgccgtccacgggcagcaggtcatccacgccggtaaaggccaggatcttggcgtccgggtaagctttcaacgcctgctgcaggtcgtaggccagcagacccgcgccctcgtcggcgttgatgctgcccatcatgccctgatacaggcggtagaccagtatgtattggtcaccgaaatagcgctgcatctggcggggatacttctgcatggcggtcttgaaccagtaggcggactcgcgggcagtgctggtcttaatggcgctgatggcctcggcaatttccggctccggcgtgttccaaatctggctggccagcatttcaagcgcctggccaatgacggcatcgcttttatcagtgcccatgcctacggcgtgcaggcggccgggatagctggcgtagacggcctggcatatggctttggcatcatcgcggtcagccttgggcagtacggccaggtagcggtccaggctggcggccgcgccggtctgtaagtagttgtccagcagcgcaccggcggcggggccgtaggggacggccaccacgctgacgccctgggattgcaaagaggtgatgaggttttgctgcacctcggccgcgcgggtatcctccagcccggccaggaacagccggtaatcggcgttgccaaagtcggagctgtccagcgggtagctcagatcgacggtgtgcaggttggatttgagatagtctgccgtggggtcggacgccttcacagcggtctcgcgtgtggcggtgtcggccagaccctcggcctcccgtgcggcggtctccggcgtggcggcaatgacctcctccgcgctctcatcattgtacaaaaagtcttgcagggcggtggtatttacgtaccagtccgggtcgtacatcaggcggtcgtccataccggtgcgtacgccgtaggtgccctgcaggggcatggaaagctgctctacatcgcagcccaaaaagcccggcagctgcaccagcagcgcggcgatctcggttttggtaaagttggtctgtaccaggggcagcatggtgttcagcaggttatccagctcggtgacgctggcgttctggatctgatccagaacggcctggataacggtgcgctggcgctcgatacggtgccagtcgttgtcgatcttgcgcaggcgggcgtactgcagggcggtgtagccgtcgaagtggttgaggcccgggtccacgtggttgacgatgagcatcgagttggagggcacttcccagttcagggccttggcttccatctcagtgatgtcgatgtccacgccgcccacggcgttcacgatctgcacgaaggagttgaagttgatgcggacatagtggtccacctgcacgttgaagcaatcctccacggtgtccatggtcagcttggcaccgccgtagcggaaggtgtgggtgatccagtcatactcgccctcgtagccgtccagcaggatgggcacgccgaggccgcgctcgatggagaccaggcggatggcatggttcttgatgtccagcgagaccagaatcaggctgtcggcgcgggcgtcctcactgaactcggtggtgttcttggtgccgtccagctggttcaggtgggtgaaggcgtcggcatcgttgacggcctcggtgcgctcgtcggtgccgatgagcaggatgttcagcacatcgtcgtcggcaaaggggctgccctcgggcatggtcatctcgtcgtcgctatgtaccagaccggacccgtccaggtcctgatcctcgtccgcatcaatggtgcccatcgagtcaacgctgccgtcgttgtagtgcagcaggtccagcttgccgttgacgtacagcgttgccagcccagccagcgccgccagcacgatgacaacgaccagcaggatcttgccccagaggggcagcttctttttggcggccgtggcggtcgcggtggtttcggttgcttcattcttattttcagtcacgttcatatacttcccttttgtaagcgccgccgcgcagcgcgaagatcacatgcgtagtagagaaatgccagcccggcaaagacggtaagccccaaagcacgccaggtaaaccagccgtgctggatgctgtgggtgcgcagcagcacaaaccatgcgggggtcatgcaggtggtaagcgccaacggtaaggcacgcaccagcgcagttttgctgcggatggagaggatgaacagggcaatcagcaccgccagcaccgcgagagcgggccagaagagatgatggctgtttaacgtatcgtataaaaagatgaaaatattacgccatgtcaattccatgccgtgccaggtatcggcggtggtgcgcacctcggcctggtgcagggcatcggccagtacgttattgtcggtgacggccccggccagcgcccatttgccggcccagcataaagcgtagccggtgccccagcacaggctgccgcccacggccaaggcgcactgcggcacgccgcctcgcaggcgctgctggggttccagcagccagcaggtcagcggcagacctaaggtgatgatgggcgtgaccagcaggtcgcagaaagctgtcgccgtgcccagcaccagcagccctaagcacagcacatcgctgcggcggggcttggccagcacccaggcgcagcccgcgtaggcaatcataaagcaggtgaaatactgcacctgatggggcacgaaccatacactcaccgccaactggctgacggcaaaccacacggcggcccgcagtccgcagcggcggcgcagctgcaccagcaccacggccagcagcgcaaacagcacgatatactgtacaatacgcacacccgtgtagggcataagcagcagcaaaggccgcagccagatgagatacccgtgccagtaccgcgcgtaggagaacggctccagcgcgggggcatcggtacgctgggcgccggtggaccaatccttttctatgtaccaggccaggtcatcggccagggtctcgaagttatccacattgtaggccgtgttggtcatcatggcctgcaggggcggcagttcgtcggcgctggcggcctcaaacagcatcagtgtgtcggtgtagttgtccatctgaaagagcttgaagcccagatattccgggtacagcccctcgttttggatcgtccgggcggagtcgtagacatgctgccgcacccgttcccccggcagggcgtaggcagccagcagcagcacaaacagtatggccagcgtaccggcaaaggcggccagtgcccgcagggcaaagggacgtttttgtttttgcgtgctcacggcacacctccccattgaaaagtacccccctattatatgctaaatagcgacagctttcaaccggatgaatgtgaaatccatttgaattttgccgtgctatacggcgtcggtctggcgggaaaccgacagtacaatgcccatttcccccagcagcatcatcaggctggtgccgccggaggaaaaaaatggcaggctgatgccggtgttggggatggtgttggtgacgacggcgatgtttaagatggcctgcaagaccacctgcaccacgaaccccacggccaggagtgccccgaatttatcccgcgcacggatggcgatagacatgccccgcagcagcagcgccagaaagagcgccacggccagcgccgcgccgatgaagcccagctcctcgcatagaatcgagaagataaaatcattctgcggctcgggcacatagaggtacttttggcggctgttgcccagccccagcccggccagcccgccggaggcaatggcgtagaggctttggatggtctggtgcccttcccccagcgggtcggcaaaggggtcgcgccaggaggccaggcggtcggtggcatagggcaccagttccggcagggcaagcaccgccgccgcgatggcccctgcccccaggccgcccgccagcccaaaccactgcagcccggtgccgcccacaaacatcagcactgcgccgatggataagatcagcagcgtacccgaaaggtgcggctccagcagcatcagcaccgtcaccacgcctaaaatcagcccgaagggcagcacgcccccggcaaagctgtgcatgcggtcgtgattcagcgagatgatgtgggaaaacaccagcaccacggcaaatttggcaatctcactgggctgcagggtgcctaagcccggcagtacgatccaccgtttgcagccgttgtactccggcataaacagcacaacgacgagcaaaatcagcgacagccccataacaggccaggccagtttgtgccacacatggtaatccaccaggctggcggcgtacatggccgctacgcccagcgccgcaaacaatagctgcgggcggatgtaggtgtaggcgtcgccgcggcgatagagcgccactgcgtacccggccgagaagagcataataagcccatagctcagcagcgccagcaaaacgacgaggaacggtacatccgggctgggctgttcccgcaggcgggtgcgcagggcggcagggtcaaagaaagaagtggtcatacaaaatccccccgcgtccagtatacgcagggggaaaacaggctatgcagtttgtggtttacacaaggccgaaatggcgcagggccttggcgatgccctccttatcaatatccgtcgtcacatagtcggcggcggctttggcgtcgtcacaggcattgcccatggccacgccgataccggcatattccagcatggcaacgtcgtttccgccgtcaccaaaggcgatggcttcatcccgggtccagccaaaatgcttcagcatcgcggccaggccgttgggcttgccgccgccctcgggcaggatatcggcaaaatcggggctccaccgcacggccaggcagccggggcagcggcggaggaactcttcctcgtagttatcgggcagaaaggcgctgagctggtagatggggttttgtgcaatgcgggcagcaatgtcagcggtcccctgccccagttccttggcaaagttggcactgcgctcatcgatgagattgaaatagcagttgtccttctccacaaagccgatggacagcttttctttttcaatatagggcagcagcgtgcgcagggcggcggggtcgatgtacttgctgtagatgacctcgccatccgccataaagcagtactggccgttcatggtgacatagccgtcccagttcaccttttgcaaagcgggcagatgcggcaggtgcaccggcggacggcccgtggcgatgaaaattttcacgccgttggcctgcaaggcgtgcagcgcctgcacggtggaatccggcatttcgtggctaccgaacagcagcagcgtgccatcgatgtcaaaaaaggctgctcggatgtgtttattcatgtttcagatctctttccattagagccgcaagggcattgcgggcttcaagcttaccacgcaggatagcgtccacgctttgcacgatgggcatttccgtcttgtactttttggcaaggcggcagacggcgggcagggcgttgatgccctcgaccacctggcccacctcggacttggcttcctcggctgttttgccgcggcccagcagcataccggcgtgcaggttgcggctgtgcatgctggtgcaggtcacgatcaaatcgcccatgccggacaggcccgcgaaggtttcaggcttgcagcccatggccagacccagccgggtcagctcggcgttgccgcgggtgataagggcggccttggcgttatcgccgtagcccaggcccagtgcgatgccgacggccagcgcaatgacgtttttgaccgcgccgcccagctcggtgccgcggcggtcggtgttggtgtagacgcggaagctgggcgcggtgaaggctttctgcacggccttggcggcggcttcatcctcgctggcggcaacaattaaagtcggcatatcgcgggccacttcctcggcgtgggtggggccggagagggccaccacgcgggcggtgcgcttggccttggcaagctcatcctcgatgatctcgctcatcgtcatcagggttttgtcctcgacccccttggccacgtccacgatcagctggccatccgggatgtacgtggctgcctttttggcggtggagcgcacaaacggggacggcaccgcaaacagcaggatgtcgcgcccggtgcaggcctcggcaatatcggcggtgtaatgcatggcggagggcagctccatacccggcaggttggggtggcggcgggtggtgctgagggatttcagctcggcggggatcgcgctccaaacggttacatcgcggccgttgaccgccagcagacgggccagtgcaatgccccaggtgcctgcgccgaatacggcaattttagtcatgggtggttctccttacaaatggtgtcagggtcgctgcagcaggcgtgccaggaagcggtgccccgtgcgttctttcagcacaggctcggcctccagggcgacacgctcgtagcagttgacgatgcgggtggccccataccggtgctcccgtgggatgttgcagccgtaggtcagatggatatgaccatgcagcatcagctggggatggtagcggtccagcagctcgtgaaagacggtgaagccgcggtggggcaggtcgttcaagtcgccgtagccgtgcatcggcgcgtgggtgacaaggatgtcaaacccgccgtggcggtcgatcttgccccgcaggcggttgatacgcttgcgcatctcggcctcggtaaactgccaggcaccggtgcggtagcggcaggacccgcccagccccacaatgcgcagcccgtggtagacgaacaggtcgtcatccaggcagatggcgccctcgggcgggtgatggtcatagttttcgtcatgattgccgtgcacgtacaaaaccggcacgggggccatggtggtaagatactcaagatagtggcggttcagatcgccacaggctataatgaggtctacgccctcgatcttatcgggagtatagtaatcccaaagcgccttgcactcctcatcggcaatgcacagcagcttcatagcgtggcctccttctcggcaggcagctggtcacggtggataccctgcatgcggtacatcgggcgggcctgctcggtcaggtcgtcgtactcggggatggtgccgtccacggcgtcgcacagatagtccatgtggacgatctgctccacatccagcccgtggcggccgctgttgcgcaccgtaccgttctggtcggtgatgcggcaggcaaacgggtcgatcataccggcggtgacgcctgtccgcaggatgcgggccagatgcgccacatccgagggaagctcgcggctgagcagcacgtccatgacaccgctgttcatgccccaccagtagttgacggcgcggccgtcggtgccggatttatcccgcacccagccgccgtccagcacgctgtgcaccacattctcgtagaactggccccagtgccagaagggcgtagccagatcttgcaatacgccgcccggacggatgaggaaggtgccgaactcctgctgggggcggcccggcaccggtgcgtcgcggcccgaaaccaccgtgatgcccttgcgggtaaagacggccagcgggtcctcctggtcgggcaggcaggtccagcgcagctcaatgcgggcgcgggggttgaccatgcgggcacccagcgcaaaggcgttgatgttggcgggcacgccgaagctggggtaatccgccacatagccgatgcggtcggtgccggccatggccccggcgatggcgccggtgatgaacttggcctcgtatacgcgggtgtaataggtgcggatgctggcgtagggcatctccatggagcagttgaggatgcgcaccgtggggtgcttgactgccgagcgcaggctggcgcccaccagcttggggctggtggtgaatacgatgtctgcgccgtgggagatggcggcttcgatcagcaggtcggcgttccggccgggcacagcgttgaagtaggcaaaggtctccaccttgccctcaaatacactgtccagctgggtgcggccaaactcgtgctggctggtccaggaactggtctccggggtgcgctcatggatgaaggcaacttttaagtgggtggggggtgccgggtggatgggcaaaatgcgttccagcagttttgtctgggcaggctcggccggcttttcgctgacggtgacggggtcatcgttctgcagggccagcacgtcatcccacagggcgtcgatcttttgctgcagctcgttggggctggctttggtcagctcttccatcgagtacaggcgcagaagcagcagcagtacgtcccccacagtggcgcgcagcttgtcgccgcccaaggcggtgtaggccttctcgacccagttgtacagggacaggatggcggcgcggtcctcggcggtccacttttcctcggggcctttgcccatggccttttgcaggcggccgtagctgccgggcttggtaaaggtcaacagataggtctggatgagcggatagtagtgcatgaactcatagtacaggcgcacttccggggtatcgttgtatttgggcaccacgcgggtgacgttgccggtcacgctgccggcctcgaagtatttcagcacgctgacgcgcttgttgccctcctgcacatagaagcggcccatgtactcaaagcagcggatggggtcacggatgccctcgtccacgtgggccatgcaaagggcgacccacttggagccgaactcgctatttaaatccagcaggggcataaaattgctggcaaaagcggcggtgcggcctgccgttttggtgccgaccaccagctttatcgggatttcgaccaggcccaggggcagctggttttccacctgcacgttttgcaggatgtcatccagcaccggcaaaaacggggactgcccgtggagcatcttctcacggtaatctttctggcccagcttttgggccttgccgtattcttccagcgcttcattgcgcagcatgggcagttcctcctttaaattttcgtgcggctatcagtatagcacacttcgggaaaagatacaaactcaaaaaagcctctatccggcagggagagagtttcaggcaaggctctctcccccgctttctacatgcacggctttggggtagaccttggccatgcgggcgtcgtcgaaatgctcgtcgaggcaggcggccaggctggtggcggcggcttcgccgcggacacgctcgttatagcgcaccagcgcggcggagctgacggcgatgttagcggccatgaacacgcacagcccccaggtcagcacggtgccgaaccgcttggggagggactcgatcatgtgggagatgggcgggtacaacaccttgaaccaggcaatggcggcaaagccccagaagaagcagtacagcaggttgatgcgcccgcccaggttgaacgggatggcgctgtaatcccagaacaccgtgccgaacacgacctcggtaaacacgctgcataaatactcatacgcgccgcccagcagggtgcccgccacaaacagccagctggcggggcggtccttgtagcggtagagcagctgggtcacggcggcaatggccaggccccacacgatggaaaacggcccccacaccacgctggaacggctcatccagtaaccggcagtgatgcggcagaagatcgtctcggtaatatcgcccaaaaacgcgccgatgaagaaaagcaggatgatcttatacgggctgcatccttcggcaaaggtggtgcttttggcccggcgctggcgccggaaggtcagggccgggtgggccttgttcatgcgctgctcgacccagcccagaagcgccatgccggtgttgacggtaaagttggccaggcggttctcgatctccgccccggcggcccagcggtaacgcaggcccagcatggccaaaagggtgcccacggcgtcgatggcaaagatgaccagcgccgcccacaggataatggcgatcagccggtggggcagcaagccataaagggcaagcagcagcgggttgccccattttaccgccacaacgcccaacacgccccacagggccgaggcccccaggcagacgtagccatccaggttaaacggcatatcgctgtagtcccaccagcgggtgtggctggtgcgctccaggatgtggccggccacccactcgatgacggtggcgtacacggcgctgaagacggccaaaaagaaccagctgtcattgctgaggtcccgcagagcaaagctgatgaggtgggcgccgatgccgtacagaatgcacagcggcccactgaggacgccgcggtcctgatacctgcgcctggtcacggcggtgtaaaggacctcccctacccagccgaggaaggagtaggcaaaaaacaaaaacaaaaaagaataaaatgtcatacaaaactcctggttctccggcgtcccgggcaggctgaaccgcccggaaaatgcggggcgtgaaattgtaaaccgacttgccacacagacgagacgatccccccgtcagcttcgctgacagcccttcgggcccgggctcctctgtcgctacgcgacatctccccgcactgcggggagtcaccctttatacaagggggggctttttgggggcggcggcttacacgccccgttcctgcttgctgaagacgcagccgcagtagtcctggcggtagaggccgtactcggtacttaattgcaggctgcgcttgtagccgtcctttttgcggaactcgctgggcagaaagcacacgttgtatttctcgcccaattcctgccccagggcgttgatgcggatggggtctttcatgggcgagatggacagtgtggtgcagaaccactcgaacccatgggcggcggcgtaccgggcggtctgctccagccgcaggcggtagcagacggtgcagcgcccgcctttctccggctcctgctctaagcccttgacggcggtgtagaactcgtcgggttcatagggcagctcgatgaccgggtagcgatagcccgcctgctccacaaagcgctccagctcggcctcgcggcggtgatattcggcgggcgggtagatgttagggttataatataaaatggaaagccggaaatgctcggtcagccgttccagcgtggcgctggagcagggcgcgcagcaggcatgcagcagcagcgtgggtttggtatcccccagccggcgcaggaccttttccatttccagttgataattgatgcgattggccatgatgcggcacctctttgcctggattttgatgctgccattattgtaccacattttttgggtttcgtatatccgtaaaattgctgcacggttggaaaaagcctccctcgcagagagggccaccaaagtcgcagccacgtaaatgcccccgcacccgttacaagcttatcacacaatttttttgtatttcgataatctatgcgggaagcctgccatgttcccgtggctcaattggcagacgcggcagatttaggttctgttatttgtggattcgacttccaccgggaacacttatatgctggattagttcatttggtagaaccccggttttgtactccggcaaggcgggatcgtagcctgcatccagcaccattttttgtacccaaaatcaaatacagaaaggactgacgcaacccttggatgaccccaacgtcaataacccacgactaaagtcgtgggtctccttgccctgattgatgaaatcgaccgcatccagccgctcatggatttcatgcaggacgaccagaataaaaaggcaatccaccagctgtctgccgtcctcggccgtatgcgcatcgtggcagacatacaatccaggcgcgtttaccatccgtgcgttttaacaggagacacaagatgattttcactttcccccacgaccccaacggcacaaacgaaaccctgttccaaaatacaaagctggaactcagcccaggcatcacagttctagtcggctgcaacggctccggcaaatccacgctcttgcatctgatcgaaagacactgtcttgaaaacgaaatcccctgtttcagttttgacaacaaaatgcagggtggtacacatgccatgtcagctgcagaatggagcggtgatgttgattctctgaccagccttgcctttcactctaagggcgaacagatcagtgcgtgtcttggtaataccgcccgcgcaatcggcagaaaagtccgttccctgcaaaatggcggcaatcgtgacgcaggtcaagccggttttctccaccagcttgcccacaaggtcgtagcgtacattgcccagagccacgcggtcagcggcgtcctgatcgttgtactttttgacaaacgcctgcccctgctccaactgctcgcgggaggcaaggtgggaggtctgttcgccgtattcggttttgacatacaccttggaaatattcaggtgggcgtccagccccgcaccgaacggtcgatcagctcctgcgtgtcaaaggaaaccgtgtaaagggttttgcggttgatgcgctgccacagcttggtaaattcgcggtcgtgcagtttctgctcgtccactttggcttgcacattgttgtcgtgggcgttctccgggcgcagggcgcgggggtcgtagatgctgctcaaaacctgcatcacagcgccctcgcagcccagcacgctttcgtccatgcgctcgctgttctggttgacgcacaggcgcaaaccgcgcccgatttcctgacggctgcgaatttccgattcgccctgcgttttcagtgtgcagatctggaacacattcgggttatcccagccctcgcgcagggcagagtgcgagaagataaaccgcaccggctcgtccaagctcagcaggcgttccttgtcgcgcataatcaggtcgtaggcgtcggtgtcgtcgctggtttgggtcttgcggtcaaccttgccctccacaaagcgggctttttgccctttttcttgtcaattgaaaaatacccctgatggctgctgtgggagtccatacggttcaggtacgcccaataaggtcaaaaagcaaggcgcaacactagcccggctacaccacataagcacatggtcagaattggattccatttgtaacgccgcagaacataaaatgcaatggcaaaactgcccgcaccaatccagtctatattagccgaggtttcattgttaccgttaaaaagaacagttgatagaatggacaagccggcgccaagaatcagtgcgacaacgactgggcgcagacaggccagaatgttttggagcaagaaaagatttttgtatttgcggtagaggtatgacaagagtgatacaaaaataagcgcgggtgtgatgcagcccagagttgcaatgattgcaccgggaagagaagctatccgaaggccgacaaaagtggcagaattcacggcgatggggccgggcgtcatttctgcgatcgtaataaggtcggtaaattcctgcatggttagccaagcgtgttgttcaacaacttgactttgtatcaatggcatggcggcatagccaccgcctatgctgaacataccaacttgcacaaagcttaaaaaaagttgccagtaaatcataatctaccgccctttctgtcaagtaatagtgcgcgcacaattccaaaaagtgttgcggcgagaatgataaatataacattgatatcatacacaaagctggcaataaaagctaatagcataagaccgatgtatatgggagaatgagtttccagaacgtttcggcctaaaccgcagacaacatccagaataacggctgcaacgcctgcttgcataccttttaatgcaaatgcaacatagacattggaggcaaatgccgcgtaaaataatgaaatgacagataaagttaccatgggaggaaggattgtgcctaatacagcaagaaacattcccagtagtccgtcaacctgccagccgacaagaatggcaacatttactgcgatagcacccggcgaggactgcgccagagcggttatgtccaacatttctttttcgtcaatccaatgaagctcgtccacgaatttttccttcatgaaggttgcaatgacaaagccgccaccaaaagtaaagctgctgatatacagcatactgaagaacagcttgcccagccgggcggtgcgggatacaactgatttatgcatgaaaataaagtgacctcttttctgtgatttgatactatcaagcatacagcttgcaaacagaattgtaaaatgctattatcatatcaaagatatacagtggagcgttatgttgtgaatgctcgaattttataggatgaggtgtcttatgccatatatcaatctgcttataaaacccgcctccagtctgtgcaatatgcgctgtcactattgcttttacgcagatgaagcggctaaccgggagatccccagcatgggcgttatgtcagaaacaacggcagaacttcttgttaccagagctcttgcggcggcaggaatgcagggcggtgttggatttactttccaaggtggcgaaccaacaatagcaggaaaacagttttttcgagcattcatagaaatcgtcaagcgtctgaatacaggcaatgtttcggtaaattatagaattcaaacgaatggattggctattgatgaggagtgggtttccttctttgcaaaaaacgatttccttgttggaatatcggtggatggagataagacacttcacgatgaatttcgtgtagatactgccgggaaaggaacgtggacgaggatacagaaaaacattcgactgttgcagcagatgggggtggagtgtaacctgctatgcgttgtgacacgccgctgtgctaaaagcgcggtgcggtgttaccatgcgatgaagaaaaccggagtacaatttttgcagtttattccttgtctggatccgttgggggaagaacgcggccggagaaaatggtctttgaccccgaaagattatggtgaattcctttgcgctttgtttgatgaatggtatcgtgactggaaaagcggaaattacaccagcgtgcggctctttgatgattatgtacatcttgccatggggcaacctggggaaacctgtgcaacaagcggcatgtgcggtgggtattttgcagtcgaagcagacggaagcgtttatccctgtgatttttatgtgctggataattggaaattaggaaatctgcgggatgactcttttgaaaaactaagagaaggggcctgtttacagcgtttcctgcaggatagcgggaaccgacccgcagagtgcaaggagtgtacttggaaaacgctttgttccggaggttgcaagcgtgactggacatggatggaaggtcaaccccataattactactgtgcttccttccagaagctgtttgcccatgctatgccgcgcatacaggaaattgcctccgcagagctacatatgcggcaaaatgcttatcgatgatcaaatgaatagcaggacattccgtaagccgcggatgtcctgctatttatttggtgaaaaaaccatgcagctgattgatttataaaaaaggatcgtcaggctttgaagattctggagcggatgccagcacgccacggtaaagcacttcggaagaaacacaactgacttcgggcaccgctttcgggtgctctatcacaaaaagaatcttggcggccaagcaagatccgatgggtttcggctttacatctatcgttgtaatacggtcggcaaagttcaaatatttgctgttgttgtcaaagcccgtcagtacgatacggccttcagggtctatccctttttcttcaagataacgctgaatgaaatgagcaatatagtcactggcacaaacgataccgtccagcatggttggcaagaagctgggaatcccaactgacaaagcctaccagtgggggaattccagacttggctattggcgtatggccggaagtccggttttaacgcgttccattacaaatgaaaaactcgcagcagcgggatatttcagtatcctcaactactacgagtccttgcacttatgcggttaaaccgccgtgtaccggtcgatacgcacggtggtatgagaggtcggccctcttatcttgagggtttcctactcgattgggggactgtggggatacagctgtatgaagtcggcctctgctttgcgcattccatgaatggaatgcggatctgtttctttggaagaggatcgtcccggggcagattcagtgaagttcaggccagtaatccttgttggcaacgatcatgtcgtccagaatctgtttggcgacatcggcactccacacggttttggaaagggtcatggcctgccagagcttctggtaactgtgctcgcaccaggcatccacgaccagtttttctactgcgacctgctgttccatcaggcctttttggaaagtgggaattctgccctgacagattttttcatatccgttggagcccacaaggcagggaatttccaccatggcgtccggatcaaaattttcaatagcgccgccgttgggtacgatcagaagcattcgctgctgggtattgtgggctagggcttccgccagatccacaatataactggcgtgcgcatctgcctgaaaattgcagttggccgaactgccggtttcgatgatacggcggcactcggaaaagacggtcttttcccggccgtccatcacttcattggcgcgggtatagtcgggattgctgtgcctgaccgcacggtcggggtacagataatatttcaggtaggtgttggggatggtgtccgggtcgagcgcatagacatcgcgggccatctcaaaggtttccgcccagcttgtttcggcgtgttcctgcggaggaatgccgtccatataaccgttctttttcatgtgctcacggatctgcggcatcaggtcggatccgtcgcttttgcggcggatactggtccaccatccaaaatggttcagcccgaagtatcgcaccaccatctctttgcgggaatcaaggccgcacatgcgcgccattttttcctcaagatccaccggcatgtcgcagatattcagaatgcgggagtgggggcgtaaccggcgggtcgcttccgccacaatggcggcaggattggagtagttgagcatccaggcttcggggctgtatttctccatgtagtccaggatttccagcactccgccaatggaacgcattccgtaggccataccgccgggaccgcaggtctcctgtccaagcactccgtacttcagcggaattttttcatctttttcccgcatggcgtattttcctacacggatgtgtgccataacaaaatccacatcggtgaaagcggtttcgggatcggtggtgtagcaaaaagcgatttgaggcgcatgctctttcaggtagatgccgcaggcttccgcgacggtctgctgccgctgcgcgtcgttgtcatacatcttgatctggcgaatgggaaagcggtccatatgttccagcagcatcaggacgatgccgggggtaaaggtgctgcctccgccggcaattacgatggaataggctttcataacagttacacctctttttaaatgtcggtataattttccagttttaggtttttgttgttcacataggtaaaatagatcagatcaatcagatatagagtcgcaatgcgggaagtggtggaaatccgcagatggttgggttcactggagtggatatagacggtcaggtcacagtcctgctccagatgagtgttgctgtcgcaggtccaaagaatggtttttgccttcttttcccgggccagccgcaggttttccataacggcctgcgtggaaccagaatagcagaacgcgatgaccagagaatccgcgttggtgtttttgatggcaaatttctgtaacataatgtcttcgatggcacggcagcgcaggccgatgcggccaaaacggatctcaaagtccttggccaccagatagctggtgcccagtccaatcaagataatctcctttacctcatccagcatggaaagaaattgttcttgtttttctcgggtgaaaagctgctcggtaacatggcaggattcttccacccgcagaaaatatacaggattttcccggcaaagatgaagatcggtttcaaactgacgccatttctgctgcaagacattggtcagattgtacttcagatcggaaaaaccatcgaaaccaaggttctggcaaaaacgcacaaccgtcgcatccgacacgtggcaggcatgagccacttctttgagcttcaggcccgcatagctttttcgggccagaagataatcggcaatggcggagtaggaggcatttttgcctttcgccatggtttgaagttgatctttcagattcatagtacactccttctgttatgcaacggcctgaacggtggacctaatgagtgactgccgcttcaatcgcagaatccaactgactggggtcagtaacggtaggactcaggtcatcccggcggttcagcttgcaaagacctttatagtcctgccatgccggaatacggtcatgtgtgcgaatctgccagtcatgcagagcaagacgcaggtgttgcaatacctcctcatattccgaatcgcaaaccagattgttattttccatggggtcaaagtacaggtcaaacaagagttcccgaggcttgctctgttcacgccacccggcttgtaccagaaatcctttcagagcggaatcgtcgcaattggtcatgttgtatttgtcccatgcctcgtcatagtaacggatatacttatatcgctgtgttctgacgcagcgcgccggctcatatgacgtgtgaaagttgatttcggcaaatacataatcccgtatttgatgttgtggattctcaaaaacgggcaggagggatacaccggacagccaggccggcttcggcagaccttctgcatcgcacagggtggggaacagatctacatgggacaccataccattataccatgtcccatgggtcagcggatactggggaatcctgacaatcagggacacaccgatgccacggtcaaacaaggtgcatttggaaaacggattggccagcccatgatcggtagtggaaatgataatggtattttcatataggccggcggctttcaaggagtccattacgatctgaaagtttctgtcaaactgtgccaaggattcgtacaaggcagaagtgtccagacgggcctcctccgtgtcaaaaacgccttcgggaagttccacgctttctggatcaaaggtctcgctctcggggtagggacgatgcgtttggaacatcccgtaagaaaggaagaacgggcggtcagaacagcgatgcagcagatattcggcagtccgttcggcgttgatgtgatctgcctggcatctgtccagcggacaaccttcctccagcagaaaggaaagattcttttcgtaacccagagtttgggaatataccgtgctgcgggaggtatagtcgtaggatttttcctcatgctgtacaccgcacaggacggtttcaaatccctggctgcggaaaaaggatgccatatgcgtttccgggttctgaatggaaaatccccggtgtgccagcccgatcaatccgttttcgtggggatacctgccggtaagcaatgcaccccggctgggagaacaggtgggagaagcacagaacgcatgccggaacgacaacgcatcttcagcaaaagccttcacatggggggtgggaacattttttccatatgcgctggtgaaacacccggtgtcgtgagtatgaatatagagaatatttttcatgatacgctgcgctcactgtctaaaagctcattgacggttccgcggatgaaagaggcattcacgcctacgattacctgtactgcgttgcccgctttcacaacaccatgggctccgatagaacggaaataatcattcccctgcacctgcgcgacatccttgacagacacacgcaaccgtgtcatgcagttggttacctccagaatgttttccggaccgccgagagcctcgataatctgcttggcataggcggttttctccgcttttttatggttggtttttgcctggtaatccgcttttgtcttcaggctgacctcagtggcatcgtcatcctcgcgcccgggcgtcttcaaattgaatttcaggattacggctcggaacacaacaaaccagattccaacaaaaacaagaccgacaagaatgtgaatcagatacatctgccaatggttggctcccagaggaatatagttcagggtggcccagccgatcaggccgtcgccaaagttgcccaccaatccaaagctgtaagacacaaccatcaaagtggcggaaagaacggcgtgaatcacaaacaggacgggagctacaaacaggaatgtatattccaggggttcggtgacgccagcgacaatggaagtcagcgtggcgggaatcaaaagaccggcaacgatctttttcttttccggtttggcggtactatatagtgccagggcagcaccggggacgccgaataccttgactagacctttcagaccaaaccctccggcggggaagagctccttcaagggttccgtggtctgagcaaactcgcccagatgctgtgcccagtaggccacggtgccgccatccaccagcacgttgtcgaattcaatgggggcataaacaaagtgatgcatgccgaagggcagcagcagcttcagcaggagaccgtagatccacaaaccaaaattgcccgtggaaatcaggaactgctgcaccatgctgataccgtgctggatcatgggccagataattacgaaggcaccggctagaaccagcatggcaacgaacccgatcatgcagataaagcaggaaccgcggaagatcgcaaggcattccggcagttcggtttcatagaaccggttatgcaaccagacaacaacgccagcaatgacgatggcgccgagcatgccggtatccaatgttcgaatgcctgcaacagaggtcagaccgctggtttttgcggtagagtccatggcgatgccaacataactgccccagtaggtcagtatctgattgacaaaatagttgaaggtcaggtagagaaccaacgcctccatgcagcaccgagcctgttctttttttgccagaccgatcggaagaccaacgacgaacagcaggggcatctggctgaaaactgtccaggcacctttattcacgatagtccagaattggaaccagagcgttccttcggcggccaggctgccgaaaatcagctggttggtgaacaggacggtaataccgactatcatgccggaaaaggcaaatagcaggacaggggccagcattgccgcaccgaatttctgaattttttgaatcattacatgatcccccttttctgtaaaaacatatggttgagacaaatgccaaatgagataatgtgaatacaaccggttgtattgactacttggattataccaaacgcacaaaaaatattcaacaaattgacaatgttttggcaagagtttcacatcatgaaaaaagtttcatcatagaaaaggaaaaaatctttggatgagaaaagtatccgctttcacgatagaaaggtgttttggtatttatagcaacccaataaattggcgcgaatagccacaaaagcaaaaccagccagaacagtcatgcgaagaaatcgttttgaaagcagcacgaacagcatccggcagcttctccaacaaacgaactttgaactggcggcaggtcttataaaatacacgacaaaattcgtcccgctcttggttgcggtgttgccctgattttccggggggatcagactgcgcagcgtgcgttccaatgtggcaatatccagcggcttggcaacattgcgtccatagactacctattattgacttgtcattgctgcttgacagcagttatttcctgactgggcgcagaaagcatacagctgcagggacagcaagccacacgcctgtcaggccgaatttcatcggcagtcgaggaagacgatgacggtcagcaatgcatggaagagcgcgactataactacctgaacccgctggaatactgcgtgcaggaaatcggcgcatcaactcccaaaaatgtagatacgggcgattcccatcactcctagaatttataatagcttaaaaaatctcatcgaaaaaagtcagcaaagtaatgtcataaatgttgttgatgggtaccatggatttattgccttaaaatctaataacacactcgcgacaaatgtcgatgtgtctactgcgtttaagcggctaaaacgagcatataaccgcgcacacccaacagatcaaataaaaatgttgacaccccatgtactgcggcatactttctgtaccaacatggcgaattcgggtatggatattaagagcctccagtatttgatggggcatgccgacgtttcgctgactctcgatgtgtacgcacactcctcttatgcccaggcagcaaatagtatgctatccatcgtactttaagcaactgtaatagcaacgctttgccgcgcgttatttacaccatttttacaccattcatacaccaactagtgcaaatatacaccaatttttgccaactagctataattttctagcagcgagacaatttttttggaaacaaattaaacgataaaacgcaaattttgtcgaggatttgtttctatataacgaaagcgcgtatcttcacacaatttttcatatttcttcaaattcagttcattttcttttcacattcgccgggtatactgtaaatgttctcaggaagggagcagggacccggaacgagaacgtgaccccaagttttttcatccatactcctcttttcttttgacaccagggcggtgcaggaagattcctgcgccgctttggtgtttttttggtacaatttgccggtttttggtacaacgcttgcaatttgacaggatatacattattatagaaaccttgccaatcgtggcgaaaaatcgtataataacttaatatggtactgctgggtacagcgctttgctgcccggcagcccattcccttttccctacaggttacaccgcaggaggtcaaatccgtatgagagttggtctggacattggttccaccacgattaagtgtgttgtgctgaacgacgccggagagatcgtattttctacatacgagcggcatttcagccatattttggaaaaaggcagggcgctgctggaaaaagtagccgccgaatatctgcccgatggcaaagcctacctggcgatctccggctcggccggtatgggcctggcggacagctgcaaggtcccctttgtgcaggaggtcttcgcgacccgcgtgggcgccaaccgtctggtgcccggcaccgactgcatcattgagctgggcggcgaggatgccaagatcctgttcctgacgaacggcaccgaggtccgcatgaacggcagctgcgccggcggcacgggtgctttcatcgaccagatggccaccctgctgaagatgggcgcggacgagatggaccgggcggcccagcaggctacccgcacctacaccatcgccagccgctgcggcgtgtttgccaaaagcgacatccagccgttgatcaaccagggcgcacaggccggtgacatcgcagcgtccatctatcaggcagtggtcaaccagaccatcgcgggcctggcccagggccgccccatccagggcaacatcctgtacctgggcgggccgctgaccttctccaaaacgctgcgccggagctttgacaagaccctgggcgttaccggcaccctgccggagaacagcctgctttttgtggccatgggcgcggccttctacgccgatgaggtgctggacctgcacgaggtcgcccagcggttggacaattacagcgccacggccacctacgtgagcctgccgccgctgtttgccgataagcaggagtacgaggagttccacgcccgccacatgaaggcctccgtcccctgcctgcccttcggcgcggattgcgggccggtgcatatcggcatcgactccggctccaccaccatcaagctggtggtcatcgaccaaaacgccaacatcctgtttgagagctaccgccccaaccttggcaaccccatcccgctggtcaaggaaacgctgctgaagctgtaccaggaccatcccggcctgcaggtggccagcgtgaccaccaccggctacggcgaggaactggtcaaaaacgctttccactgtgaccgcggccttgttgagaccgtggcccactttaccgcagccaagcactttttgccggatgtggacttcatcatcgacatcggcggccaggatatgaagtgctttaaaatcgaggatggcgctatcagcaacatcttcctgaacgaggcctgttcctccggctgcggcagcttcttgcagaccttcgcccaggctttgggctacgacgtgaaaaaattcgccgccctgggcctgtttgccgacaagcccgtcgacctgggcagccgctgcaccgtgttcatgaactcctcggtcaagcaggcacagaaggacggtgcatcgatagaaaacatcagcgccggtctgtccatctcggtggtcaagaacgcgctgtacaaggtcatccgcgcttccagccccgaggagctgggccgcaacatcgtcgtgcagggtggtactttctataatgaggccgtcctccgcgcctttgaaaaagagatgggcgtcaacgtcatccgccccgacattgccggcctgatgggtgcttacggtgctgcgctgtacggcaaggcccgcgcgggcgagaacgcccgcagcacggtgctgaccgaggaagaactgcgcagtttcagccagaaagtcaacaccgtgcagtgcggcggctgcggcaaccattgccagctgaccgtgaacgtttttgccgatggcaagcgctttatctccggcaaccgctgcgataagccggtgaccggcaaggccaacaacgaggatctggacctctacgcctacaagcttaagctcattgaggagtaccgcaatgccccggccccggcttccccgcgcggcaatatcggcatcccgctgtgcctgaatatgtacgagctgctgcccttctggcatacgctgttcaccaggctgggctttaaggtcacggtcagccccttctccaaccgcaagctgtaccagagcggccaggctaccatccccagcgacacggcctgcttccccgccaagctgagccacggccatatcaggtggctgtgcgagcagggcgtcgatgcggtgttctacccctgcatgagctacaacctggacgaacacctgggcgacaaccactataattgcccggtggtcgcctactaccccgaggtgctggagggcaactgccccgagctgaccaggacccggctcatctacgattacttcaacctggagcgccgcaaggacttttacggcaagtttgcccaggcgctggacaagtacttccccggcctgaacaaaaaggatgtgcatgccgccatcgatgccgcctatgacgagtaccaccgccacatgcagcagctgcgggacaagggcgcggaaatcatcgccgccgcccgtaagcagggccgccacattatcgtgctggcgggccgcccctaccatgtagacccggagatcaaccacggcatcaaccagctcatcatccgccagggcgcggccgttgtgtccgaggattcggtcagctgctacgagcagaagttccagacctcggtgctgaaccagtggacctaccacagccgcctgtacgctgccgccaagtactgcacagagcagcccgatatggacctggtgcagctggtgtccttcggctgcggtctggacgccgttaccaccgatgagacccgcgagatcctacaggcgggcggcaagctgtacacccagttgaaaattgacgaaatcaccaacctgggcgcggtgaatatccgcctgcgcagcctgtttgccgcactggaagaacgcaaagaagaccacaaagattgaggcaagtatggaatacatgactccgaactttaccaaggacatggtaaagacccataagatccttatccccaacatggccgtgacccagttccgcctgatgcaggccgccctggccagcgaggggtaccagaccgaggtgttgggcaactgcggcagcgaggtggcgcagctgggcctgaagtacgtccacaacgacacctgctaccctgccctgctggtcatcggccagtttttggatgcgctgaacagcggcaagtatgacctggagcataccgccctgcttatcacccagacgggcggcggctgccgtgcctccaactacatcaagctgctgcgcaaggcgctggtcaaggctgggtacggcaatatccccgtagcatcgctgaacttctccggcctggaaaaaggcagcggcctgccgctgaccctgccgctgctgcgcaaggtcattgccagcatcttttacggtgacatgctggtggcgctgcgcagccagacctacccctacgaggaccgcaggggtgacgccgacgccatgaccgaaaagtggatttctacgatccagggctggattcggggcgacaagaactactccgcccacgatatgaagaagcggttctatgacattgccgccgactacgccaccattcccattacccgcgtgccgaaggtcaaggtcggcgtggtgggcgaaatttacgtcaagtactcgcccctgggcaacaacgacctggaaaagttcctggaaagccaggattgcgaggtcaacctgcctggcctgatgggctttgtggagtactgcgtggccaactaccggctggacatcgacctgtacggcggcaacaagctggtggccggcggtgccgacaagttcctgggctggctggacggcatcggctgcgccagctacgacgccatgcgcaagtacggcttctacgcgccggggtcgttccgcgagctgatgaagaaaccggaaggcatcatctcgctgggggcgaagatgggcgaaggctggctgctgaccgccgagatgatcgagctggtcgagggcggctacggcaatatcgtctgtgcccagcccttcggctgtctgcccaaccacatcgtgggcaagggcatgatcaataagatccgcgccctgcacccggacgccaacatcacgccggtggactacgaccccagcgccacccgcgtgaaccaggagaaccgcatcaagctgatgctggcggtcgcccgcgaaaagctggacacgcccatcgctcccatccgcccgctgaccgccgaagaactggctggcggcgcgccccaggtggcaaccacggtgcagtaaaacggcagccacttttgcaggggcgaccattggtcgcccgcaaaccgtgcggtaacgcaaacgtccaggggcgagcaatgctcgcccctgcatagcagataaaaacaggctccccacgagaaatggggagcctttgcttttattgcgtcttgatctgtctcaacttgtctcaaaacctacacgggtagagatttgagaaatgagacatattgatttaatacgttgatacgatatttattataaatagatatgtctcaaaatctcaaagttgagacaggtgagaaagtgaaataatgaaatattgagaaaatggtttgtttaaactatctattatttcacttacgcctcacacgtcttattctataactaataaaaacacgttgtatcgactcattctcaaaatctcaaaatttcactctattggctatccagcctttgagatttctcttttgagaaaatgggatgcgcacgggaggtgtttttctagttatcaagataagtgtatatcttgataactagaaaaacacttcccggcactaaagggtagtacacgttttgtaggggcgtttgcagggctgcacggtgggcggacgcacaatgtgcgcccttaccgtaagatgaaaattatactgtattttgtctaggggcaacatgtctcactttatttcacatgagacatattaactacatagatacgtataattctcatgtctcatttctcactctgtccggcaataggaaatgagacatattccttacagcccttccgcctttttcaggcagacgcggcagcggtcgatggtcagcaggccgtcgcgctgcatggccgaaagcgtgctggacagcgcactgcggtcgacgcccagatggtcggccagctgctggcggtcaaagggcagctcaaactccaggctgcccttctgcacggccagcgtggaaaagtaggccgtcacccgctcccggatggtcttgggcgcagtgtacaggctgcggcgggccagatttaaatttttgcccgccaaaatgtgcaaaaggttttgcatcatctgccagcgccagggttcgcacccgggggccatcagcttgccggggtccaaaaacagtgcctcgccccgctccgccgccactacgctgaccagcatcggctggtcgggcagaaaggcgtaagtctcggcaaaaagctcgccctcggcggcgcggcccagcagcgtgcggttgccccacaggtcgagatgctcgataagcacccggcccgccagcaccacacccatcggcgcaccgcgctgcccggcctccaacagggtctcccccttggcaaaggggcggcaaagggcatccagcgcggccagcgccgcggggatgtccccggctgcaagccccgcaaacagcggcagggcaagataagcggaaatttccatagtttggcactcctgcgttgtcataacaacagacgaagacgagatgatgtagtatactggtagcaatgtggaacacttcgcgggccgatggatggaatggccccctctgagagggaggcttttctcgcccctattcgcgcccctatatgttcttacctatattttataacaaactcaggagcaaaatgcaaggagaaccatgatgaaacgaagaattgttgaaattgatgaggccaagtgcaacggctgcggcgcctgcgccaacgcctgccatgagggcgctattgccatggtcaacggcaaagcccatctgatgcgggacgattactgcgacggctttggcgactgtctgccccactgccccaccggggccatcacttttgtggagcgcgaggccgtgccctacaacgaggccgccgtgcaggctgccaagcagcataaagcggcccacgcctgccccggcagtgcgccccgcaccttcggcggctgccccggcagtatggccaaggccctgcaccccgatgccgaaaacgccgctgctacgccggaaacggcccccagccagctgcgccagtggccggtgcagatcaaactggtgcccaccaacgccccctactttgacggtgccaggctgctgattgccgccgattgcacggcctacgcctacgcggctttccaccagaagttcatccgcgggcacattacgctggtgggctgccccaagctggacgatgtggattacagcgaaaagctgacccgcatcatccgcgacaacgacatcaaagaagtgaccgttgtgcggatggaagtgccctgctgcggcggcctggaaaacgccgccaagcgcgccctgcaggccagcggcaagttcctgccctggcaggtggtgaccatctccaccgatggccgtattctggactgagcctgccgcttaacaggacaaaatcattgcgataaaataagaataccgcgccgcgagatcgtatcgcggcgcggttttttgcgggaccttttacccggggagaggcaaaaaaggcataaatattgctttctgtcgtgaaatcctgtcacagcgtgtcgaaggcgggacagtaagcgcttacgctgcataaacgggtgagaaagctgtaataaaacggatgttatacttcccaccataaccgatgcggtttaagaacgatgcggcacacgggagggaggcgataggatgtaccgctatatctctgtatcggaagaactgtcctctccttatctggggcggtatcgttctttcggcattgcggcgcagagagaagcggccgggcactggcaggaggtgtgcaaggtctcggatgtttctaccgaccctgtttttgtggagaatctggcggcgcgatgtaccgccggccagctggagccggtccacctgatggatattatagaggatgcgctgatttgagagtgcaggcagcccgtaccgccccttgcggtgcggggatttttttgttttttaggcgggtgatttaatcgtggtgctttttaaaatagtacacggcacctaccagcccagcatcgttttgcagggcggcagattttagctccagaccctcggcaaacgcgggcatgacgctggcgcgtactttttcggccagcgggtcgatcagcagctcttgctgggcgctgacgccggtgcccagcgtaacgccgatcacatcggtatagcctttggctgcaccggcccagacttcgcccagcagcatgcagttggcatcattggcaacggtgacgggcaggccaaactcgcgttccagcgtgcctttgatgtccacgccgatccagccgggaaagttgccgcaggtgccggccaccacgccgcggcggctgtcgatc

SEQ ID NO: 7818 - DNA, 16956 bp, Unknown
  gut microbiota DNA sequence
cagttttttgaattccggcgtatatcgtttgtttggtactccttttggcatagaaaaacaccccacttgttagatagtataccatactgtctaacaaatggggtgcagttcacctccggcggctttctttaaaaatctatccgttttttcgcccgcttctggtacagcaccagcgccactaccagtgtggcggcttcgcccagggccagcggccaccagacgagggagacattctccgggccggtcaccagccgggtcagcgcccagaccggcggcagcacaaacaacacctggcggcacagtgagatgaccagcgccaaaaactgcgcattgcccatggcggcatcggcacggtccttgtcgcccaggcccaacaggcgggccagcagggcgttggtgcccacgccggtgccgatggacaccgccaccataaacaactgcaccgggaaagccaggctcaaggcggtcagggcggtttcgtcgccggttgccatgcgggccaggtaggcgctgtccactacgttgtaagcggcctgcaggatcatggataaaacgatgggcaggccgatgcgggccatcagtttgggtacaggctcgaccgccatcgggttttgggattggttttgctgcatatacgttcctcctgtaaaaaagcacaaaaaaataacgagtggcgcgataaccggatttacgcagttacgccactcgttattgtttttattgtaccaatttcacccgggaaatgcaaaggtggttttgcacaaagacttttgggttcaccaaatggtttttatattaccggccgatgggtgcgcacttattcttcagccacaccttttcgtcctcggtcaggcgggggctgagcatttcgtacacgtgggcgtggtagttgttcagccaggtgatctggtcgcggctcagctcgtccaccagtacgggggtagtgtcgatgggcaccaaggtcagcggggcaaagcccagccaatggccgtactggttgtcgcccaggtcgatgcactccagctcgttctcgatgcggatgcctacctcgtcggtctcgtagatacccggctcgtcggtgatggtcatgcccggcttaaagatgatggggttgttgggacgcaggctctgggggccttcatgcacgccggagataaagccgacgccgtggccggtgccgcagcggtagttgatctggtgtgcccaaacagggccgcgggcaaaggtatccagcgcaaagccggtgcagtaatccaggaacaccgcgcgggccatgtcgatatggctctgcagcacgtaggtgtagtaacggcgctcgttgtcggtcagcgggccgacggtgtaagtacgggtgatgtcggtagtgccgcagtcatactggccgccgttgtccaccagcaggaagcccttcggctcgatcttgctgttgacgtcgccctcagcatggtagtgcatcatggcagcgttggtgccataagcggcgatggtggagaagctgtcctcgaagtaaccgggcatctcggcgcggcgcttctgcagcatggtctcgatgtccgtctcgtagagggtctcgccgttggcgatggccttttccaggtccatctggaagcggacgacggccacgccgtcacggacatggcactcgtggatgttctccagctcggtgggattcttgatgcccttcagcgcaaagatagggtcggcaccggctacggtcttgtgggcagtcagggcggtgtacaggtcgtagttggtggccttctcgtccaccaggaacacctcgtcggcaggcagggcgtgaacagcatccaccagctcgttgtagccgcgcacggtcacaccgctggcagccagggtggcagcatcctcggcgtttagacggccgtcggccaaaaacagagtgcaggcctcacgggtgaccagggcgtaagccacggccagcggggtgcagggcaggtcgcgggcgcgcaggttcagcagccagcccacgcagtccagcccggtgacggccagggcggtagcaccggccttttccagttcggcgcgcaccagggcgatgcggtccgcagcggtggcaccggtctgggccggggtcagcagctcgcaggcggtgtcaggcaagggcttgcgctcgccggtagcatcccagatggagctggctacgtcctgactcttgagggcagcgccgcttttggccagggcggcggcgtactcctcggccaaagtggcgggcacgcagctgccatccagcagcagggtctcgccggccgtgaagttggcggtcaggtactcggccacaataggcacaccggcagaaccagcgtgcatgcactggatctcggtgccggccagctgcttgtccgcctggacatagaaacggccatcgcaccacagggcgctggtgtgctggttcaccaccagggtcgagttctcgccggtaaagccggagaaccaaggcagggcgttgtaatagtcaggcaggtactcactgcaatggggatcactggtcatcagcagcacaccgtcggccccggctgcttttgcagcggcgcgcaatgcggcgattttttcgttggtagtcaaaacggatcgctcctttttattgatgtagactaagaatatcataccactttcttaggaaataataaagagggtagactttttcgcgataaattttcaaaaaattcaaaaatttccgcgcaaaaaggcccgaaaccccttgacgcgtttgttataatgatattagcagttaaccacatatattgctaacatctgtgaacatttgaatagaggtaacaatcatggcagaaaacaagaccaagatcgacattttctccggctttttgggtgccggtaaaaccacgctgatcaaaaagctgattcaggaagctttcaagggtgagaagatcgtcctgatcgagaacgagttcggcgagatcggcatcgacggcggcttcatgcgtgaggccggcatccaggtcaatgagctgaactccggctgcatctgctgcagcctggtgggagacttccgcgaggccctgaagaaggtcgtcgagacctaccatcccgaccgcatcctcatcgagccctccggcgtcggaaagctgtctgatgtgacccgcgccgttgagggcgtggccgagaccctgcctgtcgtgctgaacagctttgtcaccgtggccgatgtgaacaaggtcaagatgtatatgaagaacttcggtgagttctatgatgaccaggtcagccatgcctcctgcattatcctgagccgcaccggcaacgccggcgaggagaagatcgccgccgctgtcgccatgctggccgagaagaaccccaccgctaccatcgtgaccaccgattggaccgccctgaccggtgcccagatcgtttccgttatggacggcaagcgcgatctggtggctgagctgctggccgaggccaaagcttccaacgaggcccacgccgatgaggacgagcacgaacaccaccatcatcaccaccatgacgaggatggcgacgagcatgagtgctgccaccaccatcatgacgacgatgatgatgacgatgagcacgagcaccatcatgagcatggcgagcattgttgccaccatgaccacgacgaacacgatcacgaccatgacgacgatgatgaccatgatgagcatcatcacgagcatggcgagcattgctgctgcggccatcatcaccatcatcatgaccacgacgccgacgagatcttcaccagctggggaaaagagaccgcccacaagtacagccgcgaggatctggacagcgccctggaaaagctggacagctgcgcttacggcatgatcctgcgcgccaagggcatcgtcgatggcggcgacacctggtatgaattcgacatggttcccggcgagcatgagatccgcgcctgcggccccgatgtcaccggcaagctgtgcgtcatcggctctgacctgaaggagcacgagatcgccgcgttgtttcacgtctgatattcaaacgcaatttatctccgtgcgggcagacctgctttgaccgcatgcttcacgatttaccgaaaggatttccaccatggcaaaacagatcccggtttacctgtttgttggtcagctggaaagcggcaagaccaagttcatccaggaaacaatggaagaccccaacttcgactccggcgacaagacactgctgcttgtctgcgaggagggcgagttggaatatgatccctcgcgcttcgctttcggcggcgtgcatgtcgcccagatcgaggacaagagcgagctgacccccgaaaacctgaccgcgctggagaaaaagtccggctgcggccgtgtcatcatcgagtacaacggcatgtggctggtgcaggaactgtacgacgccatgccggataactggctggtgtaccagtgcctggccaccgccgacggcaccaccatcaagacctacgccggcgacaacgccatgcgcggcctgctgctggacaagctgcgcggcagcgagctgctggtggtcaaccgtgccgaggccgtgaacgacgacgagagccgtcagctcatccacaagctggtgcgccaggccagccgtcgctgcgacatcgcctatgagttcaaggatggcagcgtagcctacgatgacatccccgacccgctgcccttcgacatcaatgccccggtcatcgagatcccggaggagttctttggcgtgtggtacatggattgcatggatgacccgaagaaatacgacggcaagacggtgaaatacctggcccaggtctgccagaccccgcaggccggcaagggtgcctttgtgcccggccgcttcgccatgacctgctgcgtgcaggacatccagttcgtcggcatgccctgcaagtacgacgactataagtcgctggagcagcgcagctggatcaccatcaccgctaaaatcaacgtgaagtaccaccccatctacaagggccagacccctgactccaccggcccggtgctgaccgccctgtctgtggagcctgccgaaaagcccgcccaggatgtggtcatgttcagctgattacctttacgttataataagttttaccccccctgtctgcgcagaaacgcgtccggcagggggatttttgttgtatataaaatgttgcggggctggtgttttgcgtcgagttatgttatgctaaccttgacgtggcaaccttgaggagggttcgcatgaatgtactggtcaaagagggcgttttaggcgccattttgctgattgtgggcgtgtttgaccgcctgtatattgattggtactgggtgggccgcaccaaagtgtggatcatccccggcaccgaggacctgatgccctgcatgccgcaaagcgacagaggggcccgacgtgtaagctggtggcatggcgcaatcgtgtggagggattgcagccttacggtgtagaccgatttacaacgcagacgggacgatccctcagtcagcctcgctgacagctccctcacagagggagcgttttgctcgtcactgtcataaatcattcataatctatacaattcatccccggtgataaaaaacttatcaccggggattttttgctgattgtaagcagggcacccgcgggctatactataagcatcccaagcaacaacaccccaaaaacaacgtaagcatgaaacctaaggaggtttttgtatgtattattccagcggtaattatgaagcttttgctacccccaaaaagcccgaaggcgtcgacgccaagtccgcctatctgatcggcagcggcctggctgcactgtctgccgcctgcttcctggtgcgtgacggccagatgaagggtgagcatgtccacattctggaaaaagaccccatccccggcggtgcctgcgatggctataagtatcaggacatcggctacgtcatgcgcggcggccgtgaaatggacaaccattttgagtgcatgtgggacctgttccgctccatcccctccatcgaggacgagaaccacaccgtgctggacgagtactactggctgaacaaggacgaccccaactacagtctctgccgtgccaccgtcaaccgcggccaggatgcccacaccgacggcaaattcggcctgtctgacaagggcgctatggagatcctgcagctgttcatgaccccggatgagaagctgtacgataaaaagatcaccgacttcttcgacgatgaggtgctgaacaccaatttctggatgtactggcgcacgatgttcgccttcgagaactggcacagcgccctggagatgaagcgctacctgcagcgttatatccaccatatcggcggtctgcctgatttcacagccctgcgctttacccgctacaaccagtatgagtcgatgatcctgcccatggtcaagtacctggaaagcttcggcgtgcagttccactacaacaccaaggtcgtcaacgtggcctttgactgcgccggcggcaaaaagcaggctacccgcatcgacatcctgcgcgatggcctggaagactgcatcgacctgaccgaaaatgacctcgtctttatcaccaacggcggctgtgttgaaaattccaccatcggcagccagaacaccgccgccccctatcgccccgaaatcaaggagggcggcggctgggacttgtggcgtaagatcgcagcccaggaccccagcttcggccatccggataagttctgctatgacccggaactctccaactggatgagcgccaccatcaccaccctggaccagaaaatcgttccctatatcaagaaaatctgcaagcgtgacccgttcagcggcaaggtggttactggcggcattgttaccgtcaaggattccagctggctgctcagctggacgctgaaccgccagcagcagttccgcgaccagcccaaggaccagctttgcgtctgggtctacggcttgttcagcgataagccgggcgacttcgttaagaagccgatgcgggaatgcaccggcaaggagatctgcatggagtggctgtaccacatcggcgtacccactgaccagatcgaggagctggcggccaacagcgccaacaccgtgccctgcatgatgccgtatattgatgccttctttatgccgcgtgctgcgggcgaccgccctgacgtagtgcccgagggtgccgtgaactttgccttcctgggccagttcgccgagaccgagcgcgacaccatctttaccactgagtattccatccgcaccggtatggaggctgtttacaccctgctgaacgtcgaccgcggcgtgcccgaggtctggggcagcgtgtatgacatccgctgcctgctggatgccaccgtgaaactgcgcgacggcaaaaagatcaccgacatggagatgccgctggtaggcaagctggcgctgaaagaggccctgaaaaagattgaaggcaccgaggtggagaagctgctgaaggagtataatgtgatttaagccccttataaaagggaacaaggccctgccgaaaggcagggccttgttatttgtgatgttaaccgcgtgcggcgatgcactcgatctccaccagggcattcttgggcagggcggcgatctgcacgcagctgcgggcaggatactcgtggaaatactgggcatagatctcgttcacggtgccaaagtcgcccaggtcctgcacaaagaccgtggttttgacaacattgtccagggtcagaccggcttcggccagcacggcctgcaggttcttcagggactgatgagcctgtgccactacgccctcagccagagcgccggtggcggggtcaatacccagctggccgctgcagtaaacggtgctgccggtgtccacggcctgcacatagggaccaagcgcggcgggtgccttatcagatacaatacgcttcatacaaaacaactccctcttataatatgaagatggccctattgtacgcgcgtttgggtgaaaagtaaagcctctttattgcttttttcgccgggcggccttcattacaaccataacggcagcaaacacgacaccggcgatggcccagatgaaccagctgtactgcggctggccgttgccgtagggaccgaaggtgtaaaacaggaaaatggctaccaccactagccagtaggcggcagcaaccgcgccgatgacccccttgcgggccttggcgtcgcgggtgaagtcaccttcctccagcagttggtccatggcatcgtgtacggtgcctgcccatacaaacgcatacacaccgcaggccaccagcaccatgagcaggcagacggagagcgcggcaaaaaggtcggcattgcacatcatagcggcaaacagcggcacggcggccagtatgcacagcacggtgccgatggtgttggcgcggttgtaatgggcggcaaaggcatcacgccgctcccgcaccaagccggttacgccatactcagtgtcgatgggttctttttcgagaaattcatacggctttaccgccgcgccgcactgcataaacagcaccaccgccacggctaccagcgccagcagaatgcacagccccagcccggcggcaaaattctcgctgatgccaagcaggttatactcgctcaaagcgcacagcgccagcagtgaaaccgggctgagcacgcacaatgccgtggccagcgccattctgggcgcattggcgcgggcttttttcagataatcccctgcctgtgttagcgtgacccggtgcagggcaggggtgtcatcctcggcggtatattccggctcgccctgttcctcttttaataagtagtcggtggtcacaccgaacagacgggctaactgcaaaattttgtcgatgtcgggtaccgattgggcaccctcccacttggagaccgattgccgggtcacgcccagcttttcagccaattcctcctgggaccagcccgctttcttgcgtaaggtaatgagtttgtcagcaaagatcatggggaaaacctcctcttggttgttcgtggttgttttactgtctgcactctaccatttttcccggttgcggggcaagaaagtggaactggaagtttgtcaacgggtagttgcaactgcgatgtatcgtaaattattttctgcgcgacagcgccagggccgaaagcagcaccaacccgcccaaagcgcaaagtcctgccccggccaggccggttacatcggcgatcagcccgatcagcgggctggcggggatcatcagcacgctgtaagccatgttgtcaacgctgatcagcgtggcccggcggtcgctggggatggcatcattgaaccgctgcatcgcgtgcaggaaccacacgctcaacgatgcctgcaccagcatcggccccaccaggcaaccccaggcaggcccggccccggccaacagcacaccaccgccgcagaccagggcacacagtcggtacagcgggcgcaatttcccgggatgcagccgccgtgccagcgctgtgcataccatggcggcagccgaggccagcaggggagagacgaacagccaggaggcatcccaccccagtgtgaccagccgctgctgtacaaacatcgtggtcaggtagctgggcagcgagatgatggcatccgcagtgatcagccgcaccgccagcggcgtagtgcgcagcacggcagcactatctgtgatatggacgcgcagccgggcggctatatccgcaaagggattctgctgccgcgcagcttgggcctcggtcaccagaggctcctgcaaagtcagcgccgccagcagcgagcaaaagcagatcgctgcattggccaggtaaaacccggcaaattgcagcacgtcggagagtaaacttgccagcgaccccagtgctgtggccagcttttgcaaaaccgagatttttgcgtcagcctgcaaatattcgttttcccgtccggcagttttcaggctgtcataggtcagggcctccagcgtgccggagatcatcgtgcaggccagcgctttcagtgccatgacggcgcatacagcggccagattgggagaaaccgccatcgttacatcggagaaaatttcaaacacagcgctgacggccagattcagccgccgccccagcaggtcagcggccacaccgctgggtacctcgcacagcagactggtgaggtggaaaacagcttcggccagaccgatctgcgccagcgtaaagccccgggcggccagcagcgccacccagacggcatcggtcagccgcaggcaggaggtaaacgagtacacgcgcaccgcgcgcaattgctttggtaaattcatcgggaacaccctttctttagacatacaagaaataggtgcccaaaaataaacgaccccacagcaaagctgcagggtcgatagtgtacacttcaaccttgctttgccgggtcagttttaaaaatgggcacacttctagctctgattgcttaagggtttccttttttctgaaaaagaacaccaaagcgccagcgcatgggtgtgccctccttcccggtaaaatatagggtaactataccacgcctggtgtgcttcgtcaagtactgcttgacgcatccgccctttcgtggtaaagtaggaataatttacgaatcacaggtgaaaatgtggaaaacttcaaaaaaatcacaaaacagcagtctcctgcgcgcaccatcgcctttggctttgcggtgctcatcttcatcggcgcggcgctgctctcgctgcccatcgcggtgcgcggggccgtgcagctgccggggctggacgctctgtttaccgccaccagcgctgtctgcgtgaccgggctggtcacggtggaccccggcgatacctttacgctgttcggccaggccgtgctggcagtgctgatgcagctggggggcctgggcatatcctcggtcagcatggggctggccattgcggcggggcggcgcatcagtttccgcggccgcagcctggtgcgggaggccctcaacgtggaaagtttcgggggcatggtcaagctggtgcggtccattatggccatgactctgctggtggagggcatcggcgcggtggccagctacccggtgtttgcccgggactattcgccgctgcatgccgcctggatcagcgtgttccacgcgatcgcttcctttaacaatgcagggctcgatgtgctgggcggcggccacagcctgatcccctactgcaataacctttggctgaaccttgtcaccgatgggatgatcgtcttgggcggcatcggctttatggtgatgctggatgtactgcgctgccgcgggcggttccgcaagctgacgctgcacagcaaggtggtgctttccaccacggccgtgctgattttgggcggtgcgatgctgctttggctgaccgagccgatcagctttttggcggcgctgttccaaagcatcaccacccgcacggcgggcttttccaccatcgatattggtgccatgaccaatgccgggctgctggtgataatgatcttaatgttcatcggcgcgtcgcctgggtctacgggcggcggcatcaagaccaccaccttttttgtgctgatgcaggaggtgcgcatcatcttctccaagcgcagattgggtgcgttcaggcgccgcctgccggaggaaagcctggccaaagccgctaccatcacgctgctgggcaccatcgtggtgtttgtgggcaccttcatgctctgcgtgctggagccgcagcacagttttgtgcagctgctgtttgagcagatctcggcctacagcacggcgggcctgtcgatgggcatcacctccagcctgcatgccgccagcaaagcggtgctgatcgtcacgatgttcattggccgcgtgggtgcgttcacgctgctgtccctctgggtctcccgcccggagcccagcgccaaatataccgaagaagccattacgatagggtgatataccccgagaggtcccctctgcaagggggctcccgcgaagcggatggggagagactttacccaaagtgcaactatggtgatgtctctccctccgtctgcgctgtcgcgcagacacctccctcgcagagggaggcagaaaggaatgattagatgaaaaaacaactgaaaaccgacctctacggtgtgatcggcctgggacggttcggcacggcactggtgcagacgctggccgaagcgggcaaagaggtcatcgccattgataaaaacgaggagaaggtcaaggcggtgcgccgctataccgactacgcttttgtggtggataacctgagcgaggacgccttaaaggagaccggcatgcagaactgcggcacggttacggtgtgcatcggcgagcaggtggacatcagcatcctgaccacgatgctggtcatcaaactgggcgtgccccaggtcattgccaaagccgccagcgaggtgcacggcgaggtgctcaagcacctgggtgccacggtggtttacccggaggccgacatggccgtgcgcatcggcaagcggctgatctcgggcaatcttttggattacatcgctctggatgacggcgtcgaggtgcgccgcatcgccgtgggcggcaagctgctgggccgcaccatccgcgaactggacgtgcgcaaggtttacggcatcaacatcatcgccgttgagcgcggccaccgcaccgatgtggagttttccgcggattatcgctttgaagaaggggataccgtatcggtagtaggcaaggtggaaaagatcggccgctttgagcgggcaatacaggaataaaaaggcaaaaaggccccctctgagagggggctcccgcgaagcgggtgggggagaaactttacgttggcagaagtttcaggctattgcaaggttctctccctcagtcagcttcgctgacagctccctcccagagggagcctttttatgttgcaattaaatattcagttcatggtacaccgttccatccagttctttccacaaaaattttccgccctccagcgtcaggtagctgtgggggctgttttctttggggagggagaccgagccggggttgaggtagaggtttccctcgccaaacgcctgccaggcgggcacgtgggtgtggccatgcagcaaaatgtcgccgggctgcagcggcggcaggtgggcagtgttgtacacatggccgtgggtggcgtaaatcagccgctcgccctcggccagcaccgcataatctgccatgatgggaaagttcagcaccatctggtctacctcgccgtcgcagttgccgcgcacgcagaagatgcggtccttgcgctcgttcagcatcgccagcacctctttgggggcgtagccttcgagcaggtcgttgcgggggccgtggtacaaaatatcacccagcaaaaataagcgcggggcaccctcgcggtcccaggcgtccaacagctgatgggtatagtaagcggacccgtgcaggtccgatgcgatcatcagtttcataaacatcacctcgtaattttattgtacaggctctttataagaattgcaagccgtggctaaccatgttataatgccaaggaaaggatgatgattttaatggaaaggattcatgctgaacgtatcgcccgggtgcgcaccgcgctggaaagctgcggcctgacccagatgatcgtatgtgaccccaagagcgtgtggtacctgaccggcgtagccgtggaaccctacgagcgcctgctggccctctacctgccggtagcaggcgaacccacgctttttttgaataagttgttcaacgtgcccaacccgccgtgccaggctatctggcatacagacaccgacgcgcctgttgagcaaattgccgtcgtggtggatgccggcaagccgctgggcatcgataaggaatggcccgccaggttcctgatcccgctgatggaagcccaccccgctatgccggtaaaactggccagcgattgcgtggataactgccgcgcctgcaaggatgaggccgagcaggagcttatgcgcacggcctcccacatcaacgacctggtcaacgaggaagccaagcactacgtcaaggccggcatgaccgagcgccaggtggccgagttcatcgacgcccggttccgcgcccatggctgcgaaggccccagctttaccaccatcgtatccttcggcgccaacgccgccgacccccaccacgagccggacgacaccgtgctgaaagagggcgactgcgtgctgtttgatatgggctgtgtgaaggaccgctattgcagcgacatgacccgcacctggttctgcggccagcccaccgagaagcaggccgccgtgcacgatctggtgcgccgcgccaacgaggccgccgaggcccttatcaagccgggcgtaaagctgtgcgacctggacgccgccgcccgtgacctcatcactgaggccggttacggcgagtatttcaaccatcgtctgggccacttcatcggccagaccgaccacgagaagggcgatgtcagcagtgccaaccggaccgaggtgcgcccgggcatgatcttctccattgagccgggcgtttacctgccgggagagttcggcgtgcgtgtggaggacctggtccttgtcaccgagaccggctgcgaagtgctgaaccacaacgataagcattgggatgtggttggtaagtaaaggcaataccgcataattctaagtgccgatacggcgagcgaggtgcggcagatgctaagccaaaagcgcagataatactttgtgtattatcgagcattttggcaacgcagttgccgtgccgcagccgccggagcggtgcttaagccgtcaggcgggaattgtgcggtgttgcctaaacaaagcaaatacttctataggggtcgatgcctgcatcgacccgcgggcggatggtgagcatctgcccctacaaattggcgataaattaaacgtaggagcgaaccatgaaaatacctgcaaaaggctttacccacgggggcaaattccacgcggatgacgtgttctccaccgccctgctgcaaattgtgcggccggacatccaggtcacgcgcggctttgtggtgcccgatgatttcgacggcatcgtctatgatgtcggcggcggcatgttcgaccaccaccaggagccccgcgagactcgccccaacggcgtgccctatgcggcgttcggcctgctgtggcaggtgctgggcgcccagctggtgggcgagcatcaggcccgcctgctggacgaaaacttcatccagccgttggatctgaacgataacaccggcgagcagaactctctggctgacgccatcggcagcttcaatccgctgtgggactcgaaggacgacccggacgagtgcttctggcgcgccgtgccggtggccaaaaagattttggaaaacgagatcgccgccgccaacgctgtcaaccgcgccgacgacaccgtgcgccgcgcctatgccaacatgaaggacggcatcgtggtgctgcccgcctacatgccctggaaaaacggcctgtacaagaccgatgcgctgtttgtggtctaccccagccagcgcggcggctacagtgcccagtgtgtgaccgaccaccgcacaaaacgcagcaaacagccgttcccgcccgcgtgggccggtaaaccggaagcccagctgcgccagatcagcggcctggggctgcggttctgccaccccagccggttcttgattacggcggacgataaagagacggccatcgaggcctgccgccgcaccctgcgcgccgcgggccgcaaggtgagcgaatgagcgggaaaagcctgcggggcccggcccccagcctggcagatgcctgccaggctgcccccgaaaccgcctgggtctatctgctgcgctgcccggacggcagcctgtatggcggctggaccaacgacttggcccgccgcttaaaggcccaccgcaccggcaagggcggggccaagtacaccaaaagccacggcggcccggccgtgcgccttgcctatgccgagcgctgcgctgacaaaagcgcggccttaaagcgcgaagccgccatcaaaaaactgcccaaggctgaaaaagaagccctggcggcaaagtgggcggcggacaaccgtatcaccatccgcatggctaccccggtggacggcgcggcggtggccgagctgtacaactggtacgtgctgcatggcacccagactttccagtaccggctttccacggccgaggagtacgccgccaacattgcgggtgtgctggaaaaagccccgtttctggtggccatcaccccggacggccgcttgcaggggtttgcctgcgcccacccctggcacagccgcgaggcctatgcctggaatgtggaggctaccatttattgcgcgccggattgcgtcggccaggggttgggcaagcgcctgtacaccgccttgctggagctgctgcggatgcagggctactataacgcctttgccattgtgaccggcgagaacaaggcgagccacgaattccacaaacggatgggctttaccaaaagttttgtggaaaagcacagcggctacaagtttggccgctggctggatgtggtgtactggcagtacccgctgcgtaccggagatgccccgccggagccggtacgctaccggctgacggaggccgagatggtttcaattctggaaaaagttaatttgtaacaaagcaaaccggcacagcgccttttctgtataacagaaaggcgctgttttttgtgcagtacagaaaagttatcttaatcattaaaaatattggctgataaagattgacaaaacttagtgggggggggtattatacttatatctggtattttataggtttattgtataaatgccaaaagaagaaggaaataaagaatcagagatgaggtaaccaagcatgcacctgaatggaattgcaaagcgcattacagcgctggccctgggcgcggcactgcttacagccactgccctgcctgcgtttgccgaggggacgcagaaagtaacgtacacggcaggcaactatac

SEQ ID NO: 7819 - DNA, 1264 bp, Unknown
  gut microbiota DNA sequence
aagaagcaaaaaccaacgccatgcgcatgctggagcgcgccaaggtcaactataccgcccacgaatactcccacgaggaaggtcaggccgttgacggcgccaacgtcgcccgcctgaccggccaggacccggcccgcgtttttaaaacgctggtcacccagggggcagaccataactattatgtgtttgtcgtgcccgtgctggccgagctggacctgaaaaaggccgccaaggccgcgggcgtcaaaagcgtggccatgatccacgtggccgacatcaataaagtcaccggttatatccgcggcggctgcagccctgtgggcatgaaaaagcagttcgtcaccgtctacgatgaaagctgtctggcccagcccaccatcatggtctccggcggccgcatcggcacccaggtggagtgcgcccctgccgatcttatcaaggtgacccgcggcaaaacggcggccatcacccaggagcaccagacatgatgcggctggataagtacctggccgagcgcaccggcatgacccgcagcgaaagccgcaaggccatcaccaaggggcgcgtgatggtcgcgggcaagatctgccgcaaggcggatacccagctggacgagaccgccgcgcagatcgcgctggacggcgcgccgttggcaggcgaatataaaaagtatgtgtatatcatgctcaataagccggagggcgtcgtcagcgccagccgcgacaagcgggataccactgtggtggacctggtggccgcggactacccccggcgggagctgttcccggcgggccgcctggataagaccagcaccggctttgtactgctgaccgatgacggtgccctggcccatgacatcctggccccggcccaccatgtggacaagcagtatttggttacgctggacactccgctgaccgaggagatgcgccgcggctttgcggcgggcgtcaccctggccgacggcgaacacctggcccccgccgaggccgaaccggccggggacgacccctgcaccgtgcgcgtcaccctgcaccagggcgtctaccaccagatcaagcgcatgttcggcgtctacgacgccggcgtcaacaccctccaccgtctctccatcggcggcgttgcattggatgagacccttgcccccggcgagtaccgggaactgaccgaggaagaacgaaaacaattgcagaactaaggctgccctagagtggcgactccccgcaggacgggaaatttgagcaaattgtcaagcgaaatgtca

SEQ ID NO: 7820 - DNA, 961 bp, Unknown
  gut microbiota DNA sequence
ctcgccgtatcggcacttagaattatgcggtattgccctagagtttagcaatctgtgcatggtatgcagaaatgattttacctgcaactatattttctatagtatggcaaggagcaaccagaaaatcccaacataaaatgctgcgtaaaacagcttggatttccaggaaaaatcatttattaaaaatgtatagtcgaaaataccatagcttattaaaactatattgtgaataaaaagcagctttggtgaaccatcgccaaaaaacattttgacaacgaaggtgatgaataacggaggcagtattgttgcaactgtatcaattacttcgtgtacatccaacatttgtgcccgctgcaatattttttgtagtgcaatataaaagaagatacccactaaactgccaattgtatttacaataaggtcatctatatccacaacgcctgttttaagaataaactgtgctatttcaattgaaaatgttgttaagaccgacaagccgattgctttatatatgcaaaatgttttctgataatagcaatatataattccgaatggcacaaacatgactatattataaagcatatcccatgaaataggactgtgcccatactttaaattttctctgatgctatgaaagggtatcatgttgactgcatcaattcttgttagtggaccgccgacaagagtcatgatgatattaaatcgagtgatacacatacagaatacgattataaaatataatattgtcataaattggaaactatgttttcttttaatcttcatatccctaatgctagaaccccttcctttttattctatggtatagcaacaagttccttacttgtatttcggatgtgttacgatttccgaattgcctacttcacagtatacgcaattttctacgcatcgtcaacaaaaacagccgcccagtttgaactgcaccccatttgttagacagtat

SEQ ID NO: 7821 - DNA, 1249 bp, Unknown
  gut microbiota DNA sequence
gagcaggaaaacagcgaaatctgtgaaatggtacatgcccagagcctgaccccggaacagctggcagttatcattcagatggcgcaggctgcggttcccaacccggaaaatctgaaactggatgagaaagaaacggaggatatggaatgaaaaagatgatggcaatgctgcttgccagtgtgatggcggcaggaacctttacgaccactgcatttgcctatacgggcgatgatgtgcagaagaacacgcctgtcagtaccgctgcacaggagacggatgcagcagaaagcacaaatgcggggaaaacggacaataccgacagcatcgaaatcgacccggacatgcaggttctgccggatggctatgaggtctctacggatgcggatgggaacctgatcgttacggtgggcggcaaagaatacaatatcggcagcgaaaagtcccaaaagcagactggtacggtggtgccggggatcaccagtctgcattttcgttccggtcccggcatggatcaggagattatcggatatctgcattccggcgatacggtggagattgtcgaaaaatgcggtgactggtataaggtaaacttcaacggcaaaaccgggtatgcacatggaaagtacctgaatgtcacggattctgcaaaagacagcagcatgttcagtgaagatgcgctgaagctgtttctggatctgatgcagagtggaatgtcatacgaggatgagacgaaatccagtgcagctttgactccggaaggaaatatgacgctggtggacgatatcggtgaggaagaagataaatccagccagcagttcattacgctggtgacaaaggcgggcaacaccttttatctgatcatcgaccgcgataaagacggcaaccagaatgtgcatttcctgaacatggtggacgaggccgatctgcttgcgctgatggatgaagaggaagctgccaagtatcgggagaaggagccggaagtcacggaacctgcggaaaccgaaaagccgcaggagacggaaccggcaccggaagagcagaaaacagagagcgagcagaagaaatcgtctccgcttccgatgattatgctgcttctgtttgtgatcggtgcagccggtgtcggcggttatctctatatcaagatgaagggcgtaaagcctgcgtccaagaaaaatcagccggacccggatgcggattatcacgatgaggatgaagatacgctccagctgccggaggatgatggtgacga

SEQ ID NO: 7822 - DNA, 13213 bp, Unknown
  gut microbiota DNA sequence
catgccgctagggttttgtcaacaggtttgggaaagattttttccgcattttttgcagcacaaaaacggaaaagaggaacctttcagcaggctcctcttttgctctaagttcgattaaaattctttttgctcaccttttctcataagaaaaggtaagttattcgatgaccagcccaaacccgttcagcagtgcgatcacatccgggaagctgaaccgcgcacctttcatccggttgtcactggggtcgatgcggtagccggtggcctcgcggaaatccgccttttgcaggtcgcatcggctgaacgccgtgctgctcagggccacgccgcggaaatccgcgcccgccagtttgcaatcgtcaaacacgcagtcgccaaaggtacatttactgaaatcaaactgcttcagcgccatgccggaaaactcattgtagcggaactcgcactgctcggccctgccaaagggctgcaccagggcactgcgtccctgcaggccgccccaggcaatggaccggaaggcacagtgcagcagccaggcgtcgctcatctggcaaaagctgaacaccacgtcgctccaggcacagcggtcgaaggtgcagccgagaaagctgcacgccgtaatgcgcgcaccgctccagcggcagttgataaacgtgcagtcgttgaactcggcatcatgcagaaaatccggcgctacattgtcaaaggtttcgccctggtaatactgcttagccacggcgcaccgcctttttcaggcggacccacaccgcgtaagccagcagcggcagcgcaaggccggccgccgtgtaggccacccaccaggccccgccggtaaagtagatggggaatgccgccagcagatagctctcgccgccagtggccagcaggcccagccaggtgacgggcttgaacgccaggaaatgcaagatcacaatgggcatcgtggcgcgccccagtgcgctgaaagcgccgctcaccgcgggcacgcgcgccagcaggtgggcaccctcatacaccagcatccaacccgccaggctggccgccagcaggtagagggggccggggtagctgttgcccgccaggcctacgctgccgaactgccccagcaccagcagcaccacaaaggccccggcgcagcacaacgctccgcgcgccgggccatggggatgctgcacccggtgcagtacaacacccaagtaaaacaggcagtagcagctggccgcaatgcccaggccccagacgttccagccaatgcgctgggcctgccagccgagccaaagcagcacgccggcaagcagtccttgcgggatcagcgtatcgccgctgcgcagcagttttttcaacaaaaactctacgcccgcatacaatagagatatctggaacagcgcctgaatgaaccacatagcgccgcccagctgggtgccgccgtcaaaaacgctccagtgggctgtgcggccgataatgtccttgatggtcaccggcgtggtgacaaggttgccgggcagatcgaggatacgctcgtcccctgtcaggatgtttacttttaaaaacaggttggtcagcagggtgtacaccgtgttggccgccacaaaaggcagccacagcgtgaccaccttgcgcttggcaaagcgggccagccgatgggcgctttcgcccgtgtggggagagaaaaaccacccgctgagcataaaaaagagcgccatgtggaataaatagataaagccggaaccggggaaccccgcgtgccccagcaccatcagcacaatgccgatgccgcgcatactgtccagcacagggtcgcgctgtttggccatagcaaagccttctttcttgttattcatccgcaggcttggccgcgcggcacttggggcacaggtagtggatggtcaatgtatagccgcgcacctcggtgccgatggccgcctccacctcccgcatcaggcccactaccggcaggtctgccaggtgaccgcagccgtcgcacagcaggtggccgtgggggctggggttgtaatcgtaccggtcggggccgccgggcatttccaggtggccgacctcaccgtccagctccatcatctttaagttgcggtacaccgtgccccgggcaatgtggggcatccgcagccgggcctcattaaacagctcgtccgccgtcaggtgctgggggcttttctcgcgcatgatgtctaagatcagggcgcgttgacgggtcatggaaagcactcctttcaaattaagattttatcttaaatatacaatacacgaaagccgcgccgctgtcaagctttgtgcaaagcaaccaataattattcctgaaatttggcttgacaagccccgaaaattcggtataatagaagcaaatcaagacaaattcctaaaaattaaaaaatattataaacggaggcaatactatggaactgagaggcagcaagacagagaaaaacctgtgggaggctttcgctggtgaaagccaggcccgcaacaagtacaccttcttcgcatccaaggcaaaaaaagagggctatgagcagctggctgcgatctttaccgaaaccgccaacaacgagaaagagcacgccaagatctggttcaaactgctgatggaaaacggcgagattcccgacaccctgacctgcctgaagatggccgccgccggcgagaacgcggagcatacctcgatgtacccgcgcatggctgccgaagccaaggaagagggctttacccagattgccgcgctgttcacgatggtggccgctatcgagaaggaccacgaggaacgctacaagcagttggccgccaatatcgaggccggcaaggtctacgcccgcgagaccgagcaggtttggcagtgccgcaactgcggttacacctatatcggccagcacgccccactcaagtgcccggtatgcgcccatccccagagctattttgagctgaagagcaagaactactaagctatcccctgcccgcaaacagaaagaggagcctgacagcaggctcctcttttttgcatgcaatgtttcagcgttcctcgcggaagtaaggcagacccaggtgtgcggggggctggtcctctttctttttgcgcatggaaacggcgatcagcaccagcacggtgacgacgtagggcagcatctgcaccaggtcggtcatgtagctggccagcgtgatgcccagcagcgtgggcaggaactgatatagccagtacagcatgccgaacaggtaggcaccccagatggcgttgagcggcttccaggtagtaaagatgaccagcgccacggccaaccagcccaaagcttcgatctggccggtggtagcccagatgccctggttgtagtccagcacgtagtacaggccgccgatgccgcagatgcctgcgccgatgcaggtggacagatacttgtacagtgtaacgttgatgccggcggcgtccgcggtggcggggttctcgcccacagcgcgcaggttcagacccgcgcgggtgcgggtgaggaaccagtgcatggccaccgccagcacgatggcggcgtacaccagaaagccgtaggagaagatgacctgccccacggtgcccagacccgacagcaccgggatcttggcggcgaaggccttgttggcaacaggggcagcagagtagctggcaccgtccaggataaagacaccgaagaagttggccacgcccttgccgaaagtggtcagcgccaggccggtgacgttctggttggcgcgcagggagatggtcaggaaggcgtagatcagaccgcccagcatcgaggctgcaatggcgcagagcgtggcgatcaggatgctgaccagcccgttagggttggcggcggtgttctcataggcccaggcgctggcaaagccggcaaagccgcccaaatacatgatgccgggcacgcccaggttcaggttgccggatttctcggtcacggtctcgcccaatgcgccgtacataatgatggtgccaaaggggatagcgcgcatgatccatgcaattaaactgctgtgcatatcacttgccctccttatgtgcgccgcgcaggatgaggcggtagttgatgaagaattcactgcccaaaatgaagaacaggatgatgccggtgatgatgtcggcggcatactcattcagcgagtaggccgaagcgatctcggatgcgccgcgctccaaaaagacgagcaggaaggagatcagcgccatatagaaggtgttgaacttggccaaccaggccacgatgatggccgtaaagccgcggccgcctgccgaggtggtggcaatggtctggtccttaccggcgacgatgaggaaaccgcacaggccgcagaccgcgccggagatgagcatggtgcgcaccgtaacgcggcggacattgatgccggcatagcgggccgtattctcgctttcgcccacaacgctgatctcatagccctgcttggagaacttgaggtaggcatacatggcaaaggtcagcacgatgacgacgatgatgttaatggtgtagcgctggcccataatgatggggaaccagcctgccttggtagccttgttcaaggtgcccaggctggaggcctggccgcgcatgatgttggtcatgcaggcaacaatgctcgtggcaacgtagttcatcatcagggtgaacaacgtctcgttggtaccccagcgggacttgaaccaagcgggcacaaagccccacagcgcaccggcggccatactgccgatggtcatagccgcaaacaacaccggagtgggcaggttgttgccctggtagaccatgaccagcgcggcgatcaggccgccgatcaggatctgaccttcgccgccgcagttccaaaagcgcatcttaaaggcaggcgccagcgcgatgccgacgcacaacaggatggacaggtcgcgcagcatccagctgaagcgggtcatgttggcaaaggtgccgccccacataacgccgtagacggccagcgggttcagaccggtgacgaagtagataaacagcgcatctacgaccaatgccagcaaaatggcaatggcacgcaccgcgatcttctggggcatcgtggtgccctcgcgcttggcaatacgcagcagcggttcacgcactgcggtactggactgactcatgccttaacctcctttaccagattggtcatgcggttgccgacttcctccttggtggtcttgcggccatccaggatgccgttgaccttgccgccgcaaagcacgacgatgcggtcgcacagctccagcagcacgtccaggtcctcgcccacatagatgacggcgacgccttttttcttctgctcgttcagcaggtggtagatcgtgtaggaggtgttgatgtccaggccgcgcacggcgtaggcggtcatcagcacaatggggtcggcggccagctcacggccgaccagcaccttctgcacgttgccgccggacaggcgggagaccggggtgttcaaatccggcgttacaacgttcagctcttttttaatagtctcggccaggtcgtggggagccttacggtccacgatgggcgaatggcccttgccgtagcttttcagcatcatgttatcggtcatgcccatggagccgaccagacccatgcccaggcggtcctccggcacgaaggacaggtggatgcctgcctcccggatggccttggggcttttgccgatgagttgcaccggggcggaagcgtcgggagcgtaatactccacgctggcgccgcgctgggtgggctgcaatccggcgatggcctccagcagttccttctgaccgttgccggagataccggcaatgcccaagatttcgccgccgtacacatcaaagctggcgtcgtccagcacggtgatgccgtcggcgctgcggacggtcaggtgctggatgtccaggcgcttgaccgggttcacgggttcgggacgctcgatgttcagttccactttttcacccaccatcatggcggtcagggtggcttcgtcagcgtccctggtggcaatatcgcccacatactcacccttgcgcaggatggccacgcggtcgctgatgcccagcacctcgtgcagtttgtgggtgataatgatgacggccttgccgtcggctttcatgttgcggatgaccgtgaagaggcgctcggtctcctggggggtcagcacggcggtgggctcgtccaggatcaggatgtccgcaccgcggtacagcaccttgacgatctccagcgtctgcttctggctgacgctcatctcgtagactttctggtccagatccagggcaaactggtatttttcgcagatggcgcgggctttttcgtggacctttttcaggtcgaagctgccgccgcccatggaaagggcgatgttttcggtggcggtaaacacatccaccagtttgaagtgctggtggatcatgccgatgcccagatccagcgcatcgcggggggagcggatggtaacagccttgtcccccacgtagatctcgccctcatcggggtagtagatgccggcgatcatgttcatcagggtcgtcttgccgctgccgttttcccccagcagggccaggatctcgccccggcgcacgcccagcgagacatccttgttagccaccacagggccaaaggtcttggtgacgtgctgcaaacgcacggcgtattcggtctgcgccattctgcaggctcctctcacaggttattttttcagggttatttaaaggaagaaacattttataaaaccaccaaaagggaaggctgcggatttgccgcagtcttccctcttgggtacctgtcagcgatcaggcaacagggtcagcatcttcgatgatgccgtcaatgcgcagggagaaagtgggggctgcgcgcagctcgccctcatggaagtaaccgtcggagatagcctccttggtctcgccctggtagacagcaacgggagaaccggtgctgtaatcatagtaggtcaggtcaataggagcggtggtaaccgtctcgccgccaacggtgaacttgctggtgtcgaagacatgcaggctgccgtctttcagagcagcctcgacctcagcgaccttctcggcggtgccgtcagcgcactcggggccaaggtcggtgatggcaacagcgccatcctcgtagcccttgcaccaatcctgcgggatgctgccagcctgggcgccctcgaacagctctttgtagtagaccttccagacgttggtggcggaggtcagggcagcggtgggagcggtggccagcatatcgatgttgtaaccgacagagtagcagatcttgccggaatccttcagcttctgggtagcggcgggagcaccggtggagtcagcatgctggccgatgatgacagcgccgttggcgatcagagcctcagcggcagcgccctccttgtcgatgtcgaaccaggagttggtgtacatgacttccatctcaacatcggggtaaacgctctggacacccaggaagaaagcggtgtagccggagacgacctcggcgtagttgtaagcgccgacgtagccgatcttgaccttgccgtcagcggtgaagctgtcgggctgggtctcgggggtcagggtgccggactcgaccagctccttaaccttcatgccagcgacaacgccggagacatagcggctctggtaaacagcggtgaacgcattgtagaagttatcgaggtcggagttggcggcgaagtcgccggtcatggccacgaagttgacatcggggtacttctcggcttcctcgaccatgtaggtctggtggccgtaggagttggagatgatcaggttgcagccctggccgaccaggtcctcggcggcgtcagcagtcttgccgccctcagggatcttgtacttccagacgatctggtcgtcgctcatgcccagctcagcagcggcttccttgataccattgatgtgcgcggcgctgtagccctcggtctcatcgcccaggatgatggcgccgactttgacgtcgggtgcctggttatcgctgctgccctcagcagtagcggtggtaccggcggcgctgctggcagcagtgtcagcggtggaaccacaggcagccaggctgaacaccatagaggcggccagcagaatacccatcagtttcttcatgtgtgttgttcctccctgttatgtgtgcataaaaacggcaaaaatgcgtcgattcttcctgacttttgccggggagtgacgcatttcgttactttgcaagacccattgtaaccactttacaaacgctttgcaatgatttttaaatttttgtaaaaactttggcgaaaggcgtaaatgttttacccacacgcacacgccaataggcaggacgcacaaacaaaaaaatcaaaagtcatactttacctgtgcaaaaagtatgacttttgctgtttgcttgcagtttgatcttttgctttgttttgcggctgttccggggccgggtgtgctgcttagcgtttgtggatgtatttgcggtccagcccgtagttgacggcggcgttgagcaccgcccacatcaaaaagacttccaccggcagcatcagcgtgtttttgatggcgccggaggtcaggtagtagagatagcccttgccgtagagcatggccttccacacgctgcccaatagcacgttgctgccgtaattgataataagccgcaccacaataatgcgcagcagcgttggtttgcgcttgtacagcagcacgccgtagaggaagcccgacagcaccgccgtgacgaggtagccggggaaatacggctcgccgtagctggagagcagaaaccctaccgagtcgatgatggcaccggccatcatgcccacgcaggggccgtagcacatgcagcccagaccgaccaccagaaagctgaagtaaattttaaggcttggccccagcaggtagatgggcagaccctccagcacgatggccatggcgcagaccaggcccgcaaaagccagcacgcggacgttgcggaactccgcccgggcggtgcgccagtaggctggtgaaaagacggacaattttgcttcctgcatacaaaaaacctccttgcgtatgcggatgccgcacaagcaaggaggcaataataaggtgtgccaggcacacccgccgttgcacaccgtttatgcagcagtgggatgcggggcccgcaccgcaggccgctttggcctttcgtcctgccacaactccccgttggtcaggcactttacgcgcgtgtccctactctgcgaaaaaatattgggttacaagcctattatacacgggatggatagaaatgcaagcacgcctttgcaaaaacaagttgcacgggcgctgccctacccctgtaggggagcattctatatgctcccgcgggcggatgcaagcatccgcccctacgcattccgcataggttcgctttgctcgcccctaccctttctttacacgccgctggcaccgtagttggacagcacgcgggcgctggggtcatcgacgttgcagccgggccaggccttgttgggcatccagtaatccacgatcatctccgcctggccgggatagtacttttcaaaaatttcacggtacagcaggctttccttggtaaaggggcggcaataggtatactggccgcacttctcggcaaattcgcggtcggtatacacggtcccggcgtattctttcaggtcgtccaccatcgagtggcccacagcgtcgctgaaggcagccttttcacgccagaggatgctctcgggcagccaatccccctcaaaggccttgcgcagcaggtacttgcccatgccataagtgttcagcttcttttcggggtcgatggccataacgtacttgacgaaatccaggtcaccgaagggtacgcgggcctccaggctgttgacgctgatagaacggtcggcgcgcagcacatcgtacatatacagttcgcggatgcgcttctggctctcggtctggaaggcggcggcgctgggggcgaagtcggtgtacttgtagccgaacaactcgtcggagatctcgccggtcaacagcacgcggatgtcggtgtgctcatggatgtacttgcagacgaggtacatacccaccgaagcgcggatggtggtgatgtcccaggtgcccagcatggcgatgactttttccagcgcttcaagaacgatttgcttgttgatgatgacctcggtgtggtcggcatggaggtaatcggccacctgcttggcgtatttcaggtcgatggcgtcctcgctcatgccgatggcgaaggtgcggatgggcttgcccagctttttagccgcaatggcgcaaaccaggctggagtccaagccgccggaaagcaggaagcccacgggggtgtcggcatccagccgcttatccacgccagccaccagctttccgcggatgttcgtcaaaatttcaggcagttcatcctggctgtaggccggggtatcggcgatgtcgcagtagcgcacaaactggccgttgcagtagtagctgccgatggggaacggatagatctttttgcacagtccaatgaggtttttggcctcggaggcaaaggcgatatggccgctctcgctgtagccgtagaacagcgggcggatgccgatggggtcgcgggcagcgataagcagctttttgcggctgtcgtacagaatcatggcaaactcggcgtccagatgcttgaacatgtccaggccgtacttgtagtacagcggcaggatgatctcgcagtcggagtccgactcaaaggtgtagccttcagcttccagctcggccttgacggggcggaagccgtacagctcgccgttgcaggcaacgcaatcggtaccgcggaagaagggctgcatgccctccggcgtaaggcccataatggccaggcggccgaagcccagcaggccgaactcggtctcggcgacgcgctggtcgtccgggccgcggctggtggtgcgcagcagatactcagtaaacgtttccttgggcagatcatgcccggcataacccatgatacagcacattttggtgacactcctttagatttccaacacctgttattcccccgaacggcaataaaaaaagacagcccattcgccctgcattaggacgaatcgctgtcttggatccgcggtgccacctaaattaccgcagccgaaataatggcatacggtcactttttccgtacacgttcacctttgaaacgctgccgctgtaacgcacggcctgcggcatcccctactcccctgcggtttcagcttgcagctgtcgggtgttctttcgcgccccgtccccgtcccggcttacaccagatgtcgggctctctgtgcggatgttgggcggtacttttccctgtcatcgcttttatcagctaaagcatagcaccattttggggccgtgtcaagcgtttttgggtagttttagctaacagaccgtttggattttattttgcctaaaatccacctttttatagggttttatcttgttttgggcgttttggcatggtacaataaactgcagagcattatttattaacggaggaatcacctttttatgttagagcttcgtcatgtcggctttgagaccgacgacaataaagagattctgcgggatgtcagcctgactgtgcaggaccgttttgtggccatcaccggccccaacggcggcggcaaatccacgctggccaaagtcattgccggtatctaccagcccaccagcggccaaattttgctggacggcgtggacattacccacatgtccatcaccgaccgcgccaacctgggcctgagttacgccttccagcagccggtgcgcttcaaggggctgcgggtcaaggacctgctgagcctggccgccggcaaaaataccagcgtcaacgaggcctgcagctatctgagcgaggtcggtctgtgcgcccgtgattatgtggaccgtgagctgaacgacagcctgtccggcggcgagctgaagcgcatcgagatcgccatggtgctggcccgcggcaccaagctgtccatcttcgatgagccggaggcgggcatcgacctgtggagcttccagaacctcatccgcgtgtttgaaaagatgtacgagcagacccgcggcagcatcctgatcatcagccatcaggagcgcattttgaacattgccgacaaaattgtcgttattaaaaacggccaggtggaaaaagagggcgcccgtgcggacatcctgcccgccctgctgggcagtgccgacgccggcagcccggcctgcagtgtgctggccgacaaagtggaaggggtgcgcaaatgatcgacgcaattgaacaaaacctgctgcgggaggtcgccgacctggacagcctgcccgtaggcgcttacaacatccgcgccaatggccagctggcgggccgcaataccaccgccaacattgacatcgtgaccaaggacgacaagcccggcatcgacatttacatccgcccgttcacaaaaaacgagagcgtgcacattcccgttatcctgagccagaccggcctgaccgatctggtgtacaacgatttccacatcggcgagggcgcggacgtgaccatcatcgccggctgcggcatccacaactgcggcggcggcaacgcccagcacgacggcatccacaccttctatctggccaaaaacgccaagctgcgctacgtggaaaagcactacggcgagggcgacggccgcggcaagcaggtgatgaaccccaccaccatcgtgcacctggccgagggtgcgcagatggagatggagaccacccagatcgccggtatcgacgataccatgcgcaaaaccagcggtgatctggccgagggcgccagcctggtcatccacgagaagatcatgaccaccggcgaccagcatgctgtgaccgattttgacgtagacctgaacggcgagggctgctcggccaacgtggtaagccgcagcgtggccaaggacgtgagcaagcaggagtttatcagccacatcaacggcaactgcgcctgcgcgggccactccgagtgcgacgccatcatcatggaccatgcctcggtcattgccagcccggccctgaccgccaacagtgtggacgccagcctgatccacgaagccgccatcggcaagattgccggggaacagctcatcaagctgatgacccttggcctgaccgaaaaagaggccgaggaccagattgtaaacggatttttgaagtaagttttcacaacaaaaacagccgcccggcgcagaactgaagtgaccccca

SEQ ID NO: 7823 - DNA, 822 bp, Unknown
  gut microbiota DNA sequence
ctgaccagatcgctgctgcacagatcaaggatgggagagagatagagcttctctccaaacaaactgaactctgtcacatcggtgacccacttctggttcggcttttcggcgtggaagtcccggtttaacagatttggcgcaattttgcccacttctcccttataagagcggtacttcttcatcctgacacggcaaactaagcccaactctttcataagccgctggacagtcttgtggttcaggaggaaattgcgcttatgaagttctgttgtaatgcggcgatagccgtaccggcccctgttttcgtggtaaatcgttgtgatttcttccttaacagatgcatatttgtcttctttctgcatctgcttcaaatgatagtagaaagtggcacggggtagttgagcgattgagagcagaatactgagtgcgtgtttttgccttagcttctgaactaccagcgttttttgtgctggtgtcgctcgtcttccaaaaccaaggcttgcaaattttttaggtaatcgttctccgcacgcagtcgctgcacttcggccaacagatcttcttctacctgcttcggcagctgctttggcggacgacccttactgctgcggccacgccgttcgacggcaaagccttccggcccttcctccagatagattcgctcccatgatttgattcgatctctgctgtttacctcaaatctacgacaggtttcgctgtaacttaatttctcttcctgcatggtttcaatcaccagttttttgaattccggcgtatatcgtttgtttggtactccttttggcatagaaaaacaccccactt

SEQ ID NO: 7824 - DNA, 17765 bp, Unknown
  gut microbiota DNA sequence
aacagatgattctcaatatgggagaagaggagaagcacaagtaaggaggtgcacgccatgaatgccgtgatctatgcccgttacagcagcgacaaccagcgggaagaatccatcgaaggacagctgcgggaatgcaaggaatatgccgaccagaacggcatcaccgtggtgcggacctacatcgatagggcactgtccgccaagaccgacagccgcccgcagttccagcagatgatccacgacagcgccacccacacctttgaagcggtgctggtttggaagctggaccgcttttcccgcaaccggtacgactcagcccattataagcgcatcctgaaaaacaaccgtgtccatgtggtgtcggtgacagagcccatctccaacacaccggaaggcatcatgctggaaagcttgctggaaggcatggccgagtactattcggcggagctggctgagaaggtcagccgcggccacaaggagaacgccctcaaggccaagttcaacggcggtccggtgccgctgggctatcgcatcgacagtgagcatcactaccagatcgacccggccaccgcaccggtggttcgggaagcgttccagcggtacgcggcgggggagagcatccgcagcatcatcgaatcgctgaacgcccgcggtatccgtaacagtcggggcaacccgttcaccaagaacagtttccagacgctgctcaagaatcgccggtatctgggcgaataccgctataaggataccgtcatccccgatgctatcccggccatcatcgatcaggattgcttcgatgcggtccagcgccggtgcgagattcaccgtcaggcaccggcccataacaaggcagatgtccattacctgctgaccaccaagctgttctgcggcaagtgcggcaccatgatggcaggggagagcggcagaagccatacgggcacggtccactgttactataaatgtggtacccgcaaacgcagcggcaaggaggcttgcagcctgaagccggtgcgcaaggaaccgctggagcagtttgtggttaagaccgcactggaaaaagtgctgaacgaccgggtcattgacatgctggcggacaagctgctggaataccagagcaaggaaaacacccgcttgccggttttgcaggcggagctgaaagaggtaaagcgccggatcgacaatctggtggcggctatcgagcagggtatccttacgccttccaccaaggcgcggatggaggaactggaacagcagcgtgaagcactggaaaccagcatcctgcaggagcagatcgaaaagccgcccatcacccgggagcagattctgttctggttcgatcagttccgccacggcgacccggcggatatcgcctttcaggaaaaggtcatcgactgttttgtcaattcgatctatctgttcgatgaccgcattgtggtgaattttaactatcaggagggtggccgaaaagtctccctcgaagaagtacttagttcgtttttggatgggaatggtgcaccacaaaatacctcgcacgaagctgcggggtattttttattgcttgtttttgagggaactgccgtttgtgcaccattggggacgagaatggcttggttcgagggcaagaacaaaaaagaaaaagccgaaaaacatccggtggaaagtttttcggctttttgttatttctcttgaatggcggaaacaatacgattggtctgctgacggttatttgtatcatcgagacgattggaaatcattttattgatttcttgctcggccatttcagctttacttttatcaaaaataataaaatcaattagctgttcttttcctgcggtggtcgttacaatgagattgatttcaaaggcatcaatgatattattgatgcctaagagtagacaaattaggccagccgcgagggtgtcggaatcacttaagcacgatactgcaataaggagccaaaatataccaaaaatcaaatatttcagtcgcaagcgaaagtttgttgtagttgaagaaatttggtcaattgtgaacttttcagttttggcaccgagaggaattagccctaaaatagtatttggagttttaaattgaatgaaattcttttctgtacgaatctcacctttgaggtagaaggtaagcagggatgtcatgtacttgatagatgtcataaattttcctccttctttttttgctccgcggcaaatctttctataagaatagcacaaatgtgtttaaaatgcaacataaattagatatatgataagacgaaattataaaccataatatcaatggatggtgatattatggatgaacttaaaataaccaagcgaacagagcctgtgatgtttacaatacgagtagataaatcaattgtagacttttacgatgaactatccagaaaaaccaaccgttctagaaatgaattgattggaatggctttagaattcgcaaaagataaaataaaagtagaatagtactgctttataatatattgtattggatggagataggagacggtgatggggaattagaaaacggtactttttgtatatgcctcttgcaaatcgctgtagatttgttacaataaaggcagcagaacgggtagcttgtggagcagtccgcagaaggaggaaccctttatgaaacaaatcatcacgatcggacgagaatttggtgcaggcggcggcgaactgggacgccgtctggctcgggagctgggtatcgcctactatgaccgcgacatcatcctgcgcacggccaaggtcagcgcccatttgacgccggaacaggtgcgccgctgggacgagcgtgtgcctcacgagttcggctttacacaaagcctgttcaacttttacgagcgcccgctgagcgaggaactgtgggacgctcaggtgcgggccatccgcgagattgccgacaaggaaagctgtgttatcgttggccgcaatgcggactacatcctacgcgagttcgaccactgcctgcgcgtgtttgtgcatgccgaccgtaactggcgcctgctgcacatgcgcaagctgatgccggacaccccctttgaccagctggaagttgacatggacaaggctgaccgcgcccgcaaaaattactgtgtcaagcataccggccgtgtgtatggcgacagccgcaactacgatttgacgctgtgcaccagcaagttgggcattgataaggcgctggaaattttgctttgcgcggcgaaggatatttgagatttgagtggatcgggagaagggtatctgcccctctttttgcatttttatgccgaaaatcatactttcttttgtgagaaatcaaaaaggcttaattttattaacctaataacgcggattcggcttgacttttaaggaaaggatgatataatattcacatacggtttaaaaactatcaagggcgatagcggcaccagttgggccctattgcccttttctgtttttaagcggttgcccgctgcgcggcagtggagcattttatggagtggaaaggaacgtatcaacatgaaaaaactatttgctttcggcatggctgctgccatgaccctctcgctggctgcctgtggcggcgctgcttccagcgctgcaccgtctgaagccgcttccgaagcttcctctgaggctgcttccagcgaagccgctgcagagtccaccgatgccaccggcaaaacctgggtcatcgctaccgacaccgtctttaagccctttgagtacaccgatgcttccggcaactttgtcggcattgatgttgatattgttgcggccatcgccgaggaccagggctttgactacgagatgaagagcctgggctgggatgctgccatcgctgcctgccaggctggccaggccgacggtatgatcgctggcgcttccatcaccgatgaacgcaaggcttccggctggactttttctgacggctactacgatgccacccagaccatgaccgtggcggaggactccgacattaccggctttgctgacctgaacggccaaaccgttgcggtcaagaccggcacccagggcgctacttatgccgaaagcctgaaggacgagtacggcttcaacatcacctactttgaggattcccccacgatgtaccaggctgttctgggcggccagtgcgtggcttgcttcgaggatacccccatcatgaaggcttccatcaaggacggcggcctggccctgaaggttttggacgataccgccagtgaccccgccccctacggttttgcgatcttcagcgcagacagccaggaattgctggatatgttcaacgctggcctggccgatatcaaggccaacggcaagtatgacgagatcctggccaagtacctgggctaagatctgcgccataaacaactgaaccaggtttgcgcggggacgcctgttttcgcaggaggtccccgcatttttgcgatagggaaaaggagcgtgctgccacttggccagaatcattaccaactatggcggactgctgctggcggcaatggggcaaaccctgctgctggcgctgtgcggtctgttctttgcctgtattctgggcttggtgttcggcattttaagcgtgctgaaaaaccgggcctgcaacattattgccaccgtgtttgtggatatcatccgcggtgtgccaatgatcgtgttggcgttttatgtatattttgccgtgccgatgctgctgaacaatatcctgcacctgaatacgatgctgggcatgaaagggcagatcaccttctcggcactacaagcgggcaccatctgtctggcgctgaactgcggcgcttatatggcagagatcatccgtgccggtattgaaagtgtggacaaaggccagatggaggcagcccgcagcctgggcctgccctattggcgcgccatgtaccgcgtggtgctgccgcaggcgatccgtacgatgattccctcgatcatcaaccagtttatcattaccctgaaagacacctcgatcctgtcggtcatcggtttccccgagctggtcaacaccgccaaaaacgtggttgcgaacacgatgagcgcgttccaggtatggacgattgttgctgtgatgtacctggtggtcattacgctgctgtcccgtctggccaaaaaggtagagaggaggctcaaccgtgggcgtcaataaaaacaatgttaaaattcacgttgagcatctgaagaaaaacttcggcaaactggaagtgctgaaagatgtctcgaccgatatttatgagggtgaggtcgtcgtcatcctcggtccatccggcagcggtaagtccacctttttgcgctgcctgaaccggttggaagagatcaccggaggtgaggtcgtcgtggacggccacgacctgaccgacaaaaagactgacctgaataaagtgcgtgagaacgtcggtatggtgttccagcacttcaacctgttcaacaacctgaacgtcatgggcaatatgatgctggccccggtggaactgaaaaaggcatcgaaagccgaggctaaggagcgtgcgctgcacctgctggaccgcgtggggctggccgaaaaggccgaagcctacccggcacagctttccggcggccagaagcagcgtgtggcgatcgcccgtgcgctggcgatgaaccccgacatcatgctgtttgacgagccgacctcggcgctggacccggagatggtcggcgaggttttgcaggttatgaaacagctggcggcagacggcatgacgatggtcgtcgtcacccatgagatcggctttgcccgcgaggtagccagccgtgtgatctttatggagggcggctacatcgtggaggagggcacccccgaagaggtcatcgaccacccgaaacaaccacgtaccatcgactttttgagcaaggttctgtaagggactgcggcctctggcgtaaagccggaggccctttatttaaaggaggcaaaatcatgaattacgcagaactattgcaggccgcccgcgggcagatgggtccctgccgcgcctgccccgtgtgcaacggccgtgcctgcggcggcaacatccccggccccggcgccaagggcagcggcaccgtggccatccgcaactttgacgcctggcgcaatgtgcggctgaatatggacaccatccacgagaattttacccccgataccagcttgcagctgtttgggcgtacatttaaatacccattttttgccgggccggtgggcgcgatgacgctgcactacggcgacaagtacaatgacatggattataatgccatcctggtccctgcctgtgcggctgcgggcattgccgcctttaccggtgacggcaccaaccccaaggtgatggagggggccaccgcggccattgcggccaatggcggcttcggcatccccacggtcaagccctgggataacgccactgttgcaaagaaaatggcgatggcacgcgagtccggctgctttgcgctggccatggacattgatgcagcgggcttgccctttttgcagaacctgaccccgccggcgggcagcaagaccgtggagcagctgcaggagatcgcccgggaggcgggcgttccctttattttgaagggcatcatgaccgccaagggcgccgaaaaggctgtgcaggccggtgtggcgggcatcgtggtgtctaaccacggcggccgcgtgttggacgattgcccagccaccgaggaagtgctgccggagatcgtggaagccgtggcaggtcgtgccaaagtgtttgtggatggcggcatccgcaccggcggcgatgtgttcaaggcgctggcgctgggcgcagacgccgtgctggttgcccgcccctacgttacggcggtgtatggcggcggtgccgagggcgttgcctgcctgaccgagaagctgggggccgagctggctgacaccatgcggctgtgcggtgcggctgcacttaaggatatttcccgggatatggtacgggtctgattgcattttgggcgtattaactgccgatttatccacctttttgcattttaaacttgcataaaattacagtttgcggtaaaattgtagcatacgtttgctttatcaccctgaatcgataaagcaagcgtgagagggaactgtgcaaagtattttgaggaggtcacaactatgaaaaaactcatcagcatggcgctggctgccggtatggcggtcagcctggccgcttgcggcggtgccgcttcgtcgtctgccccggcagccgattccgccgctgcttccaccaccgaggccgctgccgacagcgatctggcctacatccagggtaagggcaagatgaccatcggttacaccgtctacgagccgatgaactacaccgacgccgacggcaactttaccggctttgacaccgagctggccaccgccgtctgtgaaaagctgggtgtggagccggactttgtggagatcaactgggataccaagatcgtcgagctggacgccaagagcatcgattgcatctggaacggcatgaccctgaccgatgagatccaggccaacgccgcctgcaccaaggcttacgccaaaaatgcgcaggtcgtcgtgatgaagtccgacgctgactacagctccactgctgacctggtgggcaagaccgtggtggccgaggctggttctgccggcgagagcgccattcaggatgacgagagcctgtcccaggctgactacgtgagcaagagcgtccagaccgattgcctgatggaagtagccgccggcaccgccgacgccgccgtgctggatctgaccctggctaccgccatgatcggtgagggcaccgattacaccaacctggccatcaaggacgagctgaacgccgaggaatacggtgtagctttccgtaagggcagcgatgtagccgaggctgtcaacgctgcgtttgacgaattgaaagctgacggtaccatgcagaaattggctgacaagtacagcctgaccctggccgaatgatgggcgaggcggctgttatttggggacgcctgaccgaatctttctggctgaactgccagctgttcgggctgacgctgctgtttgcgatcccgctgggcctggtggtggcgttcggctcgatgagccgttttgccccgctgcgcggtgtggtaaaaacctttgtctgggcgatccgcggcacaccgctgatgctgcagattctggtcatctacttaggccccggcctgatgggctttaccaacccgtggccatcgggcagtagcggccgtctggtggcggctgtggtggcctttgccatcaactacgcctgctatttctcggaaatttaccgcggcggcattgaagctgtgcccaagggccagaccgaggccgggcaggtgctgggcatgacccgcagccagatctttttcaaggtcacgctgctgcaggtggtcaagcgcattttgccgcccatgggcaacgagatcatcaccctggtcaaggatacctccctggccaacgtcatcgccaacaaggacatcatcatgatggccaaggagtacagtgccaaaggcctaatttggccgctgttctccacggctgtattcttcctgatatttgttggcgtactgacgctgttttttggctggctggaaaaacggctggactatttccgctaagggggcacggctatggcattgttggaagttgccggtatcggcaaaagcttcggcagcaccgccgtgctgcgggatatttcgtttgacttgcaaaaaggtgaggcgctggccattatcgggtcctccggctccggtaaaacaacgttgctgcgctgtttgaactttttggagactgccgacacgggctctatcaccgtggcgggcgaaacgctgtggagcgcggacgatgcccgcacccagagcgaggccgtgctgcgcaaaaagcggctgcacttcggactggtgttccagaatttcaacctttttccgcagtatacggcgctgcaaaatgtgatgctggcgggcgaactgctggcgaaagagcgccttgactacaagcagaaccgcaagcagatccacgacgagctggaagcgcatgcccgggagctgctggcccagatggggctttccgaccgggcggggcattacccgcaccagctttccggtgggcagcagcagcgcgtggccattgcccgcgccctggccctgcagccggacatcctctgctttgacgagccgacctcggccctcgaccccgaactgacgggcgaggtgctgcgggtcctgcgcgatctggccgagcacaagaccaccatgatcatcgtgacgcatgagatgaagtttgcccgcgatgtggctgaccgcatcctgtttatggatggcggtgtggtggtggaacagggcgacgccaagcaggtcatcgaccacccacaggaggaacgcacccgcaaatttttggccagttacggaaaataagcaaaattatggtaggccctccccgtgcgggagggcctttttgcgtcctttttccggctggatgcaacaaatatctatcccaggcggcttgcgccgcgtggggtttgttgctatactgaacatcaaagacgcacattactttttatgcaaacgcaaagcggaggaaaaactatgcagttggataaacttctccatggcggagattataacccggaacagtggctggaccgcccggatattctggccaaagatgtggaactgatggaaaaagcacatgtcaacgtagttacgctgggcgtgttctcctggtccaccatcgagccgcaggagggcgagtttcacttggattggctggcggacatcatccacaacctgtatgcccacggtatctccaccattctggccacgcccagcgccgcacgcccggcctggctggcccgaaagtaccccgaggtgcgccgtgtacgcggcgaccgcgtgcgcgaactgtacaaccgccgccagaaccactgctacacttcgccgatctaccgcgaaaaagtggccatcatcgaccgcaaactggccgagcgcttcggtgatgacccggccgtgatcctgtggcacatcggcaacgagtttggcggcgagtgccactgcgagctgtgccagaacgctttccgcacctggttgcagaagcgttacggtagcctggacgcgctgaacaaagcctggaatgccaccttttggagccacaactacaccgaatggagccagatcgaaagcccggcgcctcatggagagaacgccgtgcagggtctggccctggactggaagcggttcgtcagctatcagagcatcgatttttacaagtgggagcgcgattgcgtgcgggaactggcccccaaggcggagttcaccgtcaacatgatgtaccgcttcaacgacatcaactactttgactttgccaaagagatcgacgtggccagctgggacaactaccccacctggcacaagcccaccgagaccatcgaggagactgccctggacacggcgatgatgcacgacctgtactattcgctgaagggcaagcctttcctgatgatggagtccagccccagctttaccaactggcagcctgtcagcaagcagaagcgccccggtatcgccgagctgtctgccctgcaggctgtggcccatggggcggacagcgtttgctacttccagtggcgtgccagccgcggtgccgaggagaagcttcacggtgcagtggtcggccatgacggccgcgaggatgcccgccccttccgcgagaccgccgaagtcggcgagactttggagcagctggcctttgtggcggacacccgccgcgtcaagcaggtggccatcgtgcatgactgggagaacaagtgggcgctggaaggctcctgcggaccgcgcaactgcggcctgggctactggaaagagttggcttgccactacaacgccctggcccgccgcggcatcaccgtggatttcgttaaccaggaaagcgacctgaccggttacggcctggtcattgtgccgatgcagtacctgctgcgcaacaaatttgcgcaggcactctgcgattacacggcccaaggcggcaccgtggtggtgacctactggaccggcgtggtggatgagagcgatctgtgctacctgggcgacaccccctacggcctgaccgatctgttgggcctgcgccgggaggagatcgacgccctgtacgatggtgagacctgccactgtgctgccactgacgatggcgcgatggaagcggacggcagcatcctgtgcgaggtggctgccctgaacgacaccgatcccgccaccccgctgatgctgtatgcggaggattactacgccggctgccccgccgttgctgtgcatgcctttggcaagggccaggcgtattacctggccagccgcttcaatgcggatttttacaatgacttttatgcgcaggtatgcgagaaagcaggcctgcagcctgcctggccggagcagctgcccgccggtgtgctggccactcgccgcggtgatttcgtatttatgcagaactgcaacgaccacagcgtagacatcgatggcgtggagctggagaaatacagcacccgtttggtccagttggaacctgtggacgaggatgacgagagctgacctactttctttgaaaagaaagtaggcaaagaaacttttaatatgttccataaaaaagagggcggtgccgggaaacgacatcgcccttttgtaatggcatacacggggcgctggggaacgccgccccctacaaatgtagtaagagtattggctccccttgagggagctgtcaccgaagatgactgagagatggccctgaggcagtatgttgctaaagtagccactcctcacctgctgcgatggagctccctctaggtgagccaaaaagctttggtggggccgtgtgccattgtagaggaatcggcggcgggtagccgccaaacgcgcgctatcggaagtggcggaggcttttcggttccttttgggtctccaaaaggaacacttgtcggcgatatgccgttaaaaaagtggctcaccgcaaggtggtgagccacgccagaagccgtataaaaaatcaaagcacgccgttcagccaggcaaccagcgccggtttcggctggaagcctacctgatgggtaaccatcttgccgtttttcagcaccacaagacaggggatgctgctcacaccaaactgcgcggccagctgcgggttttcgtcgcagtcaatgccgaaaaaggcagccttgtcggccatctcattgcttacttcttccagcacgggtcccagcatcttgcaagggccgcaccaggtggcgttaaaatccagtacggccacgggggcggccagtgcagcggtcaaatcgttatgatgaacttcctgtaccataggaaaattcctccttttatcgtgtgtttgtcagtatgggcagagcccggctgaactataccactatcttacacgataaaccgccaaaaagcaatagataacatattaaaatactatgaattaaaaataagacaagtgtacattgtgccgaaatttggcccggctttttggcggttctgcggcttgacaaaaattgcgcaggtgcgtatgcttgaagaaaagcacaatcaatttgcgcggcttttcgctaagaagttgcgcaaaagaaaaggggagtacagcccatggctacggggcagggacgggatggacgtccgccgatcgaggaaatcgcacaggcacttggcatatcaaaaacaacagtatcacgtgcattgtcaggcaaaggacgtgtgagcgaggggacccgcgccaaggtgtttgcctatgtgggccgcccgggggttgatagcagcaccccagtgcgcaggcaggatcccggtgcaacacacaatctttcgctggtgatccccaagcacttcatgcagttggacctgccgtttttgcgcaagtgtatgggcggtgtctgcactatggcggcgcagcgcgggtacgatctgctgctctgttacgtcagcgataccgataccgtccagctggagcgccagctggccagccataaagtggacggcgtcatcctctcccgcacgatgaacgatgaccccagcattgacctgctgcagcagtacggtgtgccctttgttgccatcggccgcatcgaaaatgacgatataccgcaggctgataacgaccagctgggcgccgccagcgagatgacgcgggtgctgttccagatgggagcgcgccgcatcgcttatttgggcggcagcggcacctacaccgtcaacgccgaccgcctgcgcggctatttgcgcgggctggcggaatttggtgttcccgccgaccagtcgctgatccgcaccggcattgaatccgacgagcagcgcaccgacgcgctggaggctgtgttggagcagcacccggattgcctgctgtgctgcgatgatcgcattgcctttgatttgatgcgcgagctgcgcaatcgtcatatccgtgtgccggaacagctgcggctggccagcctgtacgacagcgagctgctggctggtacgaccccggccatctcggccgtgcagtttgacgctgagcggttgggttctacggcctgccgtatgctgctggatgtgatggcgggcaaggatatcccgctgcgccaggtgcagggctatcaagtcatcctgcgggaatcgacaaagtaatgctacaatttgcataaatctgttaaaaaaggtaacttgcgcaacaagaaattgcgcaaaacggtgccgaatggtagaaaaacgcgaaatttatgggtaaaaacttacaaaaagttatcctaaacaccgtcaattatgtgcattgacaccagcgcaaaaatcttgtatcctaagtattgtaaagcagatgcgcaacatgattgcgcagcactgcgaattgtttgagcaacgagcaaaaacaagaagaagaaggagaacacaattatgaaaaagcaattgagccttgccatggccggtgtcatgccctgtctctggcagcctgcggtggcagctctgccagcagcgcagcaacctctaccgctgaggctgcttcctccgctgccgagagcaccgcagagagcactgctgctgagggcaacgttctcgaccaggctgctgccgctgccttcgctcaggatgttaccttgaccatgtggggcgctgaagaggatcaggatctgctgcgtgaaatcagcgataagttcatcgagaagtacggcaactacggcggcaagatcaccatcaatctgggaactcagtccgagtccacggccaaggataccgtcctgaccgaccccaccgccgctgctgatgtttatgcttttgccgatgaccagctgaacgagttggtcaaggctggcgctctgcaggaagtgcagctgaatgcggacgatatcaagagccgcaacactcccgcgtctgtcgatgctgccacggtcgatggcaagatctatgcttaccccctgaccgctgacaacggctacttcatgttctacgacaagagcttcttcaccgaggacgacgtcaagagccttgacacgatgatggagaaggcagccgacgcaggcaagaaagtctctatggacgttgcgaacggctggtacctgtacagcttctatgctggcgctggcctgaacctgagcctggctgatgacggcgtgaataccgtctgcaactggaatgaggcaccgggcgctgacgttacccaggctgtcattgatatctgcaagaaccccggcttcatcgccctgaaggacgaggagttcaccggtaagctgaaggacggcactttggttgctggcgtcaacggcacctggcgtgcaaacgacgctgctgaagtttggggcgacaactacgccgcctgcaagttgcctacctacaccctgaacggtgagcaggtccagatggcctccttctccggctacaaactgatcggtgtcaacccccacagcgctaacgtcggtgctgctatgctgctggccgacttcgttaccaacgaagagaacgaggaactgcgcttcaaggagcgcgcacagggcccctccaacaccaacgctctggcagccgcttcttctccggctctgaccgctgttgttgcccagtccgagtacgctaacctgcagcgcgttggcggcaacttctgggcttccgctgagaccctcggctccatctgcgtcaacggcaaccccgatggcaaggacacccagactttggtcgatgacgctgtcgccggtatcactgctcctgttacccagtaatctctgctcctatctataataataaagaaatgatctgataagacagcccgcttgtgatagaaaacgaccgatgcaagcgggctgttttatccgtatgatttatgaagattgtgtgaacgaaaggggacttcgctgtggcgaaaactgcaacgcaagccatgccgggcgagaaaaacttcttccagacttttggggaagcttttgcaaaaggcgatatctttaccaaagtttcgttcctggtatggggtcttggctatatcggtcatggccagctgatgaaagcgctccttgtcaccctcgtggagggcctggggctttacttcctggcactttacggtgcgccgaaccttgctaaattcggcacgctgggcactgtcaaaatggagatggtgttcgacgttacgacgatgaaaaacgtcgtgaacgattacgataactctttcgagatcctgctgataagcatgatttccttcgtggtcatcgctgcgttgattgcggccgccatgatggtggtcacatccaactaccagctgcaaaaaatccgcgcagcgggcaaaaagacgaacaacttattacaggacgtcaacgtctacctgaacgaaaagttctacgtcaccctgctgacgctgcctgtgctgggcgttgtggtgttcaccattgtgccgctgttcatcctgattgcggtcgcctttaccaactacgaccagcagcacatgcctccgaacgacctgttcacctgggtgggtctgtccaacttcttcacgctgtttggcggcggcggtatgacctcgaccttcggctactcctttgccaaggtgttgacctggacgctggtctgggcgttctttgccacctttaccaccttcttcggcggtatcctgatggccatgttcatcaatgacaaaaagaccaaatgcccgaagctctggcgtaccctgttcatggtgaccatcgccgtgcctcagttcgttacgctgctgctggtacgcaacttcttctccaacaacggcatctgcaacacaatgatggccaacgccggagttacggatttcctgcataacatcggcctgttggacaagggccttagttacattccgttcctgacccagccgggctgggccatgttcaccatcatcatgatcaacatttggatcggcgtgccgtaccagatgctgatcgccacgggtgtgttaatgaacattcccgccgacatgatcgaggccgcccgcatcgacggtgcgaacccggttcagatgttcttccgcatcaagctgccctacctgctcagcgtgcagggaccgtcgctcgtcacggactttgtcaagaacgtcaacaacttcaacgttatttacctgctgacccaggacgtgtttgtcacgaacaaccagcagctggcccagtccaacgccaaggaaattgacctgctggttacctggctgttccgcttgacgcaggagtattacaactacaagatggccgctgtgctgggcatcatggtgtttatcgtctgcgcagtgttcaccgttgtgtgcttccactttatcaataagaaggaggcgacgttctcttgagtaccactgctgtatcctctgccgctgtgcaaaagcagctcaagcagggcaaagtgaaaaaaggcatcttctccgtcatccgccatctggtgctggcactgctggcttttatctggctggtacccatcgcctggctgttgctgacctcgttctccaccgataagggcatcaactttacccgctttgtgccggaaggttttaccctgtggaactacaccagcattatgacagagccggactctgttgcacagttcccgcgctggttcatgaacaccttggttgtggcatgctttaactgtgtgatctccacctgctttgtgctgatggtggcttacgccataagctgctgccgcttcaagggccgcaagctgctgcagaacctgtccgttacggtcaacctgttccccggcgttctggccatgatcgcggtttacttcgtcttgaagtacatgaacctgaccaactcttacgccggtctgatcatggtgtacgcgggatcttccggcctgggctacctgatctgcaagggcttctttgatacggtgcctgtggcactgcgtgaggccgccaagctggacggcgcatccgaagcgcgcatcttcttccagatcgtcatcccgatgtcccgcccgatcctggtgtacaccatcatcaactccttcctgaccccgtggaccgactttgttatggcaaagatgatcctgaactccggtgtcagcgcggactggacggttgccatcggcctgtacaacatgctgcaaaaggctctgatcaacaactacttctcccgtttctgcgcaggcggtgttttggtggctatccccatctcggtgctgtttgttatcatgcagaaattctacgtcgagggtatcacctccggcgctgccaagggttaaacctggcgtaaataagctaaggcaacaccgcacaattcccgccttacggcttaagcaccgctccggcggctgcggcacggcaac

SEQ ID NO: 7825 - DNA, 7058 bp, Unknown
  gut microbiota DNA sequence
aaaaggttcccactgcgaaagcagcgggaaccttttttgtggtgggaaaattcttttttacagctggtacagggcagtgtatttttctttcaggtagcgggtgaaatagtgcgggtcaaacttgccgccgcacaggctttgcaccagccactggggttccttcatgctgccccactgccatacacgctttttcagcgcggccttcagcggctccatgtcgccggcagcccactgagcgtccagatccatggtcttgcgcaggtcggcgatggcctgggcaccgtaggcgctgcccagcgcatagctggggaagtagccaatgtcgcccatcgaccaatggatgtcctgcaggcagccgtgggcgttgtcgggcacgtccacgcccaggtactccttgtacttggcgttccaggcggcgggcaggtcggccacggccagcgtgccctggatcagcgctttctcgatctcgtaacgcaccatgatgtgcagcgcgtaggtcagctcgtcggcctcggtacggatcaggcccggctcggcacggttgacggcgcgccagatctcctcctcggtcacatcggccagctgggtggggaacagctcccgcagggtggggtacaggcagtgtacaaaggcgcggctgcggccgacgtagttctcaaacaggcggctttgactctcgtggatgcccatggtggcgccgccggtgacggcagtgtagtcgtaggcgggatcaatgttcagctcgtacagggcatggccgccctcgtgggccacgctgtacaggttgctgaacatatcgcggggcatgtaatgggtggtgatgcgcacatcgccgcgccagaactcggtggtaaagggatgttcgctcgcggccaggtagcagtgggccgggtccaggccccacagctgcatgatcttctcgctgaccttgcgctgggcgtcgatgggccaatcctggtccaggaagtcggtgcggatgggggtgccgtggtcgcggatgtcggccagcagcggcacgatggtctcccgcaaggtggcgaagaattcatcgcactgggcgatggtcaggccgtgctcgtactgatccagcagcacctcgtaaggatcgcggtcgggggcaaagtagtgagcctgggcgcggcgggcagccacgatcttctccagatacggtgcaaatacgctgaaatcgttggtgcgcttggccttgacccaggcgggggtgctctgctgggtcaacttggtaaaggcggcgtactcgtcagccgggatcttggagatctggtcgtaggcacgctgcaattcccgtacctcggcgcgctcctgctcggtctcggcatcctgggctgcctggcgcagcaaagcggcggtgttgtcgttgaccagcaggtcgaagtcggcgcggctcagcacctcgcaggcttcggcgcggccatcggcgctgccctcgggggcgacggtttcagcgtcaaaatccaccacgttcagggcgtagcggtaggcaaagcgctgcttctccagcgcacgaaggcggataatgctttctttcatagcaaaacctcatttcttgcaaatactttttctcatcataccacaaagcggcggttttttccattgaaaaccgggcaaatttatggtatggtggatatattataaaatgtaggagggccgccgccatgccggaacagccgcttgtcagtattattgtccctatatacaacgcacaggatcacattgcccgctgcgtagagagcatccgccgccagacttacaaaaatattgagattttgctgctgaatgacggtagccaggacgttagcctgcaggtgtgcgagatgtacgcccgggtggaccaccgcattgtgctgatcgataaggccaacagcggcgtggcggccacccgcaacctggggctgcgccaggccaagggcaagtatctgcagtttgtggatgcggacgataccattcagccctacgccaccgaaatgctggtggctcgtgccgaggagagcggggcagacctggtgatcgcccactacaaccgcatcacgccgccgcgcccgcgcagcgaggccagcgcccgccccgagcgcccgaccaaagtgcagaccttcggctttttgctggagggtgccatgacgaaagaggagtttgccgccggtctgatgcaggaaccggccagcttttactacggtgttatgtggaataagctctaccgtgccgacatcgtacacgcccacgatgacattatctgcgccgaggacatggattggtcggaggatctgtattttaacctgagctatatccgctatgctgaaaagttctacgcattgtctacgccgatttacaattactacaatacgccgggcagtgcagtgcatacggtgctgaatcctgtcaatatcgtttctacccgtgcaacgttgtttgcgtattacaaagaattgtacgagaatttggggctgtacgaggagtataagccgcagatttataaatacctggttgctgtggcggagagctgaaaggaaaagagggaatagccatggctgtacagcttgggaaaattacgcgggaacacgatttgcggaccgtatggtcaaacgaggcgcaggcgtttaccccgtggctggccgagcatttggacgtgctgggggatgcgttgggcattacaatagaactggaagagcgggagtcgtcggttggggcgttctcgcttgacatattggcgcgtgaccaggattccgcgaagcggtcgcgattgaaaaccaaatcgagcaatcagaccatgagcatctgggaaaactgattacttatgcgtccggcaaagatgcaaagtatattgtatggatcgtaaaagatgcgcgggaggaacaccgcgctgccattgaatggctgaataaaatctctgacgatacgattggatttttcaatccgctttttcgtcgtgtcattttgcttgaaaacacaaacaaaccagcccgcagaatctttgatgggcaattctgcgggctggtttctatttctttttggcactaactaagtgacattgctcccagagggggcctttctcagtctccgatcctacatgcttccagcgcgttggtaataccgccgtgggtcacagtggagacgcgctccacgatggcgacaggggcctctttcatgccgccgcgtatccattccagcgtaagccccacaaaggcgtacttataaaagtgggcgataaactccttatcctcggcccgcacagacataccggcggcccgctcctccaccacgccgatcatcagatcataggtcagcttatacaggtactgctcgatgtactcgcggctgatggagtgatagacattgatgtaaaaaaccttatccttttgcaggctttgcaaaatctgcaaaaagccctgctgccaggtatcgtaggtctttttgcccgccagggcgcgggtagcttcctccacgcaggcccattccaccaagtcgtagatgtctttgaaatggtagtaaaaggtcatgcggttgacgccgcaatgctcggtcaggtcggtgacggtaattttatccagcggcttttcggccatcagttctttcagcgaggctaccagcgcacgcttggtcatctgggacataagggcaaacctccttgcggtactgcccttattataataggtatttgtgaaaatttccactcaatcgctggcccgcagcagcagttccatcccctgcttaccccagccgaaatccgccgccgcgtacccgcgttccagcacgcgggagagcgctgggtcgtccagatgcaggcggcggaacggctcctgccagtggggcagcccccgggccgagaagatgagcatgccctcggtgcccaccatcggccgcagcccccgcagagtcagcccggctgagaggtactgggcgcagagatcctcgcaagagggcaggtcgtcgatggtaaggggctgcacggcccagatgtggtagctggcgtagcgttcggtggcccagcgcagcgccatgcgcaaaaaatggcgcagctgggtgtagttttcgttcagcaccggcggggtcagtaccgcgccctggccgtcggccccgtagcccgcggcccgcaggctggtgggcagcggtgcgtcgtcgtacaggggcatcagggcggcggccgcctgcagctccggctggccagcataatccgcgatgatctggccgttttccagcgcggtgcgctgacggtccggcggcagaaatggcaaccctgccgggccggtaagttctgccagcgccgcggcccccgcgggcgtaagcacctgggcatcaaaagtgtggacattgcgttcgagtgtttgcagcataaaacagttccctccgtggatttaaaattctttacggaactattgtatgtgccccccgccgccgaacctgccgaaagccggcgaggaaatggaaaattttaccagtttattttgctccacagaaatagaaaaggccccctctgcgagggggctccgccgacagatggtgggggagagacagcaattttatatgctctctccctcagtccgcttcgcggccagcgccctcacaaaaggagcctttcactgcttctcgtttatattcggtctcgccagctcttccaaacttcgattctgcgtaaaaaatcggtggtacgggttatccaccggcggtgccttgggggcggcaggcttgggggcaaaacgcttgatatacgcccgcagtgccggggcggcccgcagcttgcggcggctcattcggccgcggctgtcgagacagcccccgcggtcagtgtctgccacagttcctcgccgtcggcgtagtgggcggcctgttcctcatccagcacagcgcggcggcccacatacagggtggacagcacgctctggttgctgccggtggcatcgtccagcagcgtgtagccgtcataatcgcccagatccatcccggccagcaccgggcaatcggtccagcggtagaccatattctgccaatcgtcagcgtcatcctcgggcggggtgccgtccaggtaggccagtgcgccggtggatttctggaagcccgccggatccgcgatgagcatcacatacagcgtgccgctatcgctcaggtcggcgctcagccgggtgacacccgccatctggttgtaggcatcggtgttgtcgttctcggcgttaaaatctacggtgtaactgttgacctgcaccacaaccttgccatcaccgttcaggtcggtgcagtagggcgtcagcgcatcctgcagggcagtcacggtgtcagcgggcaggtcgtactggccgatgtagccgatctgcacgtccggccgggtctggaagacggtatccttgatgaaccacgccaccaccagaatggccaccaccacgcccaatacgatgaacttatgatagtgccaccagttctgggccttttcctttttggtgtattccttcggcggtttgggggtatgatcgtactgttctacgctgtctttggtgacccatgccatggggtgcacgctccttcggggcttgaaagccaaatttctatttattataacacataaagcaagggggaattgtaaacttattttgacgccgccctgataatgccttgcaaaaccgggctaaagcgggtatcatacaaataagagcggcccaaaacagccgcagaaaggctgcatttgtatggataaaaacacctttttattgcaggacaccgaggcttttatgcgcggcgaactggacaacgtaaccgtggcggggggcagcatcgtgctggatctggtacagggcagctatgtgccctacggctgctacactagcgcgcccatcccgatgccgctgtttgacgccctgtggcccagctggaacgccgccactccgccgggcaccgccgtggagacccaggtgcgggttctggtggacggcaactggacggcctggatggcctttggcaagtggagcctctacctgaagcgggagggggctgccccccgggagcgcggcccgctgcagctgatgccggattgcctgctgctggacagcaagtgtgccacccaggtgcagctgcgcatctacctgtacagcaaaaacgaaaaggccacccccgccgtacacctgctgggcgctaccgtgcggatggtggatgtcatcccctccggcgggcggccggtgaaccgaaccctgcacctgatgccctacctgcaaaagcgccgcgccccggtcctggccccctggatggacctggccatcagcctggccagcctgaccaaccgctggggcgccgacatcctgcctgaagaatttgcccaggccttgcgggactggcgcaaacccgacggctgcgattgccgcaatttaggctttgccgccgctgccgccggaagctggggcttccccgcctggctgtgctggggtgggctgaacattttgcgggacgaaatgcgcaaaggttacggcgcggtggtagccctgcaggctacccctgccgagaaagagcacggcctgcctgaccgccgctttgccgccgtgcgcggatttgtggcaggggcctccgccccgcaggtgctactgtgcgacccctgggccgacggcaccgattttgacgccgagaccgccatgccgctggatgactttttggttgcttgggacaacgtagccctgctgatgcgccgccgccttgaggagcagcccgcctgggcccccacccacggcagcgcatggatccgccccgtgggcaccgacgcccccggcatctaccgcctgtatgtgaacggcgaggagcacccgattcctgatgatttctgcgccctgggcggcctgctggcctggaccaccctggacgaccacccccacgccaccacggcccaccgcagcttccactttgtggagccggaggcaggcggtatccggctggaatccggcgaaacgccctgcaagtacaccgtctaccttatcgatacctccggctgcatgctggtgggggatgtgacggtgtaaggaatttgccaaatcgaaatttgtggaggaaagcccgatgaaagaaaagagttg

SEQ ID NO: 7826 - DNA, 8835 bp, Unknown
  gut microbiota DNA sequence
acgcaaagggatgccggtttttactatttgatttttactttgcgccgcggccggcaaatactacgtacactgtcttaaacaagatcttgatatccccccacagggaccagttgtcgatgtattttacatccaggcggacaacttcctcaaaatcctcgatgttgctgcggccgctgacctgccacaggcccgtgatgccgggcttcatggacaggcggcgcttgtggtggctctcgtactgcttatattcgtccagcgtcggcgggcgggtaccaaccagactcatatcgccgcgcagcacgtcaaagaactgcggcagctcgtcgatgctggtcttgcggatgaacttgcccaccttggtgatgcggggatcatcctgtattttgaacatcaagccgttcatttcgttctgggtcatcaggctctttttgcgttcctcggcatccatatacatgctgcgcagcttgtggatgtagaacacacggccgttcagaccgacgcgcttctgcttaaagatcagcgggccggggctttccagcttcagcgggatagccgtaatggcgatgatgggcacgctgatgatgcagcccaccagaccgccgacaaggtccatcgcacgcttcagcacacggtcgcgcagcttcagctccagggtgcccatcgtgacgatgttgcctccggcgcagcggcccaaaatgcgggaaaaccgcacggcgctggtctcaccgcagcaccgctcctcgatgcggtccagcagcagcaggcggaaatgcacggtcaggcccatgctctccatctcttccagcacagggatgaaggattcgccgctgtccatggggatgtcgacgtagatctcatccagcgcagcctggcggatccaatccataaagttgtcgtagttggcggttaccggaacaccggccagcgtggagccaatttccgaagccggggcttccagaatcgccacgccgctgatgcgcttggaccagtcccgctgcaactcgttaattaacagttcggcgcggtcctgggtggagataagccccaccaggctttccaggccggattggctctggatctgcagcaacgaccgcttgagcagcccgtgggcgatgggcagcaaaacaaagttgataagcggcaccgccagcgtgaagtagcgcgaatccagcatctcggctttcgtcagcagcatggcggtggagtagaccagtgccagcagcacattgaacttgatggaaagcttgatttcctcgccgctggtgcgggtgacgatgtttttcgtttggtcaaaacagatgaacgtcgccacaaaggccagcatcagcaggcagatggtctgcacccaatcgctgggggcgtaggggaccagctgcttcaacagcccgtccgttaccagccaggccagcagggtgctgagcagcagcaccacaaggtccgttaagaaaacgtagatatattgtagtttttcacgcttcgtgatcattcgggtgtgtgttccttcctcaaacaaaggggctggctggcagtttccgcaaagccgctgccccaaaacatgattacttagtattcatactatcatatttagtccgggttttcaacacaggaatgatttccgtgttgaaacttgtcgaaaatttggcactttgtcatgtttcaaacgtaacatgacacgatattttgccgaatttgcttgccacagggcgcattgtgctttataatattaaataagtatacatatgtttgtggctggggaggatctctatggctaccatcgacattaaccaatacatcgagcagagcggcatgcgcaaggcgcggtttggcggatacgagccggacgacgtgcgccaggccatgctggacctgtgcagcgattacgaacaacggctgaacaccgctgcccagcaggtgcgcggcgcccagcaggaggctgaggctctgcgccgccgctgccagacgctcattggccagaaccagaatttggccacgcagaatgcctcgctggcgggcaaggccgaccgcattgcccggatgcagagcgatatggagacgcgctactccaaagtgcaggagcgcaaccactcgttgactgaccaggtggcgatgctgcgcctgaaaaacaccgatctggaactgaaaaataaagagctgaccgagcgagccgagaacgccgatgccgccctgcgcatcaaagggcgggaacatgaccaggccaaacagcaggtgttggccgagcgggattccgtggtggccggggcgcagaaagaagccgcccgcatccgcagccaggctcgggaggaagccgaccaactgctgaaggacaccaacctgaaagccgaggctatcgaccagctggcccgggagcaggccatcggccaggcccgcaagatggtgcaggccgctaccgaggagacccgcgaaattcaaaacgcccaccgtctgcgcctgcaagatctgcaaagccgtatcgacgccatggagcagcagcgcgccaaactgatggatttcctggcaaagatgattgcagaactgcaggagacccaggactacgcccagcaaaacaccccgcagccactggaaaataaggagacgaccgagccttcggctgagccgcagctggatctgtcgcccacggcggtggatgccgctgccagcgccctgcgcaccgaggataccaacgacgcgcagcctgccccggcccccgcggagctgaccgacgaggacggccagccccgcaactgcgtggtggctccgggatggaatgaccacgccaacgatacccgcgtggcccgcccggtacccgacggccccgaaaaacaaccgcagccggaatatttcgataccacccccaccgctaacgagctgcacaccctgcagaccccgccgaccgaagccgccgccaagccgaaggaagaggtagaaattccgggcgccattttctcttaccccatcctgcgccagaagggggagccgattttggacgaggaaccgccggtgcgcgggccccacaccccgctgttgccgaacctggacaccgacgcggacgaggaggacgacgaccccctcaccgcccccgcagccccggcgcagcccgccccccagcctgctgccccggcggctggcaccccggccaaggtgacggccagcggcccgcgccgcaaaaaggctgtagccgccctgcgggccctgcgccgcaagctgggggaaggataaagcctgaaacaaaccgcacaattcccgccccgcacgtttggaattgtgcggttttgccgaaataagacaggaggctttctgtgaagagccatacatattgggtgtcggcgctgctggtgctggcgctcgccctctggtgcaccctgggcgtctcggccgaggatacgaccaccactgcctccggcacggcgggcagcttccagctggagcaggtctacgtcaatgcgccggagctggacgtctacttttatgccaccgacgccaacggggaatcttacagccccatcgtcgtgcaggcgcagggggtggaggccacccttggtgaccgcaagctggacaccggcatgatcggcgtggccgaggaccctatctgctacatcatcgcgctggacaacagtacctccatcgacgccgaggatttccacaagatgcgcacggccatctggaagctggcccagaccaagcaggataaggaccagatcatggtctacacgctggcaggcggtgcacaatgtgccctgcctgccaccaacgataaggcggaaatttttaatacgctgcgcaccatcggccaaagcgagggtgccatcgatctgaccggaacggtgaccatgctggcggcggacatccagaccgggtaccaatccttagcgccccgcaaggtggcgtttgtctgtaccgatgccgcccagatcatgaccaatctggccctgctgggcggcacgctgggtaccgaccagagcaacttaaacatggcaatgtacactttcatctgcactgccgcgcccgaccagctggaatccacgaaccaaatgtccggcggcaaggtcatcgcctgccgccacgccgacctggccgccgaaatgcaggccaagcagacaaagtttgcccaggctttgaccctgcgcaccgaggtgccggacagcctgaccggcgagcggcaggagatatttaccctgtcggtgcccaagttgggcagcgccgtgaaaagcagcaccaccgtgtacatgggctttaaaatggagaagccccaggtcaccaaggtggagccgctgggccgcaccaaactgcggctgaccttcaaccaggcagtcaatgccaacgccgaccgcccccagtattaccgcgtttacaccaacgatgtgtggggctggtacgtcaaaattgaatcggtgcagctgagcgaggacggccgcaccgccgtgctgaccaccgaaccactctatcaggggcgctacaacgtcaccttaaataaggtggccagccgcatgacacccgctaacgtcagcgcccgccagcaaagctgcagctttatgattgcccgctggccccgggaccgggcgttctacatggggcggttcagcatgccgctgaccatcgccgtggtgctgctgggggcgctggccctcaactggctggtgctgcgccgcagggagcgtgtctcggagcagaccgccgaagcggagcacctgctggcgggtgccgacagcctggacggcaccggtgcactgcccaagcgttgggttacactgttctgggctgcgcgcggctccattgccgagagccgctgggcgggcattgtggaaagcagcctgatcttgggcagcgacgccgcccagtgcgacctctgcctgccggacagccgcatccgcccccagcacgccgtgctggccgtgcggggcgaagccctgctggtgcagccccttggccctgatacgacggtgtttgtcaacggtgagaagatcgccggggaacactgtttgcagaataacgataccctgcgtctgggacgcacgacgatacgcctggtgctgtgagcggaggaaacaaaatgaaactgaccaaatgtgccagcggccatttctatgacgctgataaataccctgagtgcccctactgcaataccggcctgcagaccgattcttccatcgtgcgcagcggcgcagcggaagaaagcccggaagggaccccggtagaaccggctgttccggcggctgcccccgccggccctgtggccggctggctggtggtgctggatggtgaagccaaaggccgcgacctgcgccttggcgtgggccggacctttttgggactggacaaggatggcacgcccgttaccttaagtgccgatgcccccctgagcctgcgccaggctgtgcttgtctacgacggcgaagccaaggcctacacgctgctgcccggttcttcccaggaattgtgctacctgggcgacacggcgctgctggagccgcaggagctggcaggggaggagaccctgcgcctgggcactgccacgctgaaattcgtgcccttctgcggcccggatttcagctggtaagggggtggcagcgtggcaagtgagatcgtatttttaattaccgagcagcgcaacaaacagcgcatcaccctgcctgcgggcagttaccgctttggccgcagtgctcagtgtgaatatgtgctgcgccgcaacaacgtgggcgaggtgcagttcgtggtggcctgcaccaaggacggctggaccgtgaccgattcctccaccgagtgcgcgacctggtacgacaaccgctacctgaaccagggcgagacctgccccctgcaggagggtgacgtgctgggcctgaacaccgacggcaatgcgtctacgcaggaaatcacgtttagagttgaggaaattcgcacagcccaaagcggcgcgaccggcctgcggcaggagcagactgacaacgccgtcctgcgggaagtggacgttcgccgcaaaaagcgggtgctcatcggccgtggcgatgactgcgacatcaagcttgtcagcgaccgcgtatcccgccatcactgcgaaattttgtacaaggacggccactacgagctgcgcgatttgggctccaccaacggcacctatgtggacggtgcccgcgtgaccggcacagtgctgcgcagcggtgcggtcatcaacgtgcctacgcaggtatttgctttttccggcgggctgctgcattaccacgagcataaaagcggcatcagcgtgcagctgctcaatgtgtataagaccgtcaaaaaccgcaacaccggcaagccgctgaacatcgtggacggcaccagctttgaaatcgagcccaacagctttgtggtgctggtgggcggctccggcaccggaaagtccagcctgcttacctgcatcaccggcactgcgccctgcaccaagggcagcgtgcggttcgacggcctggacaccgccgataaccgtaacgcttttgaggccgtgctgggctacgtgccgcagaaggacatcatgcacgataacctgaccgtggagcagagcctgacctttacggccaagctgcgcatcgcccacgacgccaccagggccgagatcaacgccgccgtggcccatgcgattgaagcagtggacctgaccgggcgggaaaaaacgctgatctcccagctttccggcgggcagaaaaagcgtgtctccatcgccatggaactgctggccaacccccggctgctgattctggacgagcccaccagcggcctttcgccggaccttgaccgcagcatgatggagctgtgccgcaagctcagccaccaaaacagcacggtgctgatggtcacccacaatatgtccaacatcaacctgtgcgataaaattgcctttttgggtgtgggcggcgtgctgtgctattacggcgcaccggaaaaactgcaccgctactttgatgtggagctgaccagcgacatttttgaaaaactgcgggtgcccgagctcatcgagcagtaccgccagcaatactttaccacgccggagttcaaccgcctggtggcggcctggcccgaggcagcgcaggaggcggataagcgatgcagccaataaaattgatgaaattctggcgccagttcacggtgctggtgcagcgcaatctgcgcctgatcttaaacgataagctcacgatggccagcctgatcttgcaggcgccgttcatggtgttggtcattaaaatggtggtcgacccggattgctttacctccaaccttattaacatcggcagccgcacggcgctgttcattatcagcgccatggccgcctttatgggcacgctgaactcctaccgtgaaatttgtaaggagcgggagatcatcctgcgggaagcttcggtaggcgttagcctgctggcggtggtgctgagcaaggccttcgtgctgctgcttatcgaggacgtccaagccgccattttaaccttcggctttgtgcgcatcgtaaacatcccgcagaaccacctgctgctggataccgatgtggagatttttgtctcgattctgctcatgctggtggcgtccagcgctatcggcctgttgatctccgccatcttcaaaagcggtgagagcgcgattttggtcgtgctggtgctgatgatcgggcaggtggtgttcagcggcattatgttcacgctgaccggggtggccgcccggatcgcggcggtcgtcgtctgccgctggggcatgggcgcgctgggggcctccaccgacctgaacagccgcctggcttggctgaagcagggcttcgacagccctatgtacgatgccacggtagccaacctaatgcactcctggcagatgatggggcttatcacggtggtatgcctcaccgccgcctggctggtgctgcagatttcgtttaaccggaggaaagcatagttgagtttgtaggggcggatgcttgtattcgcccgcgggaccgcttggcagccacaacaagggctgccagccagcatggctggcctgctcgttcggatcaaagccccactggggctttgatcgctgcgcgacctcgcaatacaagcatcgacccctacatgcacacaaaaataacgcccctgtccattggacgggggcgctgcttgtatgttttactttttatccggcgggaactctccctggtgttcggcctccaggcggctcaggcgggcttccagttgggagatgcgctggttgacaatatccggcagatcctgctggtccagatcgtccgacgggcagcatttctcgttgcgcatgcgcactacctcggcgggcacgcccacggcggtgcagttggcgggcaggtttttcagcaccacactgccggcgcccacgcgcacgttatcgccgatatatacaggccccagcaccttggtgcctgcgccgatcagcacgttattgcctaaggtcgggtggcgcttgccggtgtccttgccggtgccgcccagggtcacgccgtggtagatcgtgcagttgtcaccgatctcggtggtctcgccaaacacgatgcccatgccgtggtcgataaacagcttgcggccgatcttcgcgccggggtggatctcgatgccagttaaatgccgggccagctggctgacgaaccgcgccaaaaagaaacacttgtggttatacaaaaaatgtgcgatcttatgtgtaaccagcacgtggaaaccggggtacagaatgatgacctcggccacattgcgcgcggcggggtccttatcccggatatttttggcgtcttcccaaaggcccatgatgttttcctctgtttcttattgcataccatattgtgctaaggcaacaccgaacaattcccgcctaacg

SEQ ID NO: 7827 - DNA, 5121 bp, Unknown
  gut microbiota DNA sequence
aaacttagtggaaagttaacttccagtttatcttcttgctgctgtactatacaagatatgcgcccctgctcccgccggggtggctgccatagaaaaagggaggcaccgccgcgcggtgcctcccttttcacattttatgcagaaagctgaaaatcagacgttgaaggtcttattcttgatctcgccgacaaccttggcggtgaaatcttccagattcatcgcggtggtctcgcccttgcggtcgcggacgctgatgttgttggcttcgacttccttggcgccgaggaccagcatatacggcacacggtcgacctgctgggcctggcggatcttgtagccaatcttctcgttggactcatccagcacggcgcggatgccggcggccttcaggctgtcattgacggcgcgggcgtagtccagcgtcttctcgctgacgggcaggaccttgacctgcgtcggggccagccaggtggggaagcggcccttggtctcctcgatcatataggccatgaagcggtccagagagccgaggatggcgcggtgcaggaccacgggggtcttttcggagccgtccttgtcgatataggtcaggtggaacttggcgggcaggcagaagtccagctggcaggtggacagagtgtactcggcaccgacagcgggcttgacgttgacgtccagcttcgggccgtagaaggcggcctcgccgatctcctcggtaaagtggatgcccagctcggtcaggacctcgcgcagggcgttctcagcatggttccacatagcgtcgtcatcatggtacttcttcttgtcggcggggtcgcgcagggacagcacgcagcggtaatcggtgatgttgaagtccttgtagacgtcgaagatcaggctgcagacgtcggcaacttcgctcttgatctgctccggggtgcagaacagatgggcgtcgttctggcagaagtgacggccgcgctcgatgcccttcagggtgccggaggactcatagcggaagtcgtgagcgatctcgccgatgcggatgggcagctggcggtagctgtggggctggttggcgtagatcatcatgtggtgggggcagttcatcgggcgcagcacgtaatcctcgccctccatctccatggcggggaacatgttctcgcggtagtgatcccagtggccggaggtgcggtacaggttcacggtgccgatgcagggagtcatgacgtgcagatagccgcgctcacgctccttggctttgatatagttttccagctcctgccagacggtgtagccgttgggcaggaacatgggcaggccgcggccgaccaggtcgtcggtcataaacaggcgcatttccttgccgatcttgcggtggtcgcgctcgcgggcttcctgctgctgcttctcccaggcgtccagctcctcctgattgcggaaagctacgccgttgatgcgggtcagcatcttgttctctttgtcgttcttccagtaagcgccggactgctgggtgatcttgaaggctttcagggccttggtgtaggtcaggtggggtccgatgcacatgtccacgtactcgccctgctggtagaagctgaactcggtctcctcggccaggtcagccatatgctcgatcttgtagtgctcctggcgatcttccatcagcttgacggcttcggcgcggggcaggatgaagggcttgatgggaagattctctttgcagatcttcttcatctctttctcgatggcggccaggtcctcgtcggtcagcttggtgtcgccgaggtcgacgtcgtagtagaagccgttctcggtggcggggccgaaagcaaagtcagcctgggggtacaggcgcttgatggcctgggccatgatatgggcagcggtgtggcgcaggacatgcagctcctggtcctgcgggcactcggcgacggtaccgtctttgtagatgatcttcataattgtacgctccttttgcaattgcacaaaaatgcaataaaaaatgctccatccctcgcttacaaaagggatgaagcatgcagctccacggttccacccagattgcgcttctatataaggtaagcgccgctcgtgccggctgtaacgggccgtacccggcggaggttcgcccccgcgctcggcagtggtaagaacgcagctgcgcacaaaaccgcttgcaccacgcgggtctgccgcggcggttctctcttgtgtggctggggtgcgttccgtttgtctgcctcatggctttgtcaggatgaagatagtttatttatagcacaagatttgggggaagtcaagagggaaattttgagaatttggaggcaccctctctgctaaattgcacaaaaagtgggggcgcggggggcgcgggcggcagtaatgtgccaaaatttgattttatacattgactttacatatttatgcaactatactggatacataccaagtgagggcttgggaatttattgaataagattcgagggaatataccatgaaaaaactgactgctcttttgatgggcaccgctatggtgctcagtctggccgcctgcggcggctccgcttcctctgctgcttcttctgaggctgcctccagcgaggctgcttcttccgaggagaccagcgaggctgctgctgaggaaactaccgacgaggccgccggcgaagtgaccaccgtcaacgccggcaagctgaccatgtccaccaacgccgctttccccccgtatgagatgaccaccgacagtggtgatctcgagggtatcgacattgaggtcgctggcgccattgctgaaaagctgggcctggagctgcaggtcgacgacatggacttcgacgcggccctgctggctacccagagcggcaagagcgacatggtcatggccggcgttaccgttaccgacgagcgccagaaggtcatggacttctccgacacctacgccgagggcatccagtccatcatcgtgcccgaggattctgacattgcttccgctgacgatctggccggcaagatcatcggcacccagcgcggcaccaccggttacatctactgcaccgatgacttcggtgaggacagcgtcgttgcttacgacgacggtctgaccgctgtgcaggccctgaacaacggccaggtcgacgctgttgttatcgacaacgcccccgccaaggagttcgtggctgccaaccccggcctgaagatcctggataccgcttatgcccaggaagattacgccatcggcgtggccaagggcaacaccgagctgctgaacgccatcaacggcgccctggaagagctgcaggctgacggcaccctgcagagcatcgttgacaaatacatcaaggcagagtaaaatctaacgtaggggcgtttgaacacttactgtccgaagaagggcacgccgggagcaccggcgcgccttttgtttgttagggtgtatctgaaaagtcctcagcgctgttcaattctactaaaaagcacatctgctgcgttgctcatccttgcaatacatccagtattgcagcggattcgcgccttgcagctgttgcttttcagcgaattttccagcacttttgacttatcagatacaccctaggaacccgtaaaagatcaccggcgcagccgggaaaggttgtggtgcgatggaagcacagtttgaaatgctttcagaaatggcaaaaaacggcgataagctgaactttggacaggatttctttgtgaaattctaccaggcgtttttgtattctgaccgctggcagcagtattttaagggcgtgggtaccacgctgttggtaacagccattgcgctggtactgggcgttgtgctgggcgccatcgtggctatggtccgcgtgggtcatgcccagcagaaaccccaccaccgcaacccgatcctgggtgtgctgaacgccgtgtgccaggtgtatgtcacggtcatccgcggcacgcctatgatggtgcagctgctcatcatgagcatggtcatctttgccagcagccgcaactttaccatggtcggcgcactggcgctgggcatcaactccggcgcgtatgtgtcggagatcatccgcggcggcctgatggcggtggaccccggccagatggaagctgggcgcagcttgggcctgaattacatgaccacgatgtttgagatcatcattccccaggcaattcgctcgatcctgccggccctgggcaacgagttcatcatgctgctgaaggattcctcgctgatcacggtcatcggcggcaaggagctgctgtatgcggcccagggcgttatgaaccgtacctacgaagccatgttcccgctgctgggcgttgccgccatctatctggtgctggtcatgctgttcagcgcgctgctggcaaaatttgagaggaggctggcacaaagtgatcggcgttaaaggactgaaaaagaattacggcggtctgcaggtgctgaaaggcgtagacctgaccattgacaaaggcgactgcgtggtgctggtcggcccctccggctgcggcaaatccacgtttctgcgctgcctgaaccggctggaagagccggacggcggcaaggtcatcttcaacggcaaggctgtgaccgaccacgacattgaccatgtgcgccagaagatgggcatggtgttccagcatttcaacctgttcccccacctgacggtgaaaaagaacatcacgctggccccggtcaagctgggcctgatgaagcaggccgaagctgacgccaaggcgatggagctgctggagcgcatcggcctggccgacaaggccgacacctacccgaacatgctttccggcgggcagaagcagcgcattgctattgtacgtgcgctggccatgaaccccgacgtgctgctgttcgacgagccgacctcggcccttgaccccgagatggtgggcgaggtgctggagctgatgaaggaactggcccgcagcggcatgacgatggtgtgtgtgacccacgagatggggtttgcccgcgaggtggcgagccgtgtgatttttattgacgaaggcgtcgtcaaggtcgacaaaccgccgaaggagttttttgccaacccggaaaacgagcggttgaaggcgtttttgtcgaaggtgctttgatttttgttttaatatgcggctatgcgg

SEQ ID NO: 7828 - DNA, 12698 bp, Unknown
  gut microbiota DNA sequence
gcaagccctttcggctgcttgaacaatttttacttcaaaatattgtctaacttttgggggtcacttcatgggtgggtctgcctggttgattcgttcttcagctccctccgggagggggctccgcccgcaggcggtggagggagagagcattaccaaattatcagctgctaaactctccctccggcgcctcgcgtcatctcccccgtaccgggggagtctgtctcacagggggaggctttctcaaattagaacgccactttcttggcgatgtagtccttcagctcactgatgggcatacggacctgctccatggtgtcgcggtcacggacggtcacgcagccgtcggcctcgaccttgtcgtcgccgacagtctggaagtccacggtgatgcacagcggggtaccgatctcatcctggcggcggtaacgcttgccgatggagccggcgtcgtcgtagtcgaccataaagtccttggccagctcgttacggatctccatggccttgtcgcccagcttcttggacaggggcagcacggcgcacttgaagggagccaggaacggatgcagatgcaggacggtgcggacatcctccttgcccttgctgtcggtcaggtgctgttcgtcgtaggcttcgcacaggaaggccagggccacacggtcgcagcccagggagggctcgatgacgtaggggatgtagtgctcgttggtctcggggtcgaagtactccaggctcttgccggaagcctcctggtggcggctcaggtcgtagttggtacggtcggcaatgccccacagctcgccccaatcagtgaacgggaaggcatactcaatatcggtggtggcgcggctgtagaaagccagctcagcggcttcgtggtcacgcaggcgcaggttttcttccttgatgcccagggacagcagccagttcttgcagaaatctttccagtaggcgaaccactccaggtcagtgtcgggcttgcagaagaactcgcactccatctgctcgaactcgcgggtacggaaggtgaagttgcccggggtgatctcgttacggaaagccttgcccacctggcagacgccgaagggcagcttgcggcgggtggtgcgctggatgttggcaaagttcacgaagatgccctgtgcggtctcggggcgcagataacaggtggaggaggaatcctcggtaacgccgatggcggtcttgaacatcaggttgaacttgcggatgggggtaaagtcatgcttgccgcagacggggcagacgacctcatcatggctggcgatgaatgcgtccatctcgtcaaaggtcatggcgtcgacgtcgacgttcttgccctgctcacactcagcgatcagcttatcggcgcggtggcggctcttgcaggcacggcagtccagcaggggatcggagaagctggccacgtggccggtcgtcacccaagtctgggggttcatcaggatagcggcatccaggccgacattatacgggctttcctgcacgaatttcttcagccaggcctttttgacgttgttcttgaactcaacgcccagggggccgtagtcccagctgttggccaggccgccgtagatctcgctgccggggtagatgaaaccgcggtttttgcacaggttgacaatcatgtcaagggtcttttcactgttcttcatacataaactccttccacatggctggctgccacacaaagcgattttttcccaccgcgccggacgttttccgacacgatatggccattataccatagtagagggcaggggacaaggcagtttgaggaaaaaaagccgctattatgcctccctctgggagggagagagccttgccttaagctctctcccccacccgcttcacgggagccccctccctggggggccgatgaggtacaattataacaacaccgccgcaatcttcttggccagctgggtcagttcggcgcgggtcagggtcttgtcggcggccaggcgggccagctcggcctgcacgcggtcgatcttgtgcgcagggatgccgatacgcgccagctccttttgggtaaagggcggctcgttttgcttctgtcccagccgcgatgccgccagcgggtccacgccccacagcacttttgccatatgtaagccctcctgtttgtggtaaacgtccaaaatttgtgcaggtttatcgatattataccaaaaaaggcagcaaagcgcaaaggaaaagcactgggttttgcgggcagtttatcgtactgtaaaatcctttttggctggcaaaacactccgccggggcggcgacctcgacggattgtcatattgacgatgtccatttttgtatattttactaaaaaatcgctcaccctgtccaaaaaattcaaaaaactgtttcttttgtgaaagaaaaaagctataatctaagtaactaattggaatagaaccgcgcccgctgccgggcacggaggatttttgaggtgaccactgatggtttatacaatgtttgatcccaaactgctggacggcgtgcagaccgtgcatttcatcggctgcggcggctccggcacctatccgctgatccagatcctgcacagccagggctatgcgatcaccggttcggacgtagaggagaccaagaacaccgaagccgaacgtgcgctgggcgtgcgggtgtttatcggccacgatgccgctaacgtgggcaatgcgcagctggtcgtttacagtgccgccatccatgacgacaaccccgagctgcaggccgcccgtgcccgcggcatcaaagcggtggagcgcagcgtgctgctgggctacatcagccgcagccatccgcagagcgtcggcgtagccggcacccatggcaagaccaccacctccggcatgatcaccaccatgctggagctggccggcaaggaccctgctgccgttatcggcggcaagctgccccttatcgatggttacggcaaggccggcaacggccaaagcgtcgttatcgaagcctgcgagtaccacgagaccttcctgcacctgaccagcgcagtcggcgtgattctgaacattgacaacgaccatctggaatattacggcaccatgggccagctgaaactggccttccagaagtttgcgctgctgtcccgcacggtggtctttaacatggacgaccgcaacacgatggacgtggtcagctccatcgaccgcccggtggtcagtttcggcatccacgaggaagcccgcatccgtgccatcaatatcaaggagtacaagcccggtttctttgagttcgacgtgctggagctgggtgagccgttcgcccacctgcagttgggcgtgcccggttaccataatatttataatgcgctggctatgtgcgcctgtgtgcgccccctgcacctgaagcccgaggatgccgtgcgcgctgctgctgaattccacggcaccggtcgccgctttgagatcaagggcgagtgcaacggtgcggtcatcgtggacgactacgcccaccatcccaccgagctggccgccaccctggccaccgccaaggagatgggctatgagcgcgtgattgccgtgcaccagccgttcacctacagccgcaccaagatgctgatggatgactttgccaaggttctgagtgtggccgatcaggtggtgctgctgccgatcatgggcagccgcgagaaggatgacggcagcgtgaagagcgaggatctggctgccaagattcccggcagcatcgtggtcgacgggctggaatccgccgccgagtgggtgaaaaagaacgcccacaagggcgacctggtcgtctgcatgagctgcggcgacctgtacaaagccgctgacatgatggttggcaaataagttttcccccacaggctgcccagccgggcggcctgtttttgtagagtacgcgggcggatgcaagcatctgcccctacagatcaacggcaactatatcattcattattgtaaaggagcctctcccatgaaccagcactttctgcagctgtatgccgactttatcgttaaggtgggcgtcaatgtgcgcccgcggcaaaattttatcgtgcgctgcccggtcacgatgccggacttcgcccatgcctgcgtccgcgccggttatgaggcgggtgccaagaccgtcgttgtccgctgggaggacgacaagctgacccgcctgaacatggaaatggccgacgaaaaagatctgaccgccatgaagccctacgagctgcgcagctacctcgactatgccgaggacccggacggctgctgcacactggccatccatgccgaggatcccgaggccctggccgggctggatgccggcaagctgaaccgtgtcagcctggcccgccgcaccttcctcaagccctggcaggagtacacgatgaacgaccgcgtgcagtggtgcgtggccgctgtgcccgccccgagctgggccgcgaaagtcttccctgagctgccggtggaggaagccgtcgagaagctgtggcaggtcatttttgacgtctgccgcgtttccaccggcgaccccgtcactgcctggcaggagcatgttgccaagaccaaagcccgccgcgaccagctgaatgcctggaacctggaccatgtgcacatcgttagctccaacggcaccgacctgaccgtcggcctggccgacgacgccacctgggagggtgcttccagcaagacagacagcggtattgagttcatcgccaatgtgcccaccgaggaagtgttctgcgcaccccaccgcgagcgggtcaacggcacggtctacggcaccaagccttacgtgtacaacggccagctgatcgagggctggcacgtcacctttaaggagggcaaggtcgttgagcatggtgccgagaagaacgccagcctgctggccgagctgctctccaccgatgagaactccaaccgcatcggagaggtggccttcgtgcccgcctccagccccatcaaccgcagcgacgtgctgttcttcaacacgctgtttgacgagaacgccgcctgccacattgcctttggcgcaggctaccccaccaacatcaagggcggaagcgccatgacccgtgcccagctgatggaaaagggcctgaacgactccgccatccacgaggacgtgatgatcggtgcccccgacacccacatcaccggtaccaccaaagacggccaggaagtcaccatctttgtaaacggtgaatgggcattttaagatgatcggacctgtcaaaatgcaaactgcgcaaaatatgtgcggcctaatgggcgcaggatgggcttttttgccgtgtgggggttgcattttgtgctcgggtgtggtatattcttattgttcgatgatgattttattggaaagtgggccgcaaggtccgctttctttttatgatgggagcaaatttcatggcaaaacagcaaaacagcggcggcgccgtcaaaacggtcgaagccctggcacgtcccgttgtcgaaggcatgggccttcgcctgtgggatgtccgctttgagaaggaaggcccagactggttcctgcgcatcctgatcgaccgcgacgagccgctggacaccgacacctgcgaggccgtttcccgcgcgatcgatccgctgctggacgaggcagaccccattgagcagagctactacctcgaagtcggtagcccgggattgggccgccgtctgacccgcccggagcattacgaggcactcaagggccagaagtgcgctgcccacctcatccgcccggacgaggccggccgccgcgacatcgagggcatcctgcaggggctggatgccgacggcaacgccactttggtgaacggggaagagacctacaccttccccgtaaagatggcgggctatgtcaagctgtgtgacgacgaaaatctgttcgattgacgatcgactgaaacctatcgactgcaacatataattgggaggaaaccaaaaaatggctactgcaaacaacgaattttttgaggctctcgctgcgctggaaaaggagcgcggcctgcctgaggactatctggtcgaaaagatcaaggccgcaatcgtcatcgctgtgaagaaagactacgaggtcgaggacgacaacgttgtcgtcgacatcgaccccgagatcggcgctttccgcgccagcctgctgcgcgacatcgtggaggacgtcgagaacccccacacccaggtcagcctggaggatgcccaaaaggtccgcaagagctacaaggtcggccagcgcatggtcaccccgctgaagaccaaggaatttggccgcatcgccgcccagaccgccaagcacgtcatccgtcagggcctgcgcgagggcgagcgcaacctgcagtgcagcgagatgcagtcccgcgcccatgagctgatcaccgccaccgttgtttccgtcgaccacgagcgcggcaacatcgtgctggatctgggcaagggcggctctgccgtgctgccccgcaacgagcaggtccccggcgagagcttcaacgagggcgacaccgtgcaggtctatgtcgtggacgtgctggctaccgaccgcggcccccgcgtgaccatcagccgcacccatcccggcctggtcaagcgcatgtttgagctggaagttcccgagatctacgacggcaccgtcgagatcaaggccatcgcccgcgaggctggtgcccgcaccaagctggccgtctggagcaagaatcccgacgttgaccccgtcggcgcctgcattggtgcccgcggcgcccgcgtggagaagatcgtccaggagctgaacggcgagaagatcgatgtcatccgctggagcgaggacatcaccgagttcatctctgccgccctgtctccggccaaggtcgtcaaggtcgagctgctgcccggcgagaccaagagctgccgcgtcaccgtgcccgaccaccagctgagcctggccatcggcaacaaaggccagaacgtccgcctgtgtgcccacctgaccggctacaacattgacatccgccccgaatccggctactacggcgaggacgaggagtaaaagctagccgcccagcggttaccatattttagaaaagaggtcggctacttgcagcagcaaaagcaaaagaaaatcccggtacgccggtgcgttggatgcaatgcccagcgccccaagcgtgaactggtccgcgtagtgcgcagtcccgaaggggagatcagcattgatctgcgcggcaaagcgccgggccgcggcgcctacttgtgcccctcggccgcctgccttgccaaagcgcgcaaggccaaacggctggaacgcacctttgaggtccccatcccggacggcatctatgaccgcctgaccgaggagatccagtgtgcggaacaaagcgcaaaggaggcggcagaccatggcgaatgaacagcacccgctgatgggtgccctggggctgtgccgcaaggccggcaagctgctgcacgggtatgaccgcgtacaggaaaacgccctgcgcggcaaggttgcactggtgctgctgacggctgacgccagcgaacgcaccgtcaagcatatgaaggaagcctgcgagggcatcgttgcctgtgagcagatccctctgaccagcgcccagctggctatgcttaccccgaaacccgccgccgtgttcggcattaccgacgaacaccttgcgcagctgtgcgcaaaacatcttacctgataaggaggaccacaatctatggattttaaatacaagatcgctgatgttgccaaggagttcggcgtacccaccaagaaagtgatcgagaccgtagcccccattaccggcgagagctacaagaccggcagcacctttggtgaaaaggaactgaatctgctgctggagaccctgacccgcgagaatgccgagggcagcctggatgcctacctggccagcggcgccaaggaagagcccgccccggccccgaaggcccccgttgagaacaagaagaagcccgctgccgaggccaagaagcctgagcagaagcccgccccgaaggccgaggaaaagaagcccgaagccaagaatgcggaagagaaaaagccggagagcaagaaggaccgcaaggccgagaacaagcctgccgagaagcgcagcgaaaagcgcgttaccctgcaggagctggccgccgacaccggcatcaaggagcctgtcaaggctgtggagcaggtgcaggtcaaccgtgcccaggtgtctgttgacacccgcaccgtcgacgtgaacgtggataagttcaacgcccgctacgacgacctggccgacagccgcaacatgcccaacaagcgcaagaaccagcccaccggcaagaaagaaaagttcaacaaccgcaacaaccgccgcggccagcagtttggccgccgccgtgagaccgaggctgagcgactgcagcgcatccagttggaaaaggcccgcaacgcgcagctgaagatctccatccccgatgagatcaccgtcggcgagctggctgcccgcctgaagcagaccgctgccaaggtcgttgccaagttcatgcagatgggcgagatgcacgccatctccgatgtcgtcgatttcgacaccgccgccctgatcgctgaggagttccacgccaaggtcgagcacgaggtccatgtctccatcgaggagcgcctgtttgtacaggaagaggacaacgcagctgatctggtcgagcgtccgccggtcgtcgtggtcatgggccacgttgaccacggcaagacctccatcttggatgccatccgtaagtccaacgtcaccaagggcgaggccggcggcatcactcaggccatcggtgcttaccaggtcaagagcggcgataagctcatcaccttcctggacacccccggccacgaggctttcaccgccatgcgtgcccgcggcgccaacatgaccgatattgcggttctggtcgttgcagccgatgacggcatcatgccccagactatcgaatccatcaaccacgccaaggctgccaatgtcaagctgatcgttgccatcaacaagatggataagcccaccgccaacccggagcgcgtgaaagagcagctgaccaagtacgagatcgtgcccgaggattggggcggcgatgttgcctgcatccctgtctctgccgtcaccggcatgggcatcagcgacctgctggagcgcatcgcgctggaggccgaggtcatggaactgaaggccaaccccagccgccgcggcaagggtgctgtcgtcgaagcccgcctggacaagggccagggccccatcgccaccctgctggtgcagaacggcaccctgcataagggcgactgcctgatcgccggcacctccgttggccgcgtgcgtaccatgcgcgacgacaagggccgcgagatcaccgaggccggtccttccacccccgtcgagatcaccggcctgaccgaagtgcccgaagccggcgagctgttcgaggctgttgaggacgagcgcctggcccgtgagctggccgacaagcgtaccgccgaggccaaggaaaagcagtttgccgcttacaccaaggtcaccctggataacctgttcgaccagatggccgccaacgatatgaaggagctgcccatcgtcgtcaaggctgacgtccagggctccgccgaggccgtgaagcagagcctcgagaagatctccaacgacgaggtccgcgtccgcgtgatccatgctggcgtcggcgctatctccaagtccgacgtttctctggctgacgcttccaacgccatcatcattggcttcaatgtccgtcccgatgccgttgccaaagctgaagccgagcagaccggcgttgagatgcgtatgtaccgcgtcatttacgatgctatcaacgatgtttccgacgctatgaagggcatgctggccccgaaggtgcgcgaagttgccctgggcgaggctcaggtccgccaggtctacaagatctccagcgttggcaccgttgccggctgccgtgttaccgacggcaagatcacccgcgatgcccagctgcgcctggtacgtgacggcatcgtcatctgtgaggattccatcgccagcctgaagcgttttaaggacgacgccaaggaagtggccgagggctttgagtgcggcatcacgctggccaagttccaggacatcaaggaaggcgacgtcttcgagtgcttcaagatggaagagtaccgcgactaagagggaaacaaatctatgcctaccaaaaaccatggccgtatggcccaggatatgaagcgggagctgatcgccattatcggcgagatgaaggacccccgcattacgggcggtctgctgacggtgacccgtctggacgtaacgcccgatcttgaccaggcgaaagtttatatcagcgtaatgggccgcgagggcggccctgcgccggtcgtcaaggcgctgaacaaggcttccgggcatgtccgcaccgaggtcagccgccgtatgcacatccgcaaggcaccgcgctttgtctttgtagccgatgagggcgctgcttacgccgcccacatcaacaagctgctggacgaactggcggtcgcggagggcggcggcgcggagtaagcgtcttacgcagttgtaatatcttctggaaaagaggaaccctatgactcagaatgtagaccgcgagaccgttgtttcgcgcctgctgggcaccgatgacatcctgattctgtgccacaaaaacccggacggcgataccatcggctcgagcgctgcgctgtgcaaggcactgcagcacctgggcaagaccgccgctgtgctgtgcagtgatcccattcctgccatgtatgattacatgcagatcaccgtgtacgacggcagcttcacccccgcctttgtggtggcggtggacgtggctggtatccagctgttcggcgaccacaataacatccaagattacgccgagcatgtcgacctatgcatcgatcaccacggctccaacagcggctacgcctacgaaacactggtggacgaccacgcggctgcagccgccgagctgctgaccgagctgatcccccagatgggcgtggagcttacgccggagattgcggcctgcctgtacaccggcgtggccaccgacacgggctgcttccgctttaccaacaccacggccaacacccacctggcagctgccaagctgatcgaggccggggccgatgtggaaaagctgaatgaacgcctgttcgagtgccgctctcatgcacgcatccaggctgaaaaaatggcgctggaaagtctggaattctactacgaggaccgctgcgccctcatctgcctgacctgggatcaaatccaggccgcaggtgtggccggggctgagttggaggatttgaccagcattccgcgttccatcgagggcgtggaggtcggcctgaccctgcgccagcaaaaggacggcagctacaagatcagcgtgcgcaccggccacgacaccaacgcctgcaacattgcacggcgcctaggcggcggcgggcacccccgcgctgccgggtgcgagatcagcggcaatctggacaacgccaagcatgccatcctggaagaagtcaaaaaggaactggaccgcgctgaggcggagaagaacagcttagagcagtaaattttgccatctgtttgtaggggtcgatgctcgcgtccgcccctacagaatcacagcaggcaagactgctttataatcgaaacagaaaaggaaccctgcgtatgcaaacgccaaacggcattttgcccgtggataagcccgcaggctggaccagctttgatgtgctggcgaagctgcgcggcgctttgggcacacgcaagctggggcactcgggcacactggaccctatggcgaccggtgtgctcgccgtgtttatcggcaaagccaccgcggctgccgaccgccagctgaaccacgataaaacctacgaagctacgatccgcttgggcctgcgcaccgataccggcgacatcaccggcacggcgctggaaaccgcccccgtcacagtaggggaaagcgaactgaaagccgtgctgccccagttcaccggtgagttgatgcaactgccgccgatgtactcagcggtcaaaatcaacggccagccgttgtataaggccgcacgcaagggccagactgtcgagcgcacgccccggcccatcactgtgtacagcattgaatatctgggcagccccgcccccggcgattataccctgcgggtgagctgctccaagggcacctatatccgcgtgttggccgaggacatcggcacagccctgggtgtgcccgccacgctggccgcgctgcgccgcacccaggccggagaatttggcatcgaacagtgccatacattgccggagattttagctgccgccgagagcggtgcgctggaatcgaacggctggatgctgccgatcgagaccgtgtttgcaccgctgccccagctgcatgtggacaatgccgtgaaaaagcacctgctgaacggctgccctaccagccattatcccgccgaggacggtcgctaccgcgtgtacggtccggacgaagcgttcttagggctggcggccatcaccggcggcgtactgaatgtagaaaaactattttgcgaaagggactgaacgcccatgcaaatttaccacaccttgaccccggcctccgccccgcaggacagtgccgttgcgctggggtattttgacggcgtacactccgggcaccgcgccgtgctgggtgctgccgttacctatgcggcgcaac

SEQ ID NO: 7829 - DNA, 62770 bp, Unknown
  gut microbiota DNA sequence
gcctgaagggcgggcgtatcctctcactggcgcaaaagcacacccgcgtggcccagctgggtatcgcccagtattgggagccatcctttgaggagttccgcgccctctcgccggaggattttgtccgccgtgtgctggtggactgcttccatgcaaaggcggtcttctgtggcgacaactttacctttggcgcttacgccgcaggcaatgtagcgctgctggagcagctctgtgccccctacggcatcaccgtagacgtagtgcccatggcccagtacggcgggcagaccgtgtcgtccacccgcatccgcgccgcgctggaggagggccgcctggacgacgccaacgccatgctgggcaagccctacgccattgattgggctgtgacccacggcaagggcattggcagcggcaagctgggcacgccgaccatcaatcagaactatccggccgaggctctgcagccctgcaccggcgtgtacctgacgcggattctgctggacgggcagtggcggcccgccgctaccggcatcggccgccgtcccaccgtggacagcagcgccaatgccgccgtcacctgtgagacctttgtgccggactacgtgggcaacgtctatggccagaccccgctgctggagttccataaatatttgtgcccggtacgcaagtttaactccatggacgagctggctgccctgatccaccacgccgccgaggaaagcaaggcttacttcgcggcgcagcactgaaaggggagggaagcacgatgtcggatggaaaaaccgccgtacttacgcggaagtccccattggaaaagtttgcgtccttctgcggcagtgcagccgcttggctggcagcgctggtgctgttcgggctggcagcggcttcgctgatcgcgcggatggacttgctggatgtttccaccttggccgaaggcaaggctctgcgggtggggatctcgctgcctgaactgttgctgtttgtggtgctgaccgctttgttggccgggctgtgccgactgctgcgcgggctggatgaccagaaaaaaaccaatcggctgattgccggggcggctgtactggaatttgcgctggcgttgtggtgggtgttctcccagcagatctacccggcgaatgaccaggagacagtctggaagatggctgaggcgctggcgagcggggatttttctgcttatgcatcagacagttacggctggacttatttccagacctgcccctatcagggtgctatggcactgtttatggagccgtttatccggatgttcggcaacggtgcgctgcgggcatggtcgctgtttggtgccatttccgccccggcctgcctgctggcgctctgttgcattgtcagggagtttggtgccaaacctcgcacccagttgctttgcgcagtgctctgcctgctgtttgttcccattccgatgtatgcctcttttgtgtatggcactttaccggccccggccatggtgttgtggggcggctacggattgctgcgttttataaaaggcggaaaaccgagctggctggcactgccctttgtgctgttcccactggccgtactggcctatcagtcggcgctgatctttatcattgctgtctgcatcgtggctgcgttttccggctttgggcgcagtggcaagcagctgctgcgcggtcttgtgctggcaacgctgctgctggccgtgccggtagccgtggaaaatatcggccaatcggtatttttcagccgtgtgccgattccatactccaccggcatgcctgccagcgccacggtgcttatgggtatccacagcggtacctattatgggccaggcggtttcgatggaagcagttggaacctattctgggacaacaacgccgacaccaccgccgccaatgcggcggcggtcaaaggcattggcgagtactggaacacctacctgcacaaccccaaggaggtcaagtttttcctccaaaagaccgcctggcaatggctggacccctggtttgaggccctgacgatgaacggcccgtccatcacggtggccgggggcgtgggctggctggccaccgcgttgggcggcggtgtgctgtttgccccggtacaggccgtgttgcgggcactgctgacttttgtatatctctttgccggctgcggcactttggcgcagcgccgcaaaaccggcggtgctgtttgggcgcagctgcttggcatcgcgtttttcggaggttttctcttccagctcgtctgggagaccaagagccgctactgcttcccgttctttgttttcctgctgcccctggctgcggtcggctttatcaccgcgctgcgctgggcaggggataagtctgcaaaataattgtaaaatacctgcatcctgccccttgtaatttgggggagggtatggtatacttatgactgttaccgtggctcggtttggggcgtatgcctctagggttccaactaccccttactgcgctttcggcaaatccatatttttttgaaagaggtatttaccatgagccagaaatctgctatcgataagcagcccatcatcgccaaggcagccatccacgagggtgacaccggttctccggaggtccaggttgctctgctgaccgctcgtatcaaccacttgaccgagcatctgaagaccaacaagcatgacaaccacagccgccgcggcctgttcaagatggtcggccgccgtcgtaatctgctggcctacctgcagaagaaggacatcaaccgttaccgtgccctgatcgctgagctgggtctgcgcaagtaatttccgcaaaaacgggcagggtgcatatgcaccttgcccgttctttttatagtaacccctgttctggcatcccttattatggacgaaggccgccccgccactgccgttttgcgcagtaaatcgagcacccaagcatctggcttggctgctggctttattgctcaaaaccggggtgcggtccggccacgacatatcatcccaaacgaaggagaaaacctatggcttacgaatttgcttcccggctggaaaccttccccaagtaccgcaaatttgagacgacctttgcaggccgcccctttgtggtcgagaccggcaaaatgtgcggtctgtccaacggcagcgccatgatccgctacggcgagacctgcgtgctgtgcaacgtcaccatgagcgacaagccccgtgacggcgttgatttcttccccctgagcgtggagtttgaggaaaagctgtacgccgccggccgtattcccggcagctttatgcgccgtgagggccgccctggtgagcatgccatcctgtcctcccgcgtggtcgaccgccccatccgcccgctgttccccaaggatatgcgcaacgatgtctgcgtgaccatgaccgtcatgagcctggaccccgattgctccgctgaaatatccggcatgaacggtgcctctctggtcatcgccatgtctgatattccctggggcggccccatcgccggtgtgtctgtcggtctggtggacggcgagatcgtgctgaaccccaccaaggagcagcgcgagcacagcgacctgtccctgaccctggctgccagcgaggagaagatcgttatgatcgaggccggcgccaacgaggtcgacgaggagactatgatgaaggccatccgtgccggtcacgaagagatcaagaagatgctggcctttatcaacagcatcgtggccgagatcggcaagccgaagaagagctttacccccgtggagctggatcacgccctgctggccgacgtgtacgccaaacatctggacgaagtcaaggccgccatggacaccgacgacaagaacgtccgcgacgccgctatgctgcccatcatggatgccatcgctgccgaacatcccgacctgactgcctctgacctggatctcatcagctacaagctgcaaaagaaggtcgtgcgcacctggctgctggaagatggcaagcgtgttgacggccgcggcatcaacgagatccgcccgctggctgccgaagtcggtctgctgccccgcgtgcatggttccggcatgttcacccgcggccagacccaggtcctgaccatctgcaccctgggctctaccaaggacgcccagctgatggacgacctgtctgacacccagtacaagcgttacatccatcactacaacttcccgccgtattctgtcggcgaggcccgcgctccccgcagccccggccgccgcgagatcggccacggcaacctggcagagcgtgccctgatccccgtgctgcctgaccaggctgagttcccgtacaccatccgctgcgtgtctgaggtcctgtcctccaacggctccacctctcaggcatccatctgcggttccacccttgctctgatggacgccggcgtgcccatcaaagcaccggttgccggcatctcctgcggcctgatcaccgacggcgacccgctgcacggcggccgctggatgaccatgctggacatccagggcgtcgaggatttccacggcgacatggactttaaggtcggcggcacccgccgcggcatcactgccatccagatggacatcaaggtcgatggcctgacctacgaaatcgtcgaggaggccctcgagaagtgccgcaagggccgtctgtacatcctggatcagatcatcaagccggtcattgctgagccgcgtgctgaactgagcaagtatgcgcccaagatgttcagcatgatgatcccggtcgacaagatcaaggacgtcatcggcaagggcggcaaggtcatccaggagatgtgcgccaacttcaactgcaagatcgacattgaggaggacggccacgtcttcatctctgccattgaccaagatgacgccaagcgcgccattgctaccatcaagaccattgtggaggacccggagattggcgccatctacaagggccgcgtgacccgcctgatgaacttcggtgctttcgttgagattgcaccgggcaaagagggcctggtccacatctccaagctggacgatcatcgcgtcgagcatgtggaggatgtcgttgctgtcggcgatcccatcttcgtcatggttacggacatcgaccagcagggtcgcatcaatctgtcccgcaaggacgccctggctgccatcgccaagaagcgcgccgaggccgctgcccaacagtgatgccggggggctttgttcctttcttgcaagaaaggaaccgaaagaactcttaacaaaaattggggtatcccgtatgggataccccaatttttcattgaaagtttcttcggttccttcttttcaaagaaggaacaaaatctccggcgccccgcttgacggcggagcgccgggcgtgtatacttaaagttagagtatagtttaaggagtgtgtcgtttatgtacacagtcggagagatggcgcggatgctgcatgtaccggcatcgacgctgcgctactatgacaagcagggcctgctgcccttcgtggagcggtcgccgggcggtatccgcgttttcaaagatagcgactttgaatggctgcgcatcatcgagtgcatgaaaaaagccggtatgtcgttaaaagacatccgcatctacatcgagctggccgtgcagggggattccaccatcgacgcccggctggccatgttccgccgccagcaggacaccctgcgtgcccagatgcagcagctgcaggacaccatgcaggtgctggaatacaagtgctggtactacgagaccgctcaaaagctgggcagcatcgacgctgtaaaaaacctgcccgacaaggatatccccgccgaaatgcaggccgtaaaggcccatttgtgcgattgcccggatgcggaatgagcattagttccccttgaggggagctacatacaacgaaaggccagagccgaacagctctggccttttctttatgcaagaagcaattacagcttctcaacaacttccttggtgtcgcgggcaatcatcagctcctcgttggtctcaatgatcagggtgcggacacgggcgccccaggcggtaacttcgacaacgtccttcttctgcttgtgagcatcgcggttcttgtcggtgtcgatgcggatgcccagccaatccatgtggtggcagatcttggcacgggagtcggcgtcatgctcgccgatgccgcccgtaaagacgatggcgtccacgccgcccatggcggcaatgtagctgccgatggtctttttgatctggtagttcagcatatcgctggccagctgtgcgcgcacgttgccatgctcggcggcttcctcgacgtcgcgcttgtcgctggaaacgccggaaacacccagcagaccggacttcttgttcaggatctcgtccagctcgtggccggtgatctccaggttgtatttcaggtagttgaccacgctgggatccaggtcgccgcagcgggtgcccatcatcaggccggccagcggggtcatgcccatggaggtgtcgatgaccttgccctggtcgacagcggcaatggaggaaccgttgcccaggtggcaggtgatgagtttcaggcgctcaatgggctcctccaaaaactcggcggcgcggtggctgacatacttgtggctggtgccgtggaagccgtagcggcgcacgccgtacttctcgtagtactcgtaggggatggcgtacatgtaggccttcggaggcatggtggagtggaaggccgtatcaaacacagcgatgttgggcttatcctcgccaaagaccttataggaagcctcgatacccaggatggcggcggggttatgcaggggagccagggggctcaggtcatggatagccttgacgacctcgggggtgatcaggcagctctccttgaacttctcgccgccgtgaacaacacggtggccgatggcgtcgatctcggaaacgctgtcaataactttgccctcgccggtggtcatcttcttcacaacctcggcaaatgcctcggtgtgggtggggaagatggcgggcgtggtggccttgttgccgttgccctcgtgggtgatcatgctgctttccataccgatgcgctcgcacagacctttgcaaagaaccttttctccgtccatgtcgatgagctggtacttcaggctggaagagccgcagttgataaccagaactttcatggggtatcctccttatttttaagggcacaattacgccctttccttattacaatttttattatataatgtggttagtgtttttgcaaggcgagaacgcacaaatcttgcacgttctttttttaacaacctgctcaggagttttttgcatggaatttgccggaatcatcaccgaatatgacccttttcacaacggccatgccgcacagatcgctgcggccaagtcggcgggcgcgggctgtgtggctgtctgcatgagcagcggtgccgtccagcggggcggcgtgcccgtgctgcccgagagtgtgcgggtgtgcgcggcgctggatgctggggcagatttagtcattacattgcccgcaccctacgcctgtgccacagccgagcagtttgcctccgccggggtgcgtctgctggccgcgctggggtgcgatacgctggtattcggggccgaggaccccgacgccgcccagctctcgcaagtggccgagctgctggccaggccggagctggacgccctattacgggaacggctttccaccggcatgacctacgccgccgcacgggccgaagccgccgacgcgctgctgccaggggcggggacactgctgcgcacgcccaacaacattttgggcatcgagtactgcaaagccattttggcgcagggcgccgccctcacgccgctggcgctgccccggctgggtgcagcccatggcggcggcaggccgggggagcacaatggcatccccatggccagcgccagctacctgcgcagcctgacggtggaggattgggaaccctacgtgcccccgcgggcggcagcgctgtacaccagggctgcggcggcgggactgctgacggatggaaacaaattcgaggttgccgtgctggcgctgctgcgcgcgaaacccgaagccgattttgccgccgtgcgaggtgtgagcgaggggctggaacaccgcctggccgctgccgtgcgggaggccaccagcctggacgacctgtacacccgcctaaagacaaaacgctacccccatgcgcggctgcggcggctggtgctggacgctgcgctgggcatccccgccgagctgcctgcgccgccctacatccaggtattgggggcacgcaaaactgcgctgtcccgtttaaagcaggccgcgctgcccgccgggaccagtttagccgacctggcacgcagcggggcggaggccgcaaaaatcagcgaattgcacagcaaagctgtcgatttttcggcactttgcagggtcaaaacccagccgatgggacttgcctttacgaccaaacccgtggtaatataaaacacatatggagaaatgctcgtagaactgtaagattgttgcatttttaacgggcaaaatcggttcgtaaaaggagaagaaaccatggcattgcatgtaatggatgaagccaaccattgccttggatgcaaaaagccccgctgccaacagggctgccccatccacaccaacatccccgaggtcatccgcctgctgaaggacaacaaactggacgacgccggcaagatgctgtttgagaataaccccctgaccaccgtctgctcgctggtgtgcaaccacgagaaccagtgcgagggccactgcgtgcagggcatcaagggcgcacccgtgcatttctcggtcatcgagaactacatttcctctacctacgccagccagatgaccaaaggtcccgccacccccaacggtaaaaaggccgccatcatcggcagcggcccggctggtttgaccatcgcggtcatcctggcccgctacggctacgatgtgaccatttttgaaagccacgataagatcggcggcgtgctgcgctacggcatccctgagttccgtctgcccaaaagtgtgctggacgacttcgagtaccgccacctgcgcctgaaggacatcaaagtccgccccaacaccgacgtgggcaaggccctgcggctggaggacctcttccgcgatgggtacaaggcgatcttcatcggcaccggcgtatggcgtcccaacacactgcacatcaagggcgagagcctgggcaacgtacactatgccatcaactacctgcaaaaccctgacgtctaccacctgggccgccgcttgatcgtcatcggcgcaggcaacgccgccatggatgtctgccgtaccgccctgcgccacggcacccgccatgtggagtgcttctcgctgtccaaaaagatcaccgccagcgagtacgaggccagctacgccaagctggaaggcgtcaacttccactttaacaaaaaaccggtggagatcactgacaagggcgtggtgttccgcgacctgaatgaagccgaggacggcaccctgaccgacatcccggacaccgaggaactatacccgtccgatagcgtgatcgtctccatcagccagggtccctgcaccaccatcaccgagagcgaacacgacctgaaaaccaacgagcgcggcttgtttgtgaccgacgagctgggccacaccagcatgcccggcgtgtttgccagcggcgatgccgtcaagggcgcgcgcaccgtagtcgaggccgtggcctacagcaaaaaggtggccgaggccatgcacgagtacatgcagaccctgccgcccgagctgcccgacgagtacgccaacgtacccatggccaagtacgatgacggcaactgatttttacacatacccatccagcgtggggcattttgccctgcgctttgtttttgcctgacacaaattggaaacatagctgtgttagggtaggggaaaggaggcgatgttgcgtgaaatctcgttttgtatttttatttttggtttttacagtttgtattttatctggttgtggcgcaggtcataatgcgcgtatagatgttgatttttcggcatctgatgctgctcagacagcggaaagcggcgcggtggtggttgcggaagatggcgcaagcacgctgcacatgctgggtgcggcgaacaaatacggctggtatcaggtcgggtacgatgaaacggatgtgtggtacggcaccgtgatcgattttgccgaagccgaggagcgggagatttctgccccagacagcctgcccatgaacggccgggtgggcaatttgcaggttgacgatgcgcaaatcgtctggagctggtccggcatgctgaccgacactccggcgctggtggtgacggattttgacagaaaccagaccggggcggtcagcttcccgcagggatggtaccttgccggttgggcacccatagccgccgacgaacagtacttatatgccaaaggcggtatggtctccgatgatcccgcccgcctggacgagcgccgcctgcttcggctgaacccggccgccgacacggtagagaccgtcacgacctgggacgagtacggcggccagctgctgggtacctgggatggcaagctgctgctcacacggcgggtgcccggcgctgattgcccggagcctgtgtatgcttattacagtgtcgacaattttaacgatctgaagccctatttaaccgagacactctgcgcactggaccctgccaccggcagtgagatcgtgctggccgagggggcggtgtatacctttggtccgctgcggaagttagccggggatgcgctgtggtgggtggacggcacccgcctgctgcgccagccgttgggcacaaacgaggtgcagacggtggctgagcttccacaagagatgacgctggacagcgtgtatgacgaggatgtgtttttgctggcccgccaggatgagcggcaagtgctgtatgtgtatcatctggcagacggcacgctggccgaaagccccctgcgctgtgctctcaagtacgaggataattatgttcccatcgtctgccaggctgcgccaggaatgtatttgattatcgagggcgagaccgccgtgacgaaaaccctcaccggcaccgatgggcggcaatacaacatcagttccccagtaacgcagtatgccctggctacgcgatcggcaatactggatcccagcgtcccgactacgccagtgccgccaggcatatggcgaaaatagcagcgcggaaatctccctttccataagggagatttttcattttgtgcgtcttgcacaaattttcgccgtgatttttgtcgcttgaaaatgattgtttgtggttgattctggtggtcgttgtgctataatacaatcagaatcaatcaaatacagccacaaattgtcaaatccaatcaggaagggaataaaaaaggaggccctccatgcttgcagaagaacgattttcccagattctggcgctgctggcggaaaaacgcaccgccaccgtacaggaactttgcgaggccctgaacgtcagcgagtccaccatccggcgcgacctgctggagctggaccgtcagggtcgggtcaataaagtccacggcggtgccacgttgccaagcagccagttccgagccgacgagcccacgatggaagccaaggaaacactggccgtcagccaaaaaaacaccatcgccaaagccgccgccgctcttatccaggccgatgatttcgtctacctggacgccggatccaccacgctggccgtggcacgggccgtcagcggcgcggcgctggacgcccactacgtcaccaacggcatcgcccacgcgcggctgctggcgcaaaaaggctgccgcgtctttgtgcctggcggcctgctgcgcccccagaccgaggccatcatcggcgcggcagccatggcggcgctgcagcagtacaacttcaccaaggcgtttttgggggccaacggcattgatctggtcgccgggttcaccaccccggaccccgaggaagccgccgtcaaggcctgtgccgcccgccgcgcccacgaggtatggtttttggccgatgacaccaagttcggcagcatctacccggccgtaatcgccgggctgcagaatggttctatcctgaccaaccgctgccctgatccccgctaccgccagcaaacgctggtaaaggaggcagaagcatgatctataccgttacatttaaccccgccatcgactacgtcgtccggctggacagtccgctgcaggtcgcggccatcaaccgcgccaccggcgaggattgcgtgctgggcggcaagggcatcaatgtatccggcgtgctggcccagctgggggccgaaagtgtggctctcggctttatcgcaggcgagaccggcgcctggctggagcgcggcctggccgcccagggtctgcacaccgatttcatccacctgcaagaggggatgacacgcatcaatgtcaagatcaaggccgggcaggagaccgagctgaacggcgcagggccgaacattcccgaagccgccatgcaggcgctggaagccaagctggacgcgctgcaaaaagacgacgtgctgattttggcgggcagcatcccggcctgcctgccgcagaccacctacgaacggctgctggcccggctgcagggccgcggcgtacgcgctgtggtagacgccacccaaaacctgctgctgaaggtgctcccctacgaaccgttccttgtcaagcccaacaaccacgagctggccgagatcgtgggccgcgagctgaccaatgatgacgagatcgtcaccgccgccgccagcctgcaggcccagggtgcccacaacgtgctggtaagcatggccggggacggcgcactgctgctggacgaaaacggcacggtgcatcgcatcggctgccccaagggcaaggtggtcaacagcgttggcgcgggcgacagcatggtagccggttttatggcgggctacctgcgcaccggcgattaccgctacgcgctgcgcctgggcaccgcctgtggcagtgcaacggcgttcagcgtcgggctggcaacgaaggcggatattgaaaagctgctgagaatgatttgataaatagaaggagacccgctatgcgtattacagaactgtttactgcgcagtccattgcactggatgaggccgcagccgatcaggcgcagatcatcgacgggctggtggaattgcaggcaacccacggcaacatcaccgaccgagaagcctacaaaaaagccctctacgctcgcgaagccgaagcgtccacctacgtggataacggcatcacggtgccccacgcccgcactgcctgtgtgacccgccccagcctggccgccatgcgtctggccgcgcccgtgcagtacaacgccgaggatgacggtaagaccgacctgctgtttgccatcgctgcgccggaaaacggcagcttgcacattgacatgctggcccgcatgatgcagatgctgatgaacgacgattttgtcgaaaagctgcgcgccgccaaaacgcccgccgagttcctggccgccatcgatgtccaggaagacgcccagttcggcgaggagagcttcacccagcaggagatcccccagcagggctaccgcgtgctggctgtgaccgcctgccccaacggcatcgcacacacctacatggccgccgaggcgctgaccaaggccggtgaccgtctgggcctgcccaccaaggtggagaccaatggctcggacggcgcgaaaaacgtgctgaccgtcgaggagattgccgcctgtgacggcatcatcattgcagcggacaaaaacgtcgagaccacccgttttgacggtaagccggtgatttttgcccgtgtggatgacggcatccacaaaccagaggaacttattaaaaccatcgcccacggcgaagcccccatcttccacgccaagggcggcacaccggcggccaacgaggccagtgccaacgactccgtcggccacaccctctacaagcacctgatgaacggtgtctctcacatgctgcccttcgtggtaggcggcggcatcatgatcgcgctggcgtttttgctggacgattacaccatcgatccctccaacttcggcatgaacaccccggtggcggccttctttaaaactgtaggcaacgcagcgttcagctacatgctgcccatcctgtcggcctacattgccatgtccattgctgaccgtcccggcctggccgtgggctttgcaggtggtgtgctggctatgaacggcaccaactttgccgggctggcccagggcgacaccaccggcatttcgggcggctttttggctgcgttgctggccggttttgtctccggctatatcgtcgagggtctcaaacgcatcaccgaaaagctgcccgccagcctgaacggcatccgcccgatgctgatctacccgctgggcggcatgctggccatcggtgccgtaatgtgtggcatcaatccggtcatgggcgtgatcaacaccgccatgaccgattggctgaacgccatgggcggcacctccaaggtgctgctgggcgccatcgtggctggtatgatggcggtggacatgggcggccccgtcaacaaagcctcctacgccttcggcatcgcggcgctggcctccggcaactacggcgtcatggccgccgtcatggtaggcggcatggtcccgccgatcgctattgcgctgtccaccaccttctgccccaaaaagtggaccgaggacgagcgccgcaacggcatcgtcaactacgtaatgggtctgtgtttcgtctccgagggcgctattccgtatgcggcggccgatccgctgcgcgtgctgcccagctgcgtcatcggcgcggcactgtcgggtgcgctgtcgatgaccttcggctgcgccttgcgtgcgccccacggcggaatcttcgtcttcccggtcgtggaccacgcgctgctgtactttgtggcgctggccattggcagcgtggtgggcgcagtaattttgagcctgctgaaaaaggaccgaaccgacgcttgatacgatgatagaacagacggcccccgccggagattttctcccggcgggggctgttttggcttggttgatgtgtttgccggattttgcagtacgtgtctccccggccgcagcatgcaggtctggtcgtttgcaaacccgccacggctgtgctatagtagtagcaacacacaaaatggaggatcgctatgctgcctgttacaacgccgggagccgagatcgtttttgagggcacctgcaatttccgcgagctggggggctaccgcgctgccgatggccgccatgtgcgccgcgggctgctgtaccgcggctgcagcctggatacgctgcaaagccccgctgaccgtaccaagctggaaagcctgcacctgcgggagatcctggacctgcgcagcgccggagaggccgcccgccagcccgacgcggccgtgtccggggcgcattaccagcgtatctgcggcatgcggtacgccgatggcagcgagatggacttttcgcccgccggcatccagcgcattgccgccgaaaaggccgcctacgaggccaaagccggccaccccgtacacgatttttactggttcactgacctgtacaagcagatgcctttcggcaacccggcctaccatgagctgttccgcctgctggaggagcatcgcgtaccgctgctgttccactgcacctgcggcaaggaccgcaccggcattgccgctatgttggtactgctggcgctgggtgtgagccgggaggatgccatcgccgactacatgctgacgaacgtttaccgcaaagccatcatcgataaattcatgcaggataaacccgccgaccagtacgacctgctgctgcctgtggagggcgtaagcgaatcgatgggggcagggtccatcgacgtactgctggaaaagtaccccagctatgaggcgtattttgaggctgaatacggcctgaccacggcacgcctggccgcgctgcgggatttttatctggaataattattttggaatcatgcgtcacctgcggtgataagaactacaccgccgaccagctgaaaaaggggatatggcacgtgaccatcatcgcgttcgtgttctgcgcgtcggtgtggtcgctgtcgatggccgtgctccaggtgtacgcgcgcatcttttccgccagcaagagcagttggtgcacgcaggcggggcaaaaaagtaaggcgcagctgcgcggattttcggatttttacagatttttgcaaaaaagtttgaaatagctgttgacaaacggtttcccacacgctataatatatgagcgttgagggcagacgcccacaacgatgattgcgatggggattcgcataatggtagtgcagcggactctgactccgcccgtgggagttcgatcctctcatccccaaccacaccgcagcagcgcagctgctgcggttttttctttccggggtgtagcgcagttggtagcgcgcttggttcgggaccaagaggccgtgggttcaaatcccgtcactccgacttgtaaaaagagcgttaaaacgtaagttttaacgctcttttgctttatcagtacacactttagtacccacttctgatatttttaatgtcatgcaacagttccttatatgccttcggtgactctcgcttcaacgcatccataaacgcatcaagcacgcgctgcattgtcggctcggcattctccaattctgcaatcgcgccgtcaatttctcgcctgtcgtacatagccgcgccccttttcttatcgtttcaactcgtcaatgcatctgcgaagaagatcacgatcgtctgcagtctgcatcatgtcttccagccggtgcacaaggctgccattgtcgcggctatattgtccgcgaacgtaatgcgtgccacgtctgccgtagctgctgccgttcccgtaatcgccgtaggcttcccatcggccaatgccattacctacacaccgccgtctgccgcctttttgtttaaagagatgatggagaaataccgcgaagaaacttgacaagcccgccccaacggcgtacatttatactataataaaatatctatcagggaggttttcttatggcgattcgtgttggcatcctgacttccggcggcgactgccctggcctaaacgccaccatccgcggtgtagccaaggcgctgtaccaccgcatgggcagcaaggtcgagatcgtaggtatcatgaacggctacgacggcctgatcaacggcaactaccgcgagatgagcccggacgagttttccggcattttgaccgtgggcggcaccatcctgggcaccaagcgtaccccctttaaaaagatgcgtgtggtggaggaagacaaggtggacaaggtagccgccatgaagaagaactaccgcgccgccaagctggattgtctgctttgcctgggcggcaacggcacccacaaaaccgccaacctgttgagccaagagggcctgaacgttattggcctgcccaagaccattgacaacgacatttacggcaccgacgtgacctttggcttccacaccgccgtggacattgccaccgaggtcatcgaccgcatccacaccactgccggcagccacagccgcgtgatgtgcattgagatcatgggcaacaaggccggctggctgacgctgtattccggcattgcgggcggcgcggacatcatcctgctgcccgaactgccctacgacattaaaaaggttgctgccgcagtggaaaaccgcgccaaggcaggcaagaacttctcgattttggccgtggccgagggcgcgttctctcaggaagaggctaagatgaagcgcaaagagtggaccgctcagcgtgccgccgccggttataccaccgccaccgcccgcattgccaagcaggtcgaagagctgaccggcgctgaaacacgcatctgcgtgcccggccatatgcagcgtggcggcagccccagcgcttatgaccgtgtgctggccacccagtttggcgcctacgccgccgggctggttgccgacgaacactacggtgtgaccgttgccatggtgaaccgccacgtgaccgccaacccgctggctgacattgccggcaagactcgcggcgtgccgggagattgtgatatgctcaatgttgcccgggctatggggatctgccttggttaatttgttcgtttatagtttctcgctttcaagaggggccacgttctggcctctctttttttataaaaaatcagcaaagactattgacattaaacccgcgtttaatgctacactggtagtgaaaacaaccccagggaaaggacctgttacctatggataaattacaagcattgcaagactatctgcgtgagctgggcagtgtggcggtggcgttttccagcggggtggattccacctttttgctgaaagtcgcccacgatacgctgggcgacaaggccatcgccgtgacagctaagtcctgctcgttccccaagcgggaactggaggaggccactgccttctgcaaggccgagggcatcaggcaagtcatcgttgagtccgaggagctgaacatcgagggcttctcccataaccccaagaaccgctgctacctgtgcaagcatgaactgttcgagaaaattatcgcagttgcgaaagaaaacgatttgcagtacgtagccgaaggctccaacatggacgacaacggcgactaccgccccggcttgcaggccgtggccgagctgcaggtcaaaagcccgctgcgccacgtgggattgaccaagcaggagatccgcgactactcccaccagctggggctgcccacctgggacaagcagtccttcgcctgcctgtcctcccgctttgtgtacggcgaggagatcaccgcgcaaaagctgggcatggtggacaaggccgagcaactgcttctggacctgggatttcaccagctgcgggtgcgcatccacggtacgatcgcccgcatcgaggtgctgcccgccgagtttgaaaagctgctgcaaaaccgtgagcagatcgtggccgagtttaaaaaatacggttttacgtatgttactatggacttgcagggctaccgcatgggcagcatgaacgagaccctgaacctgaaaggctgatgctatggacgcaaaacaagtgttggagcaggtgcgcagcggcgcgataagcgtcgaggacgccgagcagtttttccgccgcgcaccctacgaggaattgggctacgccaagctggacacccaccgcaaactgcggtccggctttggcgaggtggtattttgcagcggcaaggccgacgaatttttgtcgagcatttttgaaaaattggccgtcgaagacggtgaggtactgggcacccgtgccacgccccaccagtttgaactggtcaaggccgtctgccccagtgcagtgtacgattccattgcccgcattataaaggtagaaaagcccggcaaggtgctgcgcggctgcgtggccgtctgcaccgccggcactgccgacatcgccgtagccgaggaagccgcccagacggccgagtttttcggcacgaaagtggagcgcatctacgatgtgggcgtcagcgggctgcaccgcctgctgggcaacctggaacctatccagcgcgccaactgcgtagtggccgtggcgggcatggagggggcactggccagcgtcatcggcgggctggtgcagaacccggtcattgctgtgcctacctcggtggggtacggggccagcttcggcgggctttccgcactgctgacgatgatcaactcctgcgccaacggcattgccaccgtcaacatcgataatggctacggcgccgggtatctggccacccaaatcaaccgcctggccctgggcacgaaagaggattaacgtatgaatgaaaaaaaagacgccctgtatctggaatgttactccggcatcagcggcgatatggtcacggcggcgttgttggacctgggcgcggacgaggctgtgctgcgcaaagcgctggccagcctgccgctggatgggttcagcatcaacatcagccgagtgaaaaaggccgggctggacgcctgcgattttaacgtggtactggacgccgagcacgagaaccacgaccacgatacggcctacctgtacggcggggtggaggagtgcggccacacccacgatgtgcatgagcacaaccatgacgagcacgaccaccatcatgacgaggatggacatgagcaccgccatgggcattgctgccacgaccacgcggctgaacattgccacgaccatgaccacgcacaccgcgggctggccgaggtgctggacatcctgaacaaagccgatctgaccgaccgcgcccgcgccacggccgtgcgcatctttaccattttgggccaggccgaggcaaaggcccatggtgctacgctggaaaccgtgcactttcacgaagtcggcgcggtggattccatcgtggatatcaccgctgcggccgtatgcctggacaatctgggcatcgaggacgtcatcgtccccgtgctgtacgagggcaccggcagcatccgctgtgcccacggcgtgctgcccatcccggtgcccgccgtggtgaacattgccgccgctgagcacctgaacctgcacatcaccggtgccaagggcgagtacgtcacccccaccggcgcggccattgctgccgccgtgcgtaccagcgaccagctgcccgccgaattcaccgtctccaaaattggtctcggcgccggaaagcgggagcaggaactgcccggcctagtgcgggcaatgctcatccgccccgcaggcagcgagtatgccgcgcaggacgtcatctacaagctggaatccaacatcgacgacaccaccggcgaagcgctgggctacgtgatggagcggctgctggccgcgggtgcacgggacgtgcagtacagcccggtctacatgaaaaagaaccgtcctgcgtaccttttgaccgttctttgcctggaggaggacattcccgcactggaagaaatcatttttgcggagaccaccaccatcggcatccgccgcgtgcggatggagcgcagcatcttgaagcgccatatttacaccattcccacctcactgggtgatgtagaggtcaaaatgtgcctggtgccccattgcaatgggaacggagttttcgaggatgtagaagagcgctgctatcccgagtatgagagcatcaaggccatctgcaagcgcacgggccgctcctatcaagatgtaacacgccaggtcctgcgcgaactggccgaaaataaggaggactaaccatgcatatggcagacgcattattggcgccgggtgttgccggagtcatgtacgcctgttcggcggtggcggcggggcgctcggtgcgcaagctgaaccagcagcccgatgacaaggccgtgcccgtgatgggcgtgatgggtgcctttgtttttgccgcccagatgatcaattttaccatccccggcacgggttccagcggtcatttgtgcggcggcatgctgctggccgccatcgtgggtccctacgccgcgtttttgacgatgatcggcgtgctgctcatccaatgccttctgtttgccgacggcggcctgatggcgttgggggccaacatctggaatatggcgttctacggttgttttgtgggcgggctgatctggcgcgcctttacccgcaaggggctgaaccgtgcgaaaattatcgccgcatcgctgatcggctgcatcctttcgctgcagctgggggcgttctcggtatccgtagaaacgctggcctccggcattacggcgctgccctttggtgcgtttttgctggccatgcagcccattcatctcgccattggcgcggtggaaggctgcatcaccgccgctgtgcttgcctttttgtacgaggcacgccccagtctgctgtggcagggcggcgtggccgccggggagaagcagcgcctgaccttacgcggcacgctgggcgtgctggcgggcgcggccgtggtcgtcgcaggcgggctttcgctgctggcatctgccttccccgatgggttggaatggtcgctgcagcgtttgaccggcagcaccgaactggaaaccaccggccccgtgccggcgttttttgcccgtattcaagaatggacggccctgctgccggactacaactttgcaggctccgacgcggctgccggaaccagcgcggcgggcatcatcggcgcggtcgtggtgctggccgtggtgattttgggcgtaaaactggtaaaaaaggcggtgcatcgacgtggatcgtctgcacagggccattaaggatgttcaccggctggacgatctggccgcgcgagatacctggctgaaccggctggccccgctgcccaaactgctggcggcggtagtgtatctggccgtcacgctgtcctttgggcgatatcagctcaccggcgtactgggtatgggactttggccgctgcttttgctggagttggcggactttacccccggcgacgccttgcgggcgtttaaacccgtggctgtgctgctaaccgtggtggggctgtgcaacctgcccttcgaccgcgccgtactgctgcatgcggggccgctgtccgtgaccgggggcatgctctcgctgggcgtgctgctggccaaggggctgttctgctttctggccgtgtgggtgctgattgcctccaccgggatggaatccgtctgcgcggctttacagcaattgcactgtccgcgggtgctcaccaccacaattttactgatataccgttacattgtgctgcttttgcaggagggtatccgcattgccaccgcctatgcgctgcgcgcacccgggcaaaagggtatccagttccgggcgtggggctcactgctggggcagctgctactgcacagcatcgaccgcgcccagctggtgtacgagagcatgcagctgcggggctttgcaggatcttttccgccagggcagaaaaagcacggcggttggctgttttttgcagtaacggttttctactgcgccgttttccgcgccgtgccggtgtttgagctggccggacgacttttgtaaaaaagggaacaatattatggcaaattccgagtctatcctgacgatgcaggacttgactttttgttatgatggccacagcgccgcgccggtcttgcaggatataaacctgaacattgcgtccggccagcgggtgggccttgttggctgcaacggcgtgggcaaatccacactgttaaagctgctggtgggtattctgcccatgcagcagggcacgctggaagtggcgggccttgcgatgcagcgcgaaaatttggcatctatccggcggaaagtggggtacattttccaggattcggacagccagctgttcatgcccacagtggcggcggacgtcgcctttgcggcgcagaactacggttacccgaccggggaagtggccgcccgcagccaccgcgccttgcagcaggtgcacatcgaggattgcgccgaccgaccggtgtaccggctgtccggtgggcagaagaaacttgcgtctatcgcaggcatcctgacgctggacccagagctgatcttgatggacgagccgtccgccgcgctggacccgaaaaaccggcgcaacttaatagaaattttgcggggactgccctgtgcgatgctgattgcctcccacgatctggattttatctacgatacctgcgaccgggtggtgctgctgtacgaagggcgcattgccgccgacggcccggccgaggaaattttgcacgatggtgcgttgctggccgattgcaatttggaactgcctctgcggtttcaatcgatataatgtagtttaaaagaggaaaccttttatggcaaagtctactgtctatttcaccaaggagatcacccctgaggccgtgttgaagatgtaccgccagctgggcgtggaactgcccggcaaggtggccgttaaagtccacagcggcgaggatggcaaccagaacttcctgcgtcccgagttcatgaagccggtcatcgacgccgtccacggcaccgtggtcgagtgcaataccgcatacggcggcgcccgcaacgagacccccaagcacgtacagctgatgaaaaaacacggctggagcgacctgttcgacgttgacatcatggatgccgaaggacctgacgttgcctggcccgtgaagaatggcaaggtcctgagcgagaacctgctgggcaaggacatcgaaaactacgacagcatgctggttttgatccacttcaagggccatcccatgggcggttacggcggcgcgctgaagcagctgtccatcggctgtgcttccagcgccggcaaggcctacatccactccggcggcaaggtcaaggatcaggccgtgctgtgggagaacatctgtccgcaggataccttcctggaggccatggccgacgccgccagcaccgtggccgaccactttgccggcaagattgcctatgtggccgtgatgaagaacctgtccgtcgactgtgactgctgcgccgtggccgagaacccctgcatgggcgacatcggcatactgtccggcctggaccccgtcgcgctggaccgcgcctgcctggacctggtcgagcacagcgccgaccctggccgtgaccactttatggagcgcgtcaacagccgccacggcgcccacaccatcgaggccgccgaggccctgggcgttggcaccaccgagtatgagttggtgagagtgtaatagcaatcctccaatcagggagcgggcctggcggctctctccctgattttgtttctggccttttggggcgatgtgcgatataatagacctatacaaaccaggggagaggggggcgcgccgcatgccgcagagaatttatatggccatcgacttgaaatcgttctacgcttcagtggagtgtgtggagcgcgggctggacccgctgcaaaccaacctcgttgtggcggacccctcccgcaccgaaaagaccatctgcctggcggtgtccccggcactgaaagcctacggcatccccggccgcgcccggctgtttgaggtcatccaaaaggtggggcaggtcaatgctatgcgccgcctgaacgcccccaaccgcacccttaccggcaaaagctgcgacgcgcgggagctggccgaccacccggattgggcgctggactacatcatcgcgccgccccagatggcccactacatccagcaaagtacacgtatctacaacgtttatttaaagtacgtcgcgccggaggacatccacagctactccatcgacgaggtgtttctggacgccaccgcctacttgaaattatatggcctaacgccgaaagaatttgcccgcaaaatgattttggacattttggccaccaccggcatcacggccacggcgggcatcggcaccaacctgtacctggccaaggtcgccatggacatccgcgcaaagcacatccagccggacgaaaacggcgtacgcatcgccgcgctggacgagatgcgctaccgccgcctgctgtgggaccacaccccgctgacggatttttggcgggtgggcaagggcatcgcccaaaagctggagacccacaatatgttcacgatgggtgacgtagcacggtgttcgctgggcgggccgcaggatttttacaacgaggagatgctttaccggctattcggcgtcaacgccgagctgctcatcgaccacgcctggggctgggaaccctgcaccatcgcggacatcaaagcctacaagcccgccgccaacagctgcggcagcggccaggtgctgcactgcgccacgcccgccgaccaggcacggcttatcgtgcgggaaatggctgaccagctggcgctggacctggtggacaaacacctgatgaccaaccagctggtgctgaccgtgggctacgaccgggaaaatctgaccgaccccacccacaatgcggcctaccatggccctgttgccaccgaccgctacgggcggcagatccccaagcatgcccacggcacaacgaatttaaggcagtacacgtcctccacgcggtcaattttggacgctgtgacagagctttttgaccgcattgtagacaagcgcctgctggtacggcgggtgaacctggtggcctgccgcgtgctggacgaagacgccgcccgtgagaaggacagctgcgagcagctggactttttctccatcaccgaaagcgcccagcagcaggccgccgccgaggaaaaggagctggagcgggagcgccgccgccaacaagccatgctggccattaaaaagaagttcgggaaaaatgccatcatcaagggcatggacctgcaggagggtgccaccgccatggagcgcaacgcacagatcggagggcacagggcatgacccaccgctatgacgacattatcaacctgccgcatcatgtctcgcagaagcacgcaccgatggctcgggccgaccgcgcggcgcagttttcgccctttgcagcgctgaccgggctggacgtcgccctgcgggagaccgcccgcctgaccgaccagcgcatcaccctggacgagtacgagcaggccgcactggatgaaacgctgcaaaccgtgcgggatgcactgaccaaaaaagagcatcctaccgtggaagtctgctattttgtgcccgacacccgcaaggcaggcggtgcctactgcaccgtgaccggcgtggtaaagaagatggcagagtttgagggactgctgattatggctgacggcaccgaggtaccaatgggggagatctcggttttggaactacacggataacggaacggaagggtcaaaagcaacacagctatttcaaaagcattaagaaaacaagatcgacatgctgaacgggtcgattcggaacaagctgccgctgtttgcactgcctgtggcggctaccgctgtgctggagcagctgttcaacgcggcggcctggccgtggtgggcataggtgtacctcgtctccccctgcagccgcaccttccaaactatcatgctggtgtatccgatcagtttgtcgtttaccgcgctgttgattttgattgcactggggtgtggtatagaccgaccaggagatttgcttgattttttgtttcggtgcttcggccccgcctactttgcggcagggctttttataagaaaagagggaccgcaaggtggtccctctttcacactgcatgctattatacttttttcagcaacccatcagcagttaaaaccgccgtatccccttcgttaatatccgcggcggccaaagctgcatcggggtaggggagtacccgcttcaccccgtcgggcgcaaccagggtcacatcgaccaaagcctccgcccccggggcgggttcctcgcagccgtacatctgttcgtctatgcgttttactacgtaagtcatggcggcacctcactcgctgcgcaggcgcttgtgcagctttttctgctcgtacatggcggtgtcggcctgctttagcacgccgtccagcacctgcaggccggagcagcaacccaccctacccatattaaatatagtgtaacacaccatttcccaaaaaacaaatattccgacaaaattctttttcgagcgtaaaacccgtgcggtgctaagttgtgcggattgcataaaggttgggttaatccctacaaactgcagggtaatctatcgtacttcataactttttcaccatgggcgaagaatgagcgatacatcgtttgttaacgattgtttcaaactttttctattttcttgaaatatattattgctattttgcacaaaatctgctatacttagcacgatctttcaatcacattgcgcttacgcacctttgtaagcgactaccatgagaaggaggaatttttttatggaatttgtgattggcattatcctcgtcctgacctttttcggcctggcctactactgcgtaaaaggtcacaacctgatgatcggcttcctgatcatctccatcgtctggactgccctttctctgctgggcactctggtcgcatctcccacgtttattgcagagaaccccatcctgcagttcggcggtgactccggcactacgctggtttcgatcctgaacaagatctaccagtccgcccctgaaggctggggcaccacgctggtcaacgtctgctggggcgcctggtttggccgcgtcctgatggagaccggcatcgcctccaccctgatccgtaagactgttgagctgggcggcgaccgtcccatcatcaccatcgttctgctgaacgttgtgactgccttcatcttcaccgccatgatgggcgccggccccgttatcgccatcggcgttatcgtcctgcccatcctgatgtccctgggcatccccaaggcaatcgccatgttcaccttcatgggttcggtctccgctggtatgtacctgaaccccgtcctgcagttctctcagctgcgcgccttcatctgcgcttctgatgagatgcctgagttctccttcagctggtacacctctcactggggcatctatgcgctgatcatcagcgtcgtggttgtctccgtgctgaccggtatctacctgaagatcggcaagaagagccacgcctgggctgcccaggccgccccgaagaacacccagaccgatgccccgctgatcgccctgatcctgcccatcgttcccgtcgttctgaagatctggctcgacttctccgttatcggcggcttcgtcatcgctggtttcgctgccctgttcctctgcggcaagatgaacaaatctttcaaagagaactgccagctggtcaacaagctgtactatgacggcgtggtcgacaccgctccgctggttggcttcctgctgaccctgcccatgttcaacacctgcgcttcttacgcttccccgtacttcaaggaagttctgggcggcatcatgcccaccaatgagtatgtggtctgcgccctgtttgcagccctgtctatcctgggcttcttccgtggtcccctgaccctgtacggctgcggcgctgccaccctgggtgtgctgtccgccgttggtcacttcagcgtgccgttcctgttctgcgtgttcaccatcccggcaaccaccgtcaacgttggttcctgcatcacccagagctggatcgcctggggcttggcttacaccaaggtcgagtctcgtgactacctgaagctgtccatcccgtttgcttacatctgctccattctgctgtacatcctgaccgcctttacggtcaccggccttggccccgagtggttcctttcttaaggcctgacgcggctttgatttaagcagcaaaaatttgccgccccagttagtaggctggggcggctttttgtatatttttgctctcgtattttggcggcgtttgtgctatagtaatggcggagaaaatttgtacggcggcccgcgctgccgcaaaaggagttgttttgtatgtatgatgaagctcttttaaaggaactgaccgaactggaaaacaccgtgcggtttgacagctttgattttaacgatgcctacgccctggggagtgccctgcgtgcggcgggggagacggctcccaagccgattgcggtgcgcattgtgctggatggcatgattttgtatcagtccttcctgccgggcaccgacgccaccaacaacaactggatggacaagaagcagcgcactgtgcagctgaccggcaccaccagcctgcgcgccgccgtggagcgggagctgtacggtgccaaggccccctggcagcatgacgaggagcactacgccttctgcggcggcggcttcccgctgtacgtcaacggcgagttccgcggtgcggcgattatttccggtttgccgcatttgaaggaccacgcgctgctgtgcgaaacggtgaaggcttactgggagagtaagaaaaaataatttttgattggctttttgcggccggcgggggacaccaccatgcggtgtccctcttttttaacggcttctagccgctacgcgtactcttttggtcacaaaaaagctaggccttggataagatgccacgaaaaaaggacgtcaccgcatggtggtgacgcccgcaaagcaacatattaaaatcaaagcgtaaactgaatcccgcagaacactgcgtaaattaccagcagcgccacaccctgcacacggctaagctttcccttaaccaaggccggcgcggtcaacagtaccataaccgcaatcataacggggatttccagcaccaggctggagttcatgccgaagatcgtggcgctctgtggcaccgtgaagggggccagcgcgaccgacacgccgctgaccagcaccaggttgaacacgttggcgccgaccacattgcccagcgacaggtcgctgtggcccttgatgagcgaggtaatggccgtgaccagttccggcagggaggtgcccagcgccacaaaggtcagcgcgataacactctcgggcacacccaaagcctgggcgatcagggtgccgttgtccaccagcaggttggcgcccatggcgatcagcaccgcgcccagcaccagcagcatcagcatacggggcaagggcatggtctcttcttcctcttcatgctcctctgcgggggcgttcttcatctggtggatgttggccgccatgtaggccacgaacatcgccagcatgataaagcccatgggacgggtgaacttgccgaagccgtaagccgccacgcagtagatggccgccgccgcaaagaagaacagcaccggcattttcagcgttttggggtccactttgcccgggcgcaccgcaatggtgatagccgcgatcagcgccgcattgcagatgaccgaaccgatggcgttgccgtaagcgatctcgccgtggccggacagcgccgacatcgtggagaccatgacctcgggcagggtagtgccgatggacaccactgtggctccaatcagcagttcgggcagatggaaccgccgcgccagcgccgatgcgccgtccacgaaccagtcgccgcctttaatgagaaacagcagcccgacaataaacagcagtacagggatcagcataaaaactcctttttttcatagttggcagttaaatttgcatattttatcagtataccatattgtagcaaaattgcaactgcccggccgctagattgacaaatttcgacatgcagggtagaatgggcctaaacagaaagggggccggcctatgacctggaccgaagccagcggcacctactggatggccgtgctgattatgggtgttttggggtacatcaagcagaaggagctgctatggcgcaacgccgaccagcgccgccgcgtgtacacccgcaaccccacactgccctgcgattatttgggggcgtttagtttgggggaattctgggggtacctgctgcaggtgtttggcaccccaatgccggtgtttgccggtaaaattttgcaccgtgccctgaccgtgattaccgacgaccttgccagcgccctggtggccctatgggtgttgttgatggctgttatattaccgttggtcgtggaaatttttgtggaccgctggtattatgggacgaatgcgtttgataagtgattttcctacgcttgcggcttgagacttccctcaccggccaccttgcggccggtttctcgttcaaacagcattttgctttttatgtgttccttttggagcctcaaaaggaaggcctaacggcggcctgccattataaaaggccctgccgtaaggtaggcagggccgataaggtgcaaacaaaaatcactcctggtcggcagttttctgtccaatatgcgcttcgatggccgagcggtccagttcctcaccaataatgataagcacttcctgcccatcgggaataggctctacatgcatcgtgtcgcgggtggcattcagttcgcaccaaccgtcaacggtctgcaaaaagcccttgatgcgcaaaatatgcccgcaggccggatcagcaaacagtgcccgggcggcatcctgcagctggggcagcgtaaggtgcagctccatgaaatacagcgacgtgaacgccttgtgctcgtcaaaatgcagcttgacgtagctggcttgacagtggccgcagctgtccagccgctgcatatcggcgtcggtcagggcgtcccagggcttgcacaacgcatcggtgtccgcagcaaagcggcgggcgcagtggcaggcttccagcgcacggttcaaatgcgccagtgttgcctccgcctggccgggggcggccagctggcagcggctcatcagcaccatgcccgcgctggcggcttcgctggccagcagatactcgccttgggggctgagctgcgtttccagcagcgcgtccacaatggcaataacattgccaagcgtgtaccagcggtccagtggctcgtcccgcagcacgtcatagaactcgtccacgtcgaaaatgccgcttggttccaccagtacgcggtcaaagccctgcatcgccagcgagatcagcttggtgcgcattcggcgctggtgggtgtcgcaatcgcagccgccgctgatggtctcgatgtcgcaattgtcgcccagcagatcctgcagcagcattacgtcgacgttcaccgcgccgaagtcattttccaaaatgcagacgcgctgcccgcgggcgttgagccagtgcacatatttgcgcagaaacgttgtttttcctgcgcctaaaaagccggttattaagtcgacctgtaccataagctttccctctttctattgcaccggaccgtcagcgatccggctcgcagtccaaaatggacggaatgttcgtccagcggggcatatcacccttgtagcactcatgcagccaggccacggcagcgtccagccccccctggctgccctcaaactcagcggatcgtatcttttcctcggcggtgtgctcaacgctccacggcccgggccagaccgtaacggtcaaaaactcgatctttcgcttaccgctctcgtccgccgggtcggcctttttgcccggcgtaatgacataccgcatcccttgctccgcccccgagtaggggttgccattgtgaaaccagtgataaattggaaaagcgtctaacataatatttccttctttgtaaaaaagaaaagaggctccctcccgggtaagcctctttcttaatttggagcgggatacgagtctcgaagcctattttttgaccgtatcaccgctgtgtataaggcaattgcacccgaaaagcgtttatttttcttttttattgtgttataattcggactttcaaaattgtatcatgcggcgcatttacagtaacgcatccaggcgcttgcgagcatcttccagcatttggggcttgagggccatgtagacctcgtggatcatctttgcattggcgtgacccaccagctgtattgcaatttcctccggcacaccagccatggccagcatgcagacgtactcatggcggaactggtgaccgcagacagggacgcgccaagtgctgtacttcacaacctcgctgcgaccgcgtcggtacacgcgcttggtgtgaacaacttcctcgcccacgccgtacttgcgccagaagcgctgccacatcgtttcgtattttttcagtgtgattggcttggtgtccaacccgatgatgtaggtgtccggcggcaggtggcggattggctccaatgcctcggccagcatggagagcaggggaactttgcggatgcctgcgggggtcttggtgtagtctcgcatgtgtggcgcgttgttaatgtgctccacggatttgtagatgtggatgacccgctttttaaagtcgatgtccttcagctggatgcccagcatctcgccgcggcgctctcccgtgcaaaggtacgctaccggcagcagcgcatccgggtccaggtagtgatccttgacgatctgcacttgctcctcggtaggcggtggacgcttgctgcggggcaggccgcggggcatccgggtctgcactgcagggttgcagtcaccgcgccacttgggactatcgatccagaactggtagatgttgttgatgacagttttctggttgctgacggtcgaagcggaacagccctcgaaaacaggggagcgcaggaactcggcgatcatgtagggctggatctcccgcatgcggtactcacccagagcctcccgggcgcggcggatattgggcatgtagctgcgccgggtaccctctttcatcttttccacaattgcctggtactcgtctgacacgacagagaacagcggcccagaatcgcgggtaatgatacgctggcgctcctgctcctcgtattcttcctgggctttctggatgtcggcccacaccttggccgggtccttggcggtgaaagtccgccgtttgtcgccgatcagttcattgcgttggtagcggccatccttgcgcaggataagccctgctgtgattttgcgacgcatattttacctccttcagggtacactttgacaagcctgcccgaaggtggtacaatacgaatggttgggtcgtgctgtaccaccatgtgggcaagctgatctatcaaaacgctccatgattgccgtcatggggcgttttttctttttgtaaggatttctttccagttcggcggaaagcccagcgcatccagctttacaaaaacgctgtatcgctggagcagttcctctatttccgggaggatatagttattccattccatggcatccgaatacataaaggacatcacgtagatctggtcaaaaattttgccggtcgtctttgtgtatttatgatgcttgttacattgtgcaggtgtacggccaaaattaaagtcgtagatgcgcatgtaatgggcaagatgatttcgcgtgtaggtaaggttctgaatccagcttgacagttgcacaacgccggttttgtatgtagctgcaatctccttttggtaaggagcttgcaaatttttgtacaatgcatggatatttcccatggtcatgatttctaccgccacccacatagggagctgcccgccgtattggtcaatatgatgtttgatgaacggcagtttcttgttgttgtctacttcttttgcaaagtaagcttgaaatcgtgtaaaatcctcaccattgcggtaaatcttgggctgcagataaatcagtgggtcttctgggaatgcttgcgtcaatgtgtaagagagccttgttttcagcgtttcctcaatgtcctccaacgcaaacatcaaaatgcgggtaaagcgctgatcgaacgaatacagagaatggatctcctcaaatgtggttccctctctatattttcccgtctgcttgaccttaaatccatgcaaatagccggtaaaccggtaataattgatattggacagcacatgcatagccgcttgcttgtcacgcacaattaagccgcgcgacatcaaaaggtcaacctgtcctgttaaagaaagatgctttttcagttccttcatagtttcacctaaaaaaatacgaccccgccatggtacgcatcgttgagaggcgtggcgaggtctgtatcatgccattattatatgccagacctcgcggaattgtcaataggttacggtgcttttttgcggttccctgcgtctccctgcggtttgctgaggttaaatgttcctcatataaggtggtaatttccattttggaaactaccactctattgattaaagtccacgcccctgcactctgtccagtagtgcagggccttttttatgtaatcctcgtccaggtcgaagtagtcggccaactgccagggctcggtaaagccgcaggccatggcgtggcgcagttcctccacaggcagatacttttcgaccgaggccgcaaaggctttgttctcggcctgttccttgatctcgtaggggctgtacgccaggtagaacgccccgctcagatagtgcccggcttcgtgggccagcacagtgcgttctttggcagccgtcttgcagtgcgaacggtcgatgaccaggaagttatccataaaggcgatggcagtgttggctttcaatttcagctcggccacatccaccccaagcccttgcaggtcattatacattgcaccgacagacgtgttcatctacttaaacaccagttccttttcgtttgtttcgctctgccttaacgcgcatcgatgccatgatgtcgtcgatgtcatcctcggtcaggtggtctttcaccttaccataaaaggcaatcagttggtctttcatttcggtttccggctgaacttcgccgatcagatcatccacggacaccccgaaatacgccgccaccttcgcgagagtttcgccggaaggtgtggccccggtctttttccacttagttaccgttgaattgctcagcccgatttcgtctgctgcccggctaagacttatgcctttgtttttacaaagtgcggcatatacgtcataaaacacaatttccgacgctcctttttgtgcagagcgctaaaactaaccaaattcagaatttacgcttgactttctaaccaaattcagatattatagtgacacagattgaatttggtaaggcacagaaagcccccacagtctgttggctttggaaagatttttgcgctgatatttgttggcgcttttatcttaccgcaaaatctaaccaaagtcaagtttttatgaaaaaggaggttagatttgtatgcctgcacaatggacgggtgaacttgttgggaaaatgcacaatgcgggtgtcactgcaaagcagctggcagccgagatgggcaagaaccccaagtacgtttcccaggtcttgaatgggcactattcgcccaaaaaggcagagaccgagttcaacgaagctttcaaacgacttgtctctcccgaagcctgaccccattataccaccttgcctgtcccattgtccggaccggcaaaattcgacaaggagatgatgctttcatgccccgcgaaaagcctttgtaccacgacacactgtccagcgtacgcgcccgcgccaccgaactgttccccggcgaactgctgtttggcccgaccaaggttgcaaagatcctgggccgcagccgcgcctgggtatatcgacactacggcagtttcaacagcatgaccgtcgagcagatcgcaagcctgatttgctgaaccacgaaaggagaaacattatgcccacaaacaaagaggccgcacgggtgttggcgcacccgaacggccagagatgtgaactcacgcaaatccacaaccatattttactgcatgccgtgcgttttggcaaggtcttttgcaagacctgtgcggtgatgctggccctgctggggctggccgcgctggcttccttgcctaccgccccggtgtcagccgtgctgacgctgatcggcgccatcgccgccctgaactgggtctgcggcgcatggtttaccctgtgcgaaatggaggtgatgctgcaatgacaccgtatgtaatgcgcgaggcattccgcaccaacgcgccggacaagctcctcgagttttaccgcaccgtgcaggacattctgcacaacaaaagcatgaccgagatcggacagctgaaccgcatccgcataatggccggggctgccgcctgcggcgagggcgaatgcgctgacatgctggcattggcaggggaggtgacgccccatgcgtaacccgcggaacgggcagttcaccacgcccgagaaagagcgctgccgccgccaacaagagcagctcagccgagccaaagccgctgtatttatggccgtgcaaaaacttggcaccctgcattccaccagcgagcaggcgcagcacagcatgatggacgtctgctactaccttggccgcgccaccgcgatgctggaagatctggacgaggcgatcgcccatggttgagcacatcgacacgggccttgcacagcccgccaatgaggccgaatggctacaacagcgcctttgcggcattggtgccagtgaggccagtgccatcatcggcaaaaatccatacatgactaatcagcagctatggtactacaaaacgcagcgtcgccagccggaggacatcagcggcaaagcctgtgtgcggtatgggcacgaggcagaggcccccatccgggagctattcgccctagaccacccggaatataccgtccagtacggcggtgcttttgacatggtacgtcatccgcagtatccgtggctatttgccacactggacgggcgtctactggacaaagatggccgccggggcatctacgagggtaaaaccacagagattttgcgcagcatgcagatggaaaagtggacctacaccgatgaagccggccaccgtcagggccgtgtcccggacaactactacgtccagatcctgcaccagctgttggctaccggttgggattttgccgtgctgaactgccggttcaagcgtttttaccgtgacggcagccgcgccgagacccgctgctatcgttttgagcgggctgacctgctggatgatctgaactatttgctgcaggctgagatcgcgttttggggctatgtgcagagtgacacactgcccgacctgatcctgccctctatataaaaggaaggaacctgttatggtacagatgattatctccgcgccgggggagcagccgttgcccgccgtagcgtggaactacgaggaagtcaaggccgaggttgaagccagccttgcccaatataaagaccgggcctacacacctgaaacgatcggcggtgccaaggcagaccgcgcagcgctcaataagctggccgatgtgctggctgccaagcgccgggaggtaaaggcccagtatctggccccctatgagaattttgaacgccagtgcaaagaggtcgagggtatgatcgccgccgcgtcaaaggctatcgatgcacaggtcaaggaatttgagggtgttgaaaaggaacgcaagcgcggcaccattatcgagatctaccaatccatcgccggtgagttggttgccatggtaccgcccgccgctgtctggaactccaagtggctaaacaaaacctacagtatagatgccatccgcatggaactggaagccaccgtgcagcgcatccatgagagcatggagaccatccgccagagctgtggacaagatgcccccgcttgcctggatgtgtacctgaatgatgggttgagcctgagcgccgccatccgcaagcaccagcagctggaacacatccgacaacaggaagccgcccgacctgtagcaccggaacagttggccgggctgcggcaccagctgacaggggagacgccccctgcaccacctgctgccgtcgagagcacagcagaagccgctgacacggttgaattgtacatggacttccgcgtttactacaccgacaaagcagttttgaacagcctaaagaaatttttggttgaaaaccatatcaaatttggccgcgtaccggccacacaagaaaaataaggagaactcgctatggcacaatatggaaacgcccttgtgaaaaaggcaaagacaacctcggaacagccctgcacctttaccgccaacggggtagaagtcaaactgacacctgccactgtgaagaactatctggtcagcggcaacgccgagcgcatcaccgaccaggaggtcgtgatgttcatcaacctgtgcaaatacaatagcctgaacccctggctgcgcgaggcgtactgcatcaagtatggcagctcgcccgccacgatggtggtcggcaaagagaccttccaaaagcgggccgatgccgacccgaactataacggcgaacaggccggtgtcattgttgagaccgcggacggccaaatcgagcggcgcgaaggctgccttgtgctggaaaatgaacagctgctgggcggctgggccaaggtctaccgcaaagaccgcctttaccccagtactgccgaggtcagcatgaccgagtataccggccgcaaatcggatggtagccccaatggccagtggagcggcaagcctgccacgatgatccgcaaggtggcgctggtgcaggccttgcgtgaggcgttccccgcgcggttgggtgccttgtacaccgccgaggagcgcggctatgctgagccggtagaggcgaccttcaacgaggtgcctgaggcagatgcccccacaccccagcagatctctggcaagacccccatgccggacgctgcaccggcccccagcgatgccgatgatttctttgccggcgtagagtaagcgggtgtagcctatggcgcgtgagtatgtgtgcctctatcacagctacttaaaatcggttgaacccctcaacgacgcggagcgcgggcgtttgttcacagcatgcctaacctacagcatgacgggcgcagagcctgatcttcgtgggaacgagcggtttgtttggccgacgattcgggagcagatagacagagacaccaagaaatacagcgatttctgcaaaaagcagcaggaaaacatccgcaaacggtgggataccaccgtatacgatggtacatctggtataccagacgataccaaacataccaaagaaaaggaaaaggagaaggagaatatactatcttctcctaacgtcgaagatagtatagcgcgtacacctgcgcggaaacgatttaccccacccacactggcagaggtgaccgcctattgccgtgagcgccagaacgccgtagacccccagcggtttattgactactacactgccaacggctggaaggtgggcaaaaacagcatgaaggattggaaagccgcggtgcgtacatgggagggcaagcagcgggatagtgccaccgcacagcgcagcagcctggatgagacccgcgcagtattgcgccgcattgcaggaggtaccccatgacctacgaggaaactgcccggtttttgaacggtgccctgaactactggcccacgttgttccgtggcaatgacccggaagctatgacccaggcatgggcggtggcgctggctgacatcccctatgcagcctgtgcccgcggtgttgtaaagctggcccaaacgatgaagtttccgcccagtatcgccgaaatatgcgcagctgcaaaagagtgcatgcccgcccaggtaacgcagctggacaagctccttgccatcacctgccatgaggagttagggctcgacacgcccctttaccgccagatgcaagttgagagcttgcccgattccgacatcaaaaaattgagataaaacgacataaatggagattcgctatgaaaaacgctactcaatccagaaagcaggtgggcgatgtatgacttaccgggaatttctggaaaacaagatcgatattgccccgcaaagcggtattgaggttgatcctgccgaaatcagcccagccctgaaagaccaccagcgtgtttgcgtcctgtgggcgctgcgcggtggacggcgcggcctttttgcccggttcggcctgggcaagaccgtcatgcagctggaatggtgccgcatcctgcaaaagcacatcggcggtcagacgctgatcgtgatgccgctgaacgtcatgccagagtttcgtgcggacgctgtacatctgctggggctggacgaaccgccttactgccgcaccatggccgaggtgaaagcctgccaggcgcccatcatcctgaccaactatgagcgcgtccgggatggggatattgacccgcattactttacggccgtaagcctggacgaagcggccacgctgcgcagctttggcagcaagacctatcaagaatttatgcaaaagttcaagggtgtacggtataagctgaccaacaccgccacacccagccccaaccgctacaaagaactgatccactatgctggatttttggaagtgatggacaccgggcaggcgttgacgcggtttttcaagcgcgattcgaccaaggccaacaacctgaccctgtacccaggcagggagcgggagttctggatctggtgtgctagttgggggctgtttctgcaaaagccatccgaccttggcttttcggatgagggctacagcctgccgcctatggatattcgctaccacaagttgaccagcgctgaacgcccggccgattttgagccggacggccaacttaaactgggccatgatgccgccatgggactgaccgatgccgcgcgggaaaagcgcgacagcatcgagatccgtgctgctgaaactgcccgcatcgtagctgctgcccctactgaccattttgtgatctggcacgaccttgaagaagaacgtcgcgccctgaagcgggccctgccggagatggtggacatctacggctgcatggacctcgagacccgcgagcagcgcgtcatggactttgcgcaggggcgcacccggctgttcggcaccaaaaaaagcctgtctgggtcgggctgcaacttccagcggtactgccacagagccatctttatgggcatagactacgagttcaacgattttatccaggccgtgcaccgcatctaccgctttttgcagcaaagcccggtcatcatcgacatcctgtacatggataccgaaagtgaagtgttgctgaccttgcagcgcaaatggcggcagtacgatgaattgagtgcccagatggaggagatcatcaaaacctacgggctgggcagccttgcccttgaagccctgaaacgaacgattggatgtgagcgtgtggaagtcaccggcaaaaactataccgccatcaacaacgattgcgttgaggaggtgcgcagctggcccgcggacagtattgacctgtatgtgaccagcatcccttttggcaatcactacgaatacagccccagctataacgattttggccataacccggacgatgcagagtttttcaagcagatggactacctgaccccggaactgctgcgcaccttgaagccgggccgcgtggcggccatccatgtaaaagaccgtgtgcagtttggcaacgtcaccggcatggggatgccgacgattgagccgttccacgcggattgcatctcgcacttcatccgccacggctttgcctactttggcatgattaccgttgttaccgatgtggtgcgggaaaataaccagacctaccgcctgggctggaccgagcaatgtaaggacggcaccaaaatgggcgtaggctgcccggaatacatcctgctgttccgcaaactgcccaccgaccacagcaaaggctatgccgatgtgcgggtaagcaaagacaaggccaactacacccgcgcacaatggcagattgatgcccatgctttctggcgttcaagcggcgaccggcctttcgggcgggaagatttggaacgcatcccggtaagcaagctgcaaagcgtttaccgcaagtatagccgaggcaccgtttacgactacaacgagcatgtaaaactggccgaggaactcgacaaagacgggcgcctgccgtccacctttatggtggtagcacccggcagctgggacatgaccgtatgggacgacataaaccgcatgcgcacactcaacaccagccagagccgacgccgccagcagatgcacgtctgcccgctgcagctggatattgtggagcggctcatcaaccgctattctaatccgggcgatctggtagctgacccttttgccggcctgttcacagtaccgtatctggctgtaaagatgggccgaaaggggaaaggcgtggagctgagcccagattatttccgcgatggcgtaggttactgtgaaaccgccgatgcggagcagagcgcccccacgttgtttgacctgatggaagaaggggaggaggccgcccatgcgtgaccttttacaagaaaaagaccgcacacgggaggcggtctctcaaatcgtatcgtggtgcttggttattgcgctgcaccagaccgagggcatcggaaaaaaacggcaggatgacgtagccgccaaggcgctggttatccaggaagccgccgcaaagaggctggcccggcaatcgcgggaggaagtcatcgcctggctgcgcagcaaactggacagacttgatttgccggatggtgccctaacttttcgcgtaccgttacggcgggcacccaaaagtcgccgtgagcaggagctgcgcatcgccggggatcaggccgccactcttacctggctgattttcgccctggccatccaccgagcactgcactttggggcacagcggcttgtacgtctgcataccgccacgctggaaaactaccgtcagttctcagattgggagcttgacggtgccgattgggcattttcacgcctgcagcactgtgcccaacaggccttgcaagaagaattggatattgtagaaacgcccgaggatgcccctaccgtggagcaaaccgcgaccgcctacctgcggcagagccagatgctgcaagaacaggtggggcgtgttataaaggctgcacagcttcccactgttacccaaaaacagcctctggcggtgttgagtacaccccacctgcgggcactactggaaggggaggacatatgagcactaccgcccgggaactttgtcctaccgaggatactgagcagatctgcctgtttcgctgggctgcactgcaaagcagcaagtatccagaacttgccctgatgtaccacatccccaacggcggcaagcgcagcaaatctgaagctgccaggttccgcaccatgggcgtaaaagccggagtgccagacatctttctgccagttaagcgcagcgggcattggctaacaggcccctccgacatgatcgcaccctataatggcctgtatattgagttgaaacgccagcacggaggcaccgtatccccggcacaaaagacatggatcgccgccctgcgcaaagctggttatgcggtcgaagtctgcaaaggctgggaagctgcggctgctgttatcatggattatctggagggacgataccggcctgtatatcagggatgagagccataattactggccttctttatatgccataagtgtgtcaaatgccgtaaaggtaaatcgtgtaattaaatcgatagaatataacaggtctggcgattcacctatttgttgaatatgtattggcagcgaaaattcgttttcgccatcctcattcaatgggggaaagtagtgcgcatgagctccatattttttgaagtgtaactgtgtgccatcatacatttcgccaatttgagcacctgacagaatggtttccccatttgtataatacggaaatgtatgaacaaaacaatgtgtgccgtgttttgtgttcattatgaacatatcatgcgatgtcagaaacaatttatcagcctttagctgctccctacttgaccgaggtcttccaaatgaattactctccatgtgcataagttttaatgaataagggccagtatttaacattggcgcagacaacgaatcgctgtgttctataaacttgtctcggtaatggcaaatggttgcgtcaatttgtcttccgtatcggataaatgatctgtatacaaaagaactatgccctggtaaggtttcaaaatttttcaataccgagttaaggcagcttccaaagcttttgggcgtaatgccacgtttatcatctttccctatttcgctcaagtaaaatctcgtgaaatcgttcaagaatattttcgaatctttgaaaaagtcagaaacctccttttggattctatcgctaatttcatgatatttttcatgcgcatttaatgggaaaatcggtcctataaaatgcaactctgttaagaactgccgttcgcccattaacttggaaatagactcaattctgtccaaaaggctaatatagcttttataaacatattcaagttttgcaaagttcacatctaccttatcattgtctaaaaaagcttgatatttaatatccgcttctttgcgggctgcaatcattttaaacaccatccaaggagtaatttatgtacaatgaattatgcaacgagttattatctattataccaaatattcagtgggatacggaagggtgtaatgcaataaaagaagccgttcgtattctttctactttacaggaggataatcttcatcatgtcctatgaagaaaaagtccgctggctgcggcgctaccgtgatgcgctgcggctggaggaggaactgcggcaggagctagaagcccagcgcgcccgggcctgcaaaaccacagccgccctgacaggcatgccgggcggaggaggggacggccaggcgctgccccgtgcggtggaaagcatcgtggctgcccagcaggaactgcaggcgcagatcaacctctgcggggcgacccggcgcgaggtggtggccgtccttgaccaggttgccgatgcgcgggaccacgagatcctgcgcaggcggtatctgttggggcaaacttacgaaaaaattgccgaaagtctaaatataagtgttcgctattgtataaagttacataaggcttgtgtgcaaaaagtacatatttgtgaataatccacttgacaaaagtcacctagtggaatattataaaggtaccatatgatacttttccaaaagaaggtggttcctatcaatcctaaagtaggacaaagcgatgtggacgcttatctgtccgaagtccgcgaagcaatagcagaaaagcgatgtacttttcactccaataaaaccaaaaaccgagagaccctgtcaggcttgggtttaactcttagtgatgtttatgaagaaatttctacactaacgtacgacgattattgttatggccctgtgcctgacaatcgtcccaactatgcagacgaaagtatctgggtatttaagaaaaaagtagactggctgatgatatacatcaaattagaaatcgtcagttgtaacggcaaaagactcgttgttctcagttttcatgaagataacgcacaataattacagctttctcaaaacccatgtggtacactactaccacaaaaaaggaggctgagcttatggcaaaatggatttgtttaaactgtttgaaagaacatgaattgaaccctatttacgaaaacgaagaatacataattaaagggaaaaaggttgtaattactgcgctcaaggcaaaatgtccttgttgcggagaatacatggaaaatgatgacatcacagagagtaatttgcagtctgcttacacgacctaccgccaggaggaaaaacttctatctcctgatgaaatcaaaaaaatacgaaagaaatacggtgcaacacaggttgctttttcgaaaatccttggttttggtgacaaaacgattgcgcgttatgagggtggcgctcttcaagatgcagcgcctaataacctgattgttctgatgaagaatcgagagaactttatcaaattgtggcaattgaataagtccaagctcgacccaaaagaaaacgaagcaatcgaaagtgccctgggatataaagctgtttcgttacaggcttgcacagaaagctattatcccatgcctcacaacttcttctctaatattttttctcagcctagtcttacatttggaggtacaccatgccgaacataaatagccttgttttgcagttctatggttattcggttccccaaatcagttttaaacttggagattctttcggtggcgaaaaagtacagatggacattaaaatgaaccgtactatagaatcccttcccaagacagatgaaagtcaagatgcccactacaatgtaacgatctatctcacaattggaacggaggaagacgaaaatggtttttttgccgatttggcaataaagggccatttctctaccaacggcgattgtctacctgttgacaacgcaactgccatcctgtttccttatgtgcgcagcacggtgtcctcgctttgcatggtcgccaacattccaccgttggttttaccgacaattaatattattgatgcattcaagcaaccatctatagaaaagtcgtaattgttcattgtaattcactattttcctacactataatagtatcatcaaaagccgtaaggaacgggaaaccgccttgcggcttttgtgttgccggggtttgggcagcccccggtggcgattgcgtccatagcgaatcctcctattctttatcacagctgacagccgggaaagaccggcgcttttttgtaggcgtagcttaatgtaaagcagcggtctccaaaaccgcaggatgaaggtgcaagcccttccgcctgtgccatccaccccaccagcccggagaagctcacacatccttttttctcttctgtctgtgtgctggcggggcggctattgaaaataaccaccgggggtgcctatggagaaacgaccgaccggcaatccccggtatgccaacggggccctgcgccgcaaataccgcgccaggctgcgggccatgggcggagagtgtggtatctgccacggcaggctggggccgatccattacgacgagccttccgatgccgcgcacccactatcctttgtgatcgatgagatccatcctgtgtcgaagtggcggcagttcgggtatgcttcgccccgcgctgcagccgaggattgggacaacctgcagcctgcgcattacttttgcaacgcgcaaaagggcaacaaaacaggcgttttcgtggcagattcggggcaaaaaatcacaaaagcgccccaaatcagcgatggaaactggtagtgggggagggtcccccggccccgcggtggcgacctcgccctgtccagcgccgatttacacacagggagtttttgaatgaagatgaagagcgtgacggcccggaacgaccggcttttgcagttgaaggaactcgcaaaagtgctggcgggcagtatcgacagctgcaacgaccccaaggcgctgccgccgctggccaaacagtaccgggagaccatccgggaaattgaagaaatcgagggagcaaataaccatggcgacgaagtcagcgacatccttggcgagcgcgccgctgatgggaagccaggagccgtccgaaaggatcgcgcctgagtaccagcggtcggacgggctggacgctgccaagctggtgcgggtaggcggcactgtgctggacccctggcagggtgacgtactggacgactggatggggtttaccccggcgggcaagtgggccgcaccgacggcgggcggcagcgtaccgcgccagaacggcaaaagcctgctgatccaggcccggagcgaggccgggatgctgatgtacaacgagcaggtcatctacaccgcccacctgcagaaaaccgccaccgagacttttgaggaaatgcgggactttttcgagggagccaagctgcggcgctatgtggccgagatcaagacggccatcgggcgcgagcagatcatcctgaagtccggcgcgcgcatcaagtttctggcccgcacccgtaacggcggccgcggccagcatggtgacctgctgatctttgacgaggcccaggaactggacgcgaaccaacaggcatcctttctgccggccatctcggccagcctgaacccgcagacgctgtacctgggcaccccgcccgatgagaccgccgtgggtacggtgttccggggcatccgcaacaaggcgctggaaggcgagagccgcaagaccgcctggtttgagttttccgtgcccgaaatcggggatgtgaccgacaagcgccgctgggcggcaaccaacccggcgctggggcggcgcatccagctgaccaccattgagggcgaggtggaacagatggaccccgacaccttcgcccgggagcgcctgggctggtggagcccggtgctgacagaacaaaccgactaccctttaaacaaaaccgcctgggagcagtgcgccagcgatgagctgaaacccgagggcaagaccgcctatggggtaaagtttgccgccgatggttctgccgtctgcctgtgtggtgcggtcatcccgaaagagggacctgcccgcgtctcgctgatcgagatgcggccctcggggcaggggtacggctggctggccgactggctgaatgtccgctacgaccgcgccagctgtgtggtcattgacggccgcaacggcgtggacgtgctggtggagcgcatccgccccatctggaaagcgaaaaattccgtcatccgccccggcacgaaagatgtgatcgcggcggtgggcggttttaccaacagcgtgaacgagcacagcctgacctggtatcgcccccagacggtgctgaacgagagcgcggtgaccgccatcaagcggcccatcggcggcgggtacggctttggcggcgacaacagcctgccggtggaagcctgtgccctggccctttggggcgcaaaaacctgcaaacgagacccgacacgcaagatgcgcatcggctaaaaggagcaaagatgaccgacctgcattttggcatcatcacagggctgaccctggaggaaaaccggcagctggcaacgctggccgaggtgttcaactaccaccagccctacaatgagaccaaagacaaatactacgaggggcacatcaccctgaacgatgtaaacatcggcattgcgctgcccggcggcatcaaaaagctggaggtcggctgcaactggggccagaaaaccgtggatgtgctggctgcgcgcagcatgtttgacggttttgtaggcaaaaacaccgaagccctgacccagatggtagccaacaaccggttgattgccgagtacagcaaggcctgccgggatgagctgaaatatggctgtgtgtttgcctcactctccgccgatgatgccataggctgccgggtccgtttccacagccccgtcacagcagcggctttgtggagcggcgaaaaagggcgcatcgactgcgggcttgccatcattgacaccgtgccggatgagcagttcaaagggcgctggttgccccgccttgtcaacttttacaccgatgaggcggtcatcgtgctggaaatggtgcagaaccagtggcgagccacacgccaccggcaccgtatgggccgccctctgatggagccgctgatctggaacgccaccagcgacaaaccctttggccgctcccggctgaaaaaggccatccgcgcactgatcgatgattatgtccgcattgttgcgaacgccaccgtggcgctggagttcgacaccacgccccagaaatatctgctgggcgtgaccgatgagcagtacgataccatcatgaacgacaagttcaaaacctatgtgggcagcctgctgaccgctaccagcaacccagagaccggagaaaacccgctgtttggccagctggcccagggcagcctggcaccccatgtggaaaaaatgcggatgaccgccacccagtttgccgccgccaccggcctgaccgtgaccgatgtgggcgtgatcaatgatgccaatcccaccagcagcgatgcgatcctggcccagagccagaccctggtactgatggcccagcagttgaacaccggcaacggtgacgcgctgcgcaccattgcccagatggcccaggccattgcccgcagcgtgacgctggatgaattgaccgaggaggagcgggacgttatagcccacttcaagaacccggcgatgcccagcgtagccgtgaccgccgatgcggccatcaagatcgccacggcccggcaggagtttgccagcaccgatacgtttttggagatgatcggttttgaccaggcggacattttgcgcatcaaggcccaggagcagcgggtgcgggggcagaaaacactgttagaggtggaaaatgaggataacggcgacggcctgggcggcgtacacccagcagctggcgaagctgaataaaaaagccgggcagctgatggctgactacatagccgcccacggcaccggggacaccgatgcattgatcgcctacgcccacgcgctggtgacaaagtacggcgagggcagcgccgaactggcctgccagatgtacgatgccctggccgctgcggccaaagccggggtgcctgccgccgagcctgcccaaccggcaagctatggcgaggtagcccggatggtgcaggctaccaaagccagccagccccagatgcagcagggagtgagccgcttagtcaagcgcgccggggccgacacgaccctgaaaaacgccttgcgggacggggccgagtgggcctgggtgccccagggcgatacctgcgccttttgcctgacgctggcaagccgcggctggcagaaagccagccaggcagccatcaaaggcgggcatgccgagcacatccacgccaactgcgactgtgagtacgcgatacggtttgacgggcgcagcaccgtggccgggtacgatccggacaagtacctgcgccagtaccgtgccgctgatggggacatcaacaaactgcgccgggtgaattatgccgccaacaaggagcgcatcaacgcccagaagcgggcagcatatgcggcgaggaaagccgcctttacatccacgcagaatcgtgctatacttggttccatcgacagcgatgggagcgtgaagaagatagaactgacagttcttggtaacttagacccttctcctctcatttccacgtttggtcatttgcagaccacagaagttgtcgtgacggatgaacgaatcgcgcatattaaggaacgacatccagaggattatcttttgtttgaacaatatggacgcgaatccattttgtccccggacattctgattcaggacataaaaaacgtaggcactgtatttgctgttaagaaacttcctgacacgaatttgaatgtcgtcttgcggctggttttggatacggataacccggatttcaaaaattctgttatgacattttatcggattcgtgaaaagaatcttaaaaaactgatggagaagaatcctgttctttacataaaggaatgaatctgctataataagcgtaggataagattgcatttgaagtagagattgtgctgctacgcgcccattgggccaaaagaaatgcgggaaggggcacacccgccaaatgccaatcgatggggaacggttcagatgccgttccccgttcctgttgatagatccattttaaccacgatgcaaccgcaccgtggtttttttatgcctgtttctggccgcatgaggccggggcgggcgttttttatacccaaaattgcccggcatggcgtaaaactgcacagccagggcggatgcgacccgcgtaaacaaagcgcaggcggaaaggaacccttatgaaacgcgaagaagtcaagaacaagatccccggcattaccgatgaacagctggattggctgatgggcgaaaacggcagggacgtcaccgccgaaaagaccaaggccgccagcctgcaaggccaggtggatgacctgaccaagcagctgaacaccgccaaagacggcctgaaagcctttgagggggtggacgtggccgacctgaaagggcagatcaccaagctgcagggccagctgaccgaccaggccgacagctttgcctttgatgccgccctggacggtgccatccgcgatgcacgcggccgcgatgtaaaggccatccgcgggatgcttgatgtggcggcgctgaaagccagcaaggaccgcaccagcgacatcaagaccgcgctggatgccctggtgaaaggcaaggcctgggcctttgatgccgctcccggcggctaccccaacgtgaaagacggcggcgaggccgccgcccgcggcaagggcggcatggtggacggcgtggaggctgctttcgcgtcgatgaatccgaacttgaaagtgtaagttttacagaaaggagccaattatggcacatgcaaatcaggaacgctggagcaagctggtggacgctaagctgcgcaaccagcttgtgacccgtgacaactacatctttaacaaccgctatgagggcgaccccaaggcgggcaaggtcaagatcccggtgcgtgataccgaggtctctgtcaaggactacaacaaggccaccggcatcgaccccgaggccggtaccactacctacctggagctgaacatcgaccaggatgaggccgtgaacgagctgatcgacggctttgatgccgccagtgtgcccgatggcattgtggccgaccgcctggacagcgccggttacagcctgggcctgtccatcgacaagaagtccatcgaggctttgcaggccgccagcggcgccaccatcagcgccaccaagaccgccactaccgaggccaacgcctacaagctggcgctggaggccaagcgcgtgctgagccgcaagggcgtacccgccgatggccgctttatgatcgtctcgcccgagtacctggaagtgctgatgctggatgagcatttcatcaagcgcggcgacctgtctcaggagatggtgcaggcgggcgtggccggtaagatcgcgggcttcaacgtgtttgaatccaacaacatggattacgagaacaccacccgcgtaaccagcaagaaaaccaccaccgagttcattgctggccacccgaactggtgccaccgcgtgatggagtggcaggtccccgtccacctgcaggatctggccggcagcggcaagtacatcggcgcaagcgccgtgcagggccgcaaggtctacggcatcaaggtctccaagccgcagaccctgtacatcaagcgcaccgaggcctgataaggagggcaccccatgggatacgccgatctggacgacgtggagagcgggttccgcaccctgagtgatgaggaacggaaccgctgcttttacctattagaggaagcggctgccatcattgacgcctatgggcgggaggccgacccggacgtgaaaaggctggtctcctgccggatggtgcgccgcctgctgggtgacggcaccggcggcgagaccccgctgtaccccatgggcgctacccaggggtccgctacagcgctgggctatacccagagctggaccatgggcagcagcggcagcgccggggagttgtacctttccaaactggagaagaagctgctgggtgcgggcaaccgcatcggcgcggccagcccggtggaggggctttgcgatgctgcgggggattgatgtggtgctgtacgagaagcaccagaccggcgaggatgctttccatgcgccggtgtatgaagaagtgcccgtgaccgtgcacaatgtgctggttggtgccccggacaccgctgccatcgtgaacgaactgaccctgactggcaggcggctggcctacacgctggccctgccaaaaggggatagccatgattggcacaacgtgaccgtggagtttttcgggcagaagttccgcacctacggcgatgtggtgcagggcatggaaagccttgtaccgctggcatggaacaaacaggtaaaggtggaacggtatggctaaggtaaaaatcaagctgaacagcgccggggtgcggcggcttttgaaaagcaaggagatgcaggccatctgcaccgagcatgccgaggagattgccgcccgctgcggtgcaggctacgctgtggacagcatgcagaaagagacccgcgccattgccaccgtgtatccccagactgctgaggcccgccgcgacaactaccacaacaacaccatagaaaaggctttgcgatgatcgaaacgactgttttggattatctgcgcgaccggctgggtgttcctgtgacgatggaagtgccggagggagcctccggcacttttgttgtattggagcgcaccggggctgagcggcatgaccatatccgccgcatgagcctggccgtgcagagttacgcgcccacgttgttacaggcagcacaattggacgatgccgtgatcgaagccatgctggctttgcccacgcttgaccaggtgggggcctgcaagctggagcgcgattacaattttaccgataccgaaaccaaaaaataccgctaccaggcggtttttgcggtgacttattacgaataaccgcgtgtccacactggacacgggaaaggagcctgtaatggcagacaccaaaaatgtaaccaccagtaagcccaagatcggcggcgcagtgtaccgtgcgcctgttggcactacgctgcccaccgatgccaccaccgctttggatgaagcatttgtgtgcctgggctatatcagcgaggacggcctgaccaacgcgaacagcccggacggtgacaagatcaaggcctggggcggcgataccgtgtacacctaccagaaagagaaggacgacactttccagttcaagctgctggaagcactgaaccccgatgtgctgaaaaccgtatacggtgatgacaacgtgaccggcaccgtccaggccgggctgaccgttaaggccaacagcagcgctgccgaggacaaggcctgggtggtggagctgatcctgaacggcgtgctgaagcgcgtggtcgtgcccaaggccaagatcaccgagatggacgatatcgtctacgccgatgaggaagcgctggggtatgacattaccatcaccgccacgccggacacggacggcaacacccactacgagtacatcaaggagaaaacggcatgatcaccggcaagacaaaaagcggctttgtttacgccatcccggaaaagcgcatccacaacatggaactgctggacgcgctggtggaagtggagcgcggcagcgatgccggtttgagcgatgcgctgaacctgctgctgggcaaagacctgaagaaaaagctgtacgacctccaccgcgatgaggacggcattgtcgatggcgaggctgtcgccaacgactttgtgcagatcctgctggattacaaagcgggaaaaaactcctgaccctggcccggatggcagcgctggccccggacgagctggtgtgcgacatggcggaaacctaccatgtactggactggcgcgccctggggctgccgctggcggccaccctggccgggggcctgcgggagacaagccgcacctgcatggcgctgaaccatgccccgataacgaccgacacgctgctgctgggcgcgatggctgacagtttgcagctgctggtgtggagcaagaccgaagacgcccagcatggccgcaaccgccctgccccggtgctggataccctgttgggcacggctcaccgccgcaaggtgaccggctttgccacggctgccgagtttgaagcggccaaagcagaaattttgaagggaggctgatgccatggcaagcaaaaccgaactggcgaaagcctatgttgagatcatcccctcggccaccggcatcggcggcaagatcagtgaagcgctgggcggggaagtaaccgctgcgggtgctactgccgggcagagcctgggcaagagcctgatcggcgcagtgggcaagatccttgcggcggcgggcatcggcaagatgctgcaggctgcctttaccgagggcagcgcctatgagacagaggtcgccaaggttggcacaatcgccgatacctccaaggtctctatcgaggatttgaaaggccagatcactgacctttccggcacgatgggcattgcggcgggtgacctggccgaggccacctaccaggctatcagcgccgggcaggacacaggggatgccgtggcctttgccgggcaggcggctaagctggccgctgcgggctttaccagtagttcctcggcggtcgacatcctgaccacagcgttgaacgcctacggcctgggtgccgacaaagcgacccatgtttcggacgtgctgctgaccacccagaacctgggcaaaaccagcgtagacgaactttcggccagcatgggccgggtcatcccgctggcggcagcctacaaggtgaacgtggaaaacctgtccagcggcctggccattatgacggccaacggtattgctaccgccgaggccaccacctataccaagtccatgctgaacgagctgggcgacaccggctcgaccgtgggcaagatcctgcagaaagagaccggccagggctttgctgaactgatggatagcggccagagcctgggcgacgtgctgcaggtgctgtatgacagcgtgggcggcgatgccaccaagtttgcggcgctgtggtccagcgtggaagccggtacgggtgcactctcgctggcgaactccggcgcggagaagttcaacgatgtactgggccagatggtggacagcagcggtgcgaccgagactgcttacaccaccatgaccgacacgatggcccaccggatggagagcctgaaaaccaacgctgccaacctgggcattgcgctgtttgattcggtcagcggcaagctgggcgcagctgtgagcctggccagcggctacctgcagaccttgcaggagggctttaccagcggcggctttgcggggctggcggaagggctgggcagcattttcaccgacctgaccaccaacgtgggcccccagctgctgcaaagcggcatcgacctgatgacccagctggggcaaggaatggttacgggcatcccgcaattgctggcacaggcgctgcccattgcggccgacctggccagcgggctgcgcgccaatgcggggcagctggtagacaccggcatccagttcatttttaacatggcgcaggggctgatcaacggcctgccgaccatgatcacctacatacccggcattgtgaccgatattgcaggcatcgtcaacgacaacgcgcccaagctgctggaagcgggggtaaagctgatcggtatgctgggcatgggactgatacaagccgtgcctgcgctgctggcgaatctgccgcagattctgatggccgttgccagcgtaattactgcctttaactggctggaactgggcgggaatatcatcaagttcctgggtaacggcatcaggaacatgggcgggactttaagcagctgcatcaaaaactgctttgaccagggccttgcctacatcaagagcctgcccggcaaggcagccggatgggccgctgacatgatcaacggctttgtgggggggatcttttcctcaatgcacaaggttgcagatgccgtcaagaatgtagcttccaccattactgcctacatgcacttcagccgccccgacctgggtccgctacgtatgtatgagcagtggatgcccgattttatagccgggctttcccgcggcattaccgacaacctgtggatggtcgaggatgcggcggagaggctttcgggcgcgacggccgagccgatgcaggtagctgtggccggtacactgcgcagcaacaaccgctttggcaacactgccgatacctggcagccgggcggtatgaccgtaaacctgaacaacgagttccacactcacgacagcctgtccgaatcggaactgacgcgggaggcggaatccatggcccagcgtttgaaatgggctatcccgtaaggaggtgcgcatggcaaggaccgtgcctgtatatgcttttcaggcggcggacggcagcaccatccgctttgccgtggacagcgatctctggatcacgaacctgaccggcgatgacggcctggacgtggaaatgaccgagcagcaatccaccgggcagaccggcaagaccatcacggggcaatccgtaggcagccgcagcctgaccgtgaccggcagcatcctgcgggacctggatgccaacgaggcgctgctgaagcggctcatccgccccaaagaggccgcccgctggctgaaaaccgtgggcgataccacctggtatctggatgtgctgcccgcccataccccggatgtgagcggcggggaacaccttttgaactttcagtttaaactgaaagcagcgtacccctactggcgcaccgtggaaacggcagccaccatgctgggcggcctggagggcagctggttcccgacccctgtctcgaccgccggcagctggtacatcagcaaatacaaaaaagatgtgtacactaccgtggtgaacagcggcagcaccgagaccgagtttgtgctgaccctgaccgctgcggcccgcgtgaagaatccgatgctgtggcacaacggcaagcgcagctacctgaaactgaacaaggaaatgctgcccggtgaatcggccatcatctccacggtggatggttcccgtggctgcacctaccgccagagcgatggtactgaggtaaacgggttccgttggctggactacgacagcgacctgtggatgacgctggaccccggcgacaatgtgctgcgcctgacggctgacgagggccgcgaaaacctgaccgccacagtgacggcacctaagggggtggcggccggtgtctgacgctttacgcctgtatgtgtaccagaacggggagcgcgtaggcatggtggacagcgctaacagcctgcagtgggccccggcctttgccgatgtgggcgagatcaagctggtgtgcggcgctaccgccaccaaccgcgccatgctggtgcagggggccgtgctgtacaacccggacacccccggcctggccgcgctgatcgtagccacggaactggacagcaatgcccgcaagctgaccgtgcggggcaagtttaccctgcagcggttcgcccagcggatagccaagggcaagaccaccgtgaccgatgcagccgcagggctgctggacctgtgccgtgccaacctgcgcgagctggaagtggccttgccggatgccgctgattttactgccccctgtgaggcagtggacctggaatgggtgacctgtctggatgccatgacccagctggccgagaccggcgggtttggcctgcgctgcgcctttgacccggccaccggcagcgaaacgctggaacttttgcagggcaaggaccgcagcgcaccggggagcgatttgtacatgggctacttttcaaccaggatgcagaacctttccagcccaacctataccgaggatgccagcgactacgccaatgtggtgctgtgcggcggcgaggaacccagcgagagggacagctttacccggtatttttgcgaggtaggggacatcacagccgccggcaatgcccggcacgagctgtgggtggacggcagcagcgtaaagcacaaatacaccgtgcagaacgcggacggcagcaccaccgagaaaacctacaccgaaaccgaataccagaccgccgtgcagaactatgcccgcgcagctctggccaatcacctggggacccggcagctgaaatgcaccgccgccgacagccagatgatctacggtcaggactacgccctgggcgatattgtgccggtgcgggtggaggagatcggcctggaagccaccgcgcgggtggccagcatcaagatcatctacgaaagcaccgggcgcagcctttgccctgtgtttgacaactttacctttaaaaaggagtgatgtgctttgaccgagcttatctgctggccgctggacaataagcagtataccagcgtggcgctgggcgcagcctatgcggcccgcagccgcggcgtgctgaacgccgacagctttgccgccaaaaccaatggcaacaatacggtcactgtgggcaagggcgtgggctgcatccacgtgagcgatcagtgggcggcgttcccgttcagccagggcgatgtgaccctgacctttgaggatgccgacggcgtgaatccccgttgggatgccattgccctggtgtacgacaaaaacgccaacaccgcaggtctggaagtgcgcaagggtacggcctcggccagccccacgctgcccagcctgcggcgcagtgacgactatgacgagatcttcctgtaccgggtgacccggcccaccggcgctactaagatcagcgccgacaacgtggtagacctgcggctggatggcagcgtctgcggcctgatgcgggataccatcgacgcggtagacaccagcgtgatggaagccgcctttaaagcgtttttgcagaaaatcgaagccgaactgaaccagctgaatgccggaacctcggccatgatgcgagcgacctatgacccgcaggggcggcagaccgatattttcaaggcgatcgacaaggtctccaacatctactacgccaggcttacgctgaacgggtggacggcttgcagcagcgccgaccaggccaaaggcctgctgtaccagcagacggctacgctgacctgcgcgaacagccatgcgccggtggtgacggctgccagcgagtttttgtccggcatcggctacgacaagaccggggtgcccgctaccgatgatgtgctgaatgaagtgcaggacatcatcaacgacggcgtgacggtcacggcgtacaattcggtgctggttaaggtaaaagaaaagcccaccgccgaaatccgggcgcggtgggtcattcaaagttgatggaggtttagcatgaaacattcgtttgtatgtagttttaccccccccccgtaagaaatctgcggcatgtgctgcgcgggggtactgctgatgggtgtagcaccgaggattccgggtgagaacgcaaaagggaaaatgcttgcacaaatctatgaatacggaatggggtcggcaagcattaaggcactttactgtaacgagaaattggtaaccgcttcagatggcgcttttgaaatccatattaaaaaagcgggtacatatcggcttattggctgggtacaggcacgggattccgcctataaggcttatttgaaatgcaacgatgctacaattttcggtccttttattaacaacggttttgaccttgaaaaaaaattaagtgcaggagatgtcatcagtatccccagtcagtacatggattattattctacagcatctgcaacattgattatacttacaacttaatggaagcgagtgattttatgggaatgtcaccgagaacaccgggcggcaaaaaattgcagctgcttacgaccgttacatttacacctattaacggcagcagtaccgccacaagctc

SEQ ID NO: 7830 - DNA, 8813 bp, Unknown
  gut microbiota DNA sequence
gtctcggccttggcgctctcgttgttcaggtccagacgggccaggttgaactcaccgatgaggttctgcagttcttcgtcgctgtcgttctcgcggcgggcagcgtccagctccaggtagcgggggtcggtctgcagggcagcggcggcttttttaaacagatcaatgcaatccatgataggttctccttatgaataaaaatgtaataaagcgtgaaatttttgcggtttagtcctgcaccagctcgcctaccagcaaggcggcgcgggagccggtcaggtggacgtttgcccactgaccgatgagggattccggagcctggaactcgaccaccaggttgttgtccaggcggccattgacagtgccggcggtgcggcctgcggcttcgaccagtacgcggacggtctggccggccatggcagcggtggccgcaaaggcaaattcatcctgcgttttcagcaggcgctccatgcgggcggctttctcggcatgggtggtggggtcgtcgaacttcgctgccggggtgccggtgcgcttggaataaataaaggtgaacagctgcatatagcccaccttgcggacgagatccagcgttgcctggaagtcctcctcagtctcgccggggaagccgacgatgatgtcgctggagaaggtcacgccagggatcttttcccgggcgtagtcgacgagatccatatactgggccacggtgtagtggcggttcatctctttcagcaggcggtcactgccggactgcaccggcaagtggatgtgcttgcacagatgctcctgcgcggcgatggtgtcgatcagcttgcggctggcgtccttgggatggctggtcatgaagcggatctggtagtcgccgggcacggtgcagagcaggttgagcaggtcggaaaaatcgatcttttccgcaaggcccttgccataactgttgacgttctggcccagcagggtgatctccttgtagccttgggcaatcagctccttgaactcggccaggatggcggcgggttcacggctgcgctcccgtccgcggacgtagggcacgatgcagtaggtgcagaagttatcacaaccgtacatgatgggcagccaggcgcggaagccggaatcgcggcggatgggcatttcctcgacgacggcgttgcgctcctcggggttttcgaggtagcgcttgccgcggctgatacgctgggccagcatggcgggcaggcggtcgatgccgtccacgccgaagaccaggtcaacgtaggggtagctctggcgcagcttctccacgatgtgggcctgctgggccatgcagccgcaaacgccgatgatgaggcgcgggttctgctctttcagctttttcaacgcacctacgttgccgaaaacacgctgctcggcatgttcgcgcacagcgcaggtgttgaaaaggatgaggtcggcatgctcaacgttatcgcacaggccgaaaccgacatcctgcaaaacgcccttgatcttctcgccatcgttgacattctgctggcagccgtagctgcgcacataggccaggggcggcgtatcgtaaaacgaggccagcaccttggcggcggcttcgttgtgggtataggtcagtttttccaagtccagttctccttgcaggtgcctgcatacaggcacaaaatccagatataccatattagtatagcaaatcaggcgcaaaagcacaagcgctagttctggattttttgcgcttcggtccggtttctgacctcatcacagtttttgagggcagcacacagcaaaaagcggcagcaccgcatagcgcagtgccgctccttttattcgttggtacgtatgttatttagctatctttttcttctttgtcgaactcgttttccagctgttcatggcgctttttgtagacagcgctgcaaagctggagtaccaccagcgccaacacgaaggtggtgcccgccgcaatggccgcgcaggccagatggatggccagcggcacatcgaacgccgacatccttacaaatgtaaaaacgccgatgaccgccgcacccgcaaggctgaacagcacattggtgccggcagcgtttttaatgcggcggctccaaagcccggcacgcaggcaggcgacgacaatgtagacgcagccaatcataaacacagcccaggtgcctgccatctcccgcatggtaaagccgagcaatccctcccccagcaagacaaccagcagcagcgaccagaccagccagaagccgcggctttcgatggtaagcatggtgcgttcctgcatttcgtccaactgatttttcccgaaaagttgtgctaatttcatagttattcctcccagaacagatcatctaaggttttgcccagcaccttgcagatgctgcggcaaaggttgatcgtggggttatactcccctttttcaatggcgttgacggtctggcgcgatacgccgacagactccgccagtgccccctgcgtcatgtccttttcggcgcgggcggctttcagtttcaggtttttggccaacttccctgcctcctttcagatggtgtaaccagtatagcaccgccctcctataatgtcaagtatatattacattttatcttttatatttttctttttgtcgttttacttgcgattggccctgcgccgtgttatgataggcctatactactttataaaaaggaagtttggcgaatgaagtacagctttcccgcttttgaaaatggatttgtccgcgtagccgccgccacccccgccctgcacgtggccgactgcgcctataatgcccagcagatcattgacgctatgagtgtgtacgcggcccagggcgtgcagttggtctgctttcctgaattttgcctgaccggctacacctgcagcgacctgtttttgcagcagaccctgctgaagggtgccgaagacggcctggctgccatcctggaggcaagccgcgggctgaacctggtggcgctggtgggcctgccagttgcctatgacggcaagctgtacaactgcgccgccgttttgtgcaacggtgagctgctgggcctggtgccgaagcagcacctgcctaactatggcgaattttacgagaagcgccactttgtgcccggcatggccgagccggagtgcattgagtttgcggggcaggaaacgctcatcggcacgcggctgcttttcagctgcaagcagttgaaaagctttgtgctgggcgtagaagtgtgcgaggacctgtggagccccatgccacccagctgcgcgctggcactagccggcgcgaccgtgattgccaacctctccgccagcgacgagaccatcggcaaggccgcctaccgccgtcagcttatcagcgggcagagcgcacggctgctgtgtgcctatctctatgccgacgctggccacggcgaaagcaccaccgatatgacctttgccgggcataacctgattgccgaaaacggcaccctgctggccgagactgccccctttgaaggcggcaccgctatgaccgagctggacctggaccgcatggtgcaggagcgccagcgcaacaccacctttatgccggagaccgccgggtacacccgcgtggagtttgagctgccgcctgtggaactggccctgacgcggcaggtctcccccacgccgtttgtgccccaggataccgccgcccgtgccgaacgctgcgagctgatcctgcgcatccaggcggagggcctcgccaagcgcatcgagcatacccacgccaagtgcgccgtgctgggcatctccggcgggctggacagctgtctggctttgctggtggccgtgcgtgcctgcaaggtgctgcaccgcgacccgaaagaaattgtagccttgacgatgccctgcttcggcaccactaaacgcacccgctccaacgccgaaattttgtgcgaggcgctgggtgtcagctttgccgagatcaacattaccaacaccgtcaacagccattttgcggacattggccaggacccgcagacctacgatgtcacctttgagaactgccaggcccgcgtgcgcacgctggagctgatggactacgccaacaaaaacggcggctttgtcatcggcaccggtgacttgagcgagctggccctcggctgggccacctacaacggcgaccacatgagcatgtacggtgtcaacgcgggcgtgcccaaaacgctggtgcgtcacattgtacagtacgtggccgacacctgcggcgataagcagttgagcgatgtgctgctggatattctggatacgcccgtcagccccgaactgctgcccaccgctgaggacggcaccatcgctcagcagaccgagaagctggttggcccttatgaactgcacgatttttatttgtactacgtgctgcgcttcggcttcggacctgccaaaatttaccacttggcccgcacctcctttgcaggcaagtacgagccggaagtactgctggcctggctgaagaatttctaccgccgcttctttgcccagcagttcaagcgcagttgtctgcccgacggcccgaaagtcggatcggtcacgctgtccccccgcggtgactggcgcatgcccagcgatgcctgcagcactttgtggatggccgagctggagaagatcacgctgtaatataaaaaaggaagtgctgttatggccatgtggaaaaacgacgacgaaatgtttgccctgatgaaggagaagctgtacacccccgttgtgggcgatattctggatcagatgggatacaagcaccagtttttgcctgcctccatccgcccgctggcggcccaggtgcccacggcgccctacatcctgcccggcgagaccaaggacaagcggcttatactggccggttacgcctgcaccgtgctggaaaataacgtgtacgagtaccaggcacaaaagccctttggctatatgaccgaagcgctggacgacttgaagcccaacgaaatttatatcgccaccggggcccacaacagcgccctgtggggcgagctgctgaccgcctgtggcaaggcccgcggtgcggtaggcgccgtgctggacggctacacccgcgacacgccgaaagtgatcgagcagaacttcccggttttctgcaccggcacctgggcgcaggattcctcggtacgcacctacgtgttccagtggcggtgcccgatcgagattgggcaggtcacgatccacaacggcgacatcgtgttcggcgatattgacggcgtgctgatcatcccgaaagagatcgcgcccgaagtgctggaaaaggcgctggaaaaagccagcaccgaaaagacgatgcgcaaggccattgaaaatggcatgctggtgaccgaggcgtttgccaagtttggcgtgctgtaaatttacacaatactaaaagcggaggatgcccgggtgggtgtcctccgctttgcttttgttttggttttataaaggggcgttaatactccacaccctcgcgggcggcaatgccctgggtgtaggggtgcttgtgcatctgcatttcggtagagtagtcagcggcgtcctgcagccaaggggccgggtcgcggcctgtgacgacgacttccctgccgtccttggcaaaagctgccgctttgcgcagcagggcttcgtccaggatgttgctttttaacgcagcgcaggcttcgtccagcaccagcaggtcaaagggctgtgacagggctttctccagtgcgtccgcggatacggcccgtgcctgggccttgtcgttctcgtccatcagccaggtgaatttggcgttggggcaggcgtagactgtggccccggctgtgcgcagcggggcaatttcgccgctggtgccgtcctttaaaaactgtacgatcaccacgcgccgcccatggcccagcgcccgcagcgccagccccatggccgccgtagtttttcccttgccgttgccccagtatagatgcagcatggaattttccccactttagccgttggctttttcagatgcaaaaaattctttggtcaggttaactaccgtgccggaaagcagcagcagggcaatcaggttcgggatactcatcaggccgttgaaggtatcggccacactccacagcaggcccaggtccaccgtagcgcccaggatggacacgaaagagtacaccacaaagaacggacgcacgaccttgtcattatggcacaggaacgccaaaaaacgcgagccgtacaggccccagccgatgatggtagagaacgcaaagcagcacagcgccaccgccgtaaagatggacgcccagccgccgtaggtggtagtaaagccggagatggtcagttcggcgcccgcggcggtgccgtagttgacagtgatgccgctgcacaggatgaccatcgccgtcagggtgcagatgacgatggtgtcagcgaagacctcaaaaataccgaacaaaccctgcttgaccggctttttggtgtcggcgcaggcatgggcgatggagccggtaccaaggccggcttcgttggagaagatgccgcgggaaacgcccttctgcatgctgataaacaggctgccgatggtgccgccggtgaaggccgccgggttgaaggcaccggcaaaaatagcttccagcaccagcgggaaacgtgggagattcagcaccacaacgcccaccgccagcacgatgtaaaacagcgccataaagggcacgaggcgctcgcttacgctgccaatacgcttgatgccgcccagcaacaccatggcgaccagcatggccaccacgatgccgaccacgaggttcagtgtggagagcgcaccattgccgacaacgttgtactccagcagggcggtatcgatggccgccacgatggtgttgacctgagtggcattgccggtgccgaacaccgtcagcacgccgaacagcgagtacagcacagccaaaaactgccaatgcttgcccaggccgtttttaatatagtacatcgggccgccgacccactcgcccgcggcgttgcgctcacggaaatggacggccagcgtgacctcggcaaacttggtgcacatgcccagcagtgccgagcaccacatccagaacaccgcgcccggtccgccgatggcgatggcacccgccacgcctgcaatgttgccggtgcctacggtgcccgccagcgcagtgcataccgcctggaacggcgtcatagcgccgtccgaggcatcctttttgcggaacatgcggccgatggtggttttgatgacatacggaaatttgcggatctgcaaaaagcctgtccgcacgctgagcagcagccccacgccaatgatgcacaccatggccgggacaccccagacaaagttgttgactgcctggttgacagccgcaatcgtttctaacataatcctccccattccctctcgatttaggaatcccacaaatacaaaaaggtcacgagccgtgcgtacacattggctcatgacctgtttgcatcgtactgattcagtatagcattttatggggaggtttgcaagggattacttgacgtaaaccccttacttgttttccggcagatgccacttccaatccaaaatttcgggcatatcctggccgatctcgtggatgtagttcttgtgggcgaccagcttgtcgttcatctgctggataaggtacgcaccgcggttgcccagctggggcagatgcagcagcacatccttgaccagatggaagcggtcgatctcgttctgcacgcgcatatcaaacggcatggtgatggcgccttcctcctggtagccgtggacactcaggttgcggttggtgcgctcgtactctgccttgacttcccttgtcaccaagaacagcgccgagcgagttgagatgggttcctaccgcttcatgttcgcgttcgccaccagccttgcaatccagtctttcacgctgctggctgtctctgcactgggtgacactgccgaagcatggcgcaccgtggccatcgtctacgccattatcggtctgatcgtcaacacgctctctgttttttccgtcaaggagctgccggaggaagagtttgtcgataccacggataaagccgaaatcgagaaagatgagaagtacggtcttgtcgaagctgccaagttgctggtttgcaacaaatactacctgatgatctgcgtcacctacattttgcagcagatctatggtgccatgatcagtataggtaccttctacaccgcccatattcttggtgacaaaaacctgttcggcgtgttctcctaggccatcaacattcctttgatcatcgcactggtctttacaccgaccctcgtcgccaagatgcacggtatgtacaaactgaatgtcggcagctacgccctcgctaccgtggcccgtgcgctcgttgcggtggccagctatacgggttccggcgatgtcaagatgatgctgctctttacggccattgctgcactgggtcagggcccgtggcagggtgacatgaacgccgttatcgcctcttgctcagagtacacttggctgacgaagcataagcgtgtgaacggcacgatgtactcctgcacctcgctcggtgtcaagctgggcggcggtctcggcaccgccatcactggctggctgctggcattcagcaactacgacaaggcgctggctgtgcagccggaatcctgcatcaatatgctgaaactcatgtacctcgtaattcccttggtgctggacgccatcattacctttattctctcccgcatgaaggtcgagaaggccaacgataagatccgcgccgaaatgaaaaactgatatttactattttccttctaaaaaggggctgttgcaatacggcagttccttttt

SEQ ID NO: 7831 - DNA, 2787 bp, Unknown
  gut microbiota DNA sequence
acaacaacatcaaaaccttcgttgccgttggtatcggcgcagctctgttctttgtcctgggccgctttgtggccatccccagcccggtgcccaacaccaacatcagcctgcagtatgccgtgctgggcctgttggctgccatgtacggccctgtggccggcggcttgattggctttatcggccatgcgctgatcgacctgtcctggggcggcatcccgtggtggagctgggtcatcgcctctgccttcaccggcgtggtggtcggcctgtttgccaaaaagctgaacctgcaggaaggcgacttcaataaaggcaaggtcatcacctacaccatttccaacgtcatcgcccacctgattgcctggatcgtggttgccccggtgctggacatcctcatctatgccgagcctgtcaagaaggtcttcgcccagggcgctttcgcagcgatctccaacatcatcaccgctgttgtcgtcggcggcctgctggtgctggcctacaccaagaccatcgccaagaagggctctttggacaaggagtaaacccgtatatttcccttgtgccttcccacataggcgggaaggcactttgtttgtgaggtgccgcatggctgcaaagacccccatcatttcctttaaaaatttctcgttccagtatcgggcacagaaaaagcctaccctgcaggacatcaacctggatatttaccccggcgagcgtgtgcttatcgcgggcccttcgggcagcggcaaaagcacgttggccgcctgcatcaatggcttgaaccccttctccaaccccggcgagtgcaccggcaccctgatggtggacggtgtggatgccccccatagcagcatttttgacctggcgggccacgtgggcaccgtgctgcaggatccggacggccagttcatcggcctgacagtgggggaggacattgccttttcgctggagaataactgcaccccgcagccggaaatgaaggagatcgtgcagcatgccgccgagctggtgggcatcgaaaatcacctcggctttgccccgcatgagctttccggtgggcagaagcagcgtgtcagcctggcaggcgtcatggtggacgatgtgaaaattctgctgttcgatgagccgctggccaatctcgaccccgccaccggcaagcaggctatcgagctgatcgacaccatccagcaaaaaaccgacaccaccgtgttgattattgagcaccgcctggaggatgtgctctggcgcaatgtcgaccgcatcgtgctggtcaacgagggccgtattttggctgacatgcgcccggatgacctgctctccggctcgctgctggccgagaacggtatccgtgagccgctctacctcacggccatgcgctacgcgggcattgccgtcacgcccgaaaagcaccccgcccacattgactcggtagtgctggacaaggccgacaccgcccgcctgcacagctggttccaggccgagccgctgcccgcccccaaaccggctccggagccgctgttggaagtacgcgacctctgctttggctacaacaagggtcagcatacgctacaaaacgtcagcttttccatcggcaagggcgagatggtcagcatcgtgggtcgcaacggcgcgggaaaatccacgctgtccaagctgatctgcgggtttgaaacccaggactccggcgaaatttacctcaacggtaaggacctgaaagatgaaaacatccgccgccgcgccaagcacattggctacgtgatgcagaaccccaaccagatgatctcgaaaacgatgatctacgacgaggtcgccatggccctgcagggcagcggcttgacggaggaacagattcaggaaaaggtcgaggatacgctgaaagtctgcggcttgtatcccttccgcaagtggccggtctcggcattaagcttcggccagaaaaagcgcgttaccatcgccagcgtgctggtacaggaccctgagttgattttactggacgaacctaccgccggccaggatttccgccattacaccgacattatggagtttttgcagggtcttaacacccggggcgtgaccgtggtgatgatcacccatgacatgcacctgatgctggagtacaccccccgcgcgctggtattctgcgacggtcagctgatcgctgaccgcagtgcttcggccgtgctgtgtgacccggaactcatcgagcgcgcagcgttaaaggagaccagcctgtacacgctggccaaccgctgcggcattgccccggccgaagattttgtggagcggttcattgccgccgacagggaggtgcgcgcccatggctgctaagaccgttttaaactacctgccgcgcaaaagtgtggtgcatcagcttaccggcaccaccaagctggcgttttttctactgtttacctttgccagcatgatcacctacaacacctgggtgctgctggggctgatggccgtcagctttgcgacgttcaaactcagccacattaaaattaaggaagtcagctttatgctggtcttcatgcttgtttttttgattctgaacgacctgttcatcttcctgttcgaccccaaccagggcaccacattgtacggcacccgcacggtgctgtgccacctgttctggcggtacgatgtcacggccgaacagctgttttatatgttcaatatctcgctgaaatacttcgtggcgctgccggtggcgatcctgttcatctcggctaccgaccccagtgagtttgcggcaagtttgaacaacatcggtgtatcgtataaaat

SEQ ID NO: 7832 - DNA, 458 bp, Unknown
  gut microbiota DNA sequence
ccaaaggttgcgaacggaatcggtgcaaggctcaccatgagatatatttccaccattcggccatacacgatgacaaagatgatagccgacaacgccagcatcgtgacctgaaccacaaaggtctgcaaatacagtcccagcagcggtcccaagtccatgccttccagcgtggcctgcattgctgtcaaagtcgcatcgctgacggacgtactgccggaaatcagcccgccacttcgggagatcacttgctgcgccacatcaaagacagccatcgtaatattgaatgtgttcgagatcagagtcactgccagaaaggtcttaaagacccatttgaaaaatgtccatgtctcgaaatttgccagattgttatgctcgatgagcatctggatcagctcataacaggcgatgaatgtcagcaccattccggcaatgggcaggatcacggattccgagatgtt

SEQ ID NO: 7833 - DNA, 183 bp, Unknown
  gut microbiota DNA sequence
gatctgtccaacctgctggttgaccgaatcgaacatccctgaaagatttcccatgataccgctgatgatcatgctcttgagccaatctgtgatctgttcaaggatactctgcatgagccgcctccttccttacgcaaacacgccgaacagcttcgccatacgggacagaagcatgaacagctg

SEQ ID NO: 7834 - DNA, 14453 bp, Unknown
  gut microbiota DNA sequence
ttttgggggtcacttcacactcgtattgagggagccttttgtagttatattcctaatgtaaatttactattgatttcattgttttcattgtttttattgggcaacaaacaaatgatgacaatgatttcaatgatatcaatagtaaatgatagtactatcctaaattcacgctgctttcccgccaaaggtgcctttgcgtttcagcagcaggtaggctgtcaggcagatgagcaccgacagcagcgagccgaccgccgtggcaaggcccatgggcagcaggttgtccgggaacagcttggacatgaaataggcccccggcacacgcaccagcacgatggccaaaatgttatgcaggaacgaaagctcgctgcggccgtaagcgcagaaatacccgctgaagctgaagtggatacccgcaaagaagcagtcccagatatacccgcgcaggtaccagccgcccgccacggccacagccgcgtcgctggtaaacagagccacggcattgggggcgataaactgcaccagcacacccacgatggccccaaaggtcagcgaaatgccgatagcatagtacagcgtcttggcggcgcggtcgtgcttgcctgcgcccacgttctgggcccccagcgccgacaccgtggacagcatcgaggacggcaccaggaagatgaagctgatgatcttctccacgatgcccacagcggcggcatccgtcaggccgcgccggttggcaatgaccgtgataagtaaaaacgagatttggataagtccgtcctgcaaggccaccggcacgccgatgcgcaggatgcggccaatgacacttttctgcggccgcaggtcacttttttgcagccggatgccgcttttgcgccgcagaatgacccccagcgagacgacaacgctgataccctgggccagcgtagtacccagcgccgcaccggcggggcccatgtgcagtgcccccataaacaagtagtccagcccgatgttggccgcgcaggccaccgcgataaagtacatcgggctgcgggaatcgcccagcccgcggaagatggacgcaataatattgtacgccgtaatacaggggatgccgatgaagcagatggtcaggtaaggcgccgcgccgggcacagcctcggccggggtggacatcatgcttaaaatcggctgcaccagcgccgtcagcactgcggccatagccaccgacaccgccagaaacagcatgaccgcgttgccgatgaccgcgcctgcgccccggtcatcgtgggcgcccactgcccggccgatgcccacggtaacacccatggccagccccaccagcatgaccgtgatcatgtgcatgatctggctgccgatggacaccgccgtgatgctggccgtgccctcaaactggccaatgatgaacaggtctgccatgccgtacagcgtttgcaaaaaatacgacagcaggtagggcagcgagaaataaagcacatttttgaatacgctgccggtggtcaggtctttttgcatggtgggtttccgtccttttcaaattaaaggctccccttgaggggagctggcgccgtaggcgactgaggggtggctcacctgcagagcaattgcatctactttgttggcctatagctaaagtagccacccctcacccgctgcgcgggagctcccctcaaggggagcctttttcctatataaagtaaaccccattttcccacgaatgtcaagttagctctttaaattgctaaagcagacatggcacaaccaaggaactttcaaattttacaattcttgtgttgtattccggccccgggtcgggtataataggggcatagcggtatctgccctgcagaccgctcgcaagaaaaaattacgaatctacggtattcttaccgccaggaagggagttttccccatgatgaagaaatccacgttcggtgctgtgctggcctttttctttgctgctgccggtgccctgaccgccgccgccctctacctctatcaccgcgagaaagagctggacgagtacgagcgcctgctgttcagcgatgacggtgacgattacgacgatgatgacgatttccaggacgacaccgtctacgaaaagatccccgcccagcccgcagccgacgcccctgacgccgctgacgccgagtaaaaactgagtctctcagccgggcgccgccttgtgcgtccggcttttccatcgctactgcctataggagaaaactatgcgcaaactgctgctctggcttgctatggtcattgccatggtcgcgctgatcttaggcggcaccgccgcgtttctctacagccgcaccggcgaaaaagacctcccgcaggaggctgtcaccttcggggacaccgccctcacccccaacgggtgggattggaccatccccgtgctgggcgacaaagtaagcaagcactaccagagccccaccaacctgaccgtgcaaaagctgggcacttttaccgataccgcgccccagctggtgctgccggattgggtcacccgcgccgatgtgaccatcaccgcgcccgacggcacggcctggaccggcgatacctccacctgcaacacctatacctacgccgccaacggcgactaccaaattattgtaaaagcctaccaccaggagaacgagccccccgccgacgcccagggctggtacgcctaccgcgccgggtacaccatgtcgatggcccccaccgtgaccctgagcagcgaccgcgccgcccagggcagcgtggtggcgctgtatctcaccggtattctggatggtgagccgagcctggagaccgacctgggcaccgtctggttccgccgcaccgccggcggctacatggggtatatccctatcacctataatgccgagggcggcgaccataccctgcagctgacctgcggcagcctgacccgcgacttgaccctgaccgtgaccaacacccagcacaagacggtggaactgcccgccgaggaagacgtgggcggggccgaggagtaccgcaacgccatctggccgctgtacaccaacagcaccggccaaaagctgtggaacgggctgttcgtggcccccagcagcagcgccattgccgtgcactacggcgacatccagatgcgggacggccagcgcagcggccaatccaccgggctgacctactccgcccccgacaacgagaccatcaccgcaccccagagcggcaccgtcgtgctggcggataccctgaccctgaccggcggcacggtggtcatcgaccacggctgcggcgtgaaaagctatctgttcgggttaaagaccgtcaccgcccagcgcggccagacgatcgaagccggctcccccgtaggcacggcgggcaccgaccatgacctgatctttgagctgcgcatcggcagcaaatcggtagacccggagcctgccatggcgggccgcagtggtctgcaataccgcgagtctgaataaatttttcattgggtacagcccggccccggctgccgcctgtttttccacgatggggcaacaccaagaggattttgggaagagtacagatgagcaagaaaaacgacaacatcccggcccaggccgcaccggatactgccccccaggcagccccgcagcccgaagccgcgccccctgcggagaccgcgccggcggaagaagccgtcgctacggccgctgccgaggatgcccccgccgaaccggcaggggagagcgaagcggaacctgttgaagaagcggcatacgccacccccgaagcgccggaagcacccgaggaagcccccgcagaagaaggcgaacccgaagcagagccggaaacgcctgctgaggacagcgcccccgcagagcaggatgccaccgctgcggcccccacggaggaggccgcagctgacgaagacgccgccttggatgccgctgaggccgacgaggagaccgtggagctgccgcccatcgatgaaaagcgcctgctggacatgacccgcacggtgcagctctcggtggagcagatcaccgccaacatggatattcccgccggggaggataccgacacttcgtccgacgacgacgcggcggaggatgacacccccgccaccatgggggatgttgtgcgcagcggcgtgaccggcatggccaggtggctgctgctggtggtggtgtttgtgctggtagtggccggcatcggcgtggcctacctgtaccgcagcgccacccccgatatgctgccttccatcagcgtgaccttcgccgggcagacactggagccttcggcctacaagtggcatgtgccggtcatcggcaactggttcaagcgtacctacgccgaaacttatagttccgtccccgctgtgctggaggcccccatctccacactgtcgccggatattacgatcagctccaccaactatgccacccagctgaccgtgaccgacgccaacaaggaaaccgtgttcgagggtacgctgtcggagttcagcggctattgctttgacgagaccggcacctacaccgccaagctggtggccagcgttaccggctcccgcgcagcaggcgccgccgacatcaccggctccgagacctggctgttcaccttcgatattgccatcgagccgtccgtttatttaagcgagaataccatcgagcagggcggcgtagccgccatccgtgtgaccggcagttacgagaacgacgcccccaccctgaccaccacgctgaaaaatcagggctttatccagtcctccaacggctgggtgtgctacctgcccatcccctggaacgcagccttaggcaccgagaccatcaacgtgcaggtgggccgctactccaccacactgtacctgaaagtgaccgacggcggattcagctacaaggattactcctcgcagtcccagcgcgccacgccctacctcgggcaggacgacgcccccaccaaggtcagcaagctgttcaccgcagcgcccaccggcatcagctgggcggacgccgggttcgtgcagccgttcctcaaccgcctcaacaccacgctgaccttcggcgcgaccgagtatgtgggccgccgctacagcgagcgcagcaccaacaccggcgcaggcggccgcaccagtacgaacgtaattttgtccaccacccgcggtgagctggtcattgcccccgccagcggcaagatcgacctggccgaggacctgggcggcgactacggaactacgttggtcatcgaccacggcgcgggcgtgcgcacgatcttctacgggctgagcgacattgacatcaaggccgggcagcaggtcaagcagggccagacccttgccacctgcggcaagaccaccgttgtggaaatgcgcatcggcaccgtccccatcgaccccatcgccgtctggcgtggccagtgcaacgggttgaagtattattaaaccattcgatttttcccgatcccatctgaggggtcgggattttttatttgcacgcggcgcaaaaggctcctctgggagggagctttttttgtatccgcaccattcgcctcaatccaagcatactatggcgaaagcacacccaaagggggaggaacagcctatgaaaaccttttgcgtggtggggcatgatgcccgccagcgggcggcggcgcagactttgcaggccgcggggttccgcatcatcgggccggaggccgcctgccaggccgattttgtcctgctgcccatgtcccaggaacgtgtcagcgatgccgtcgcccgcaccctgcagggagtacgccccggcaccctgctgctggccggacgccccggttcacccatccaggccgccgcccggcaggccagtctgccgctgctggactacttccagcggcccgagctggaatgtttaaacgccgtgcccaccgcagagggctgccttgccctgctgctgcaattgcgccgccgcaccatctgggaaagcgacttccttgttctcggctacggacgcatcggccgggcggtagcgcggcggctggacctgctgggcgggcataccaccgttgccgcccgcaatgccgtgcagcgggccaacgcccggtgtgcggggcatcgtgccgccccgctggaccgcctgcccgtgctgctggcaaagcatgataccgtcatcaacaccatccccgcgccggtgctgccccgcaaaatgctggaaaagctgccccgcggggcgctggtcatcgacctggccagcctgcccggcggcaccgactttgacgccgccgaagccctgggcatccaggccgaacacgccctggccctgcccggcaagtgcgcccccgataccgccggggcgctcatcgcccaaaccgtactgaccatcctgcaagaaagaggtgatctgcatgatgaaccggcctgacggcccccgcaccgtggcctttgctttatgcggcagtttttgcagcttttcggctgtgctgccccaggtgcgccgcctgcgggcgctgggctggcgggtgctgcccattttaagctgcagcgccgccgcgctggacacccgctttggcacggccgccgctctgcgcgcccaattgcaggagatgaccggcgaaacaccgctgaccaccctgcagcaggtggaaccgcttggcccaaaagggatggcccaggcgcttatcatcgccccggccacgggcaccaccatggccatgctggcagcgggcctcagcgccacgccggtaaccctggccgccaaaagcctgctgcggggcggacggcccgttgttctggctccctccaccaacgatgcgctctcgggcagcgccccggctattgcccagctgctgcagcggcggaactactactttgtgcccttcggccaggacgacagctacaaaaagccctgcagcctcaaaagcgatttcaccctcatccccgatacgctggaaagcgccttgcgcggtgtgcagttgcagccgattctgctgtaatgccggcgcgatttgtgacatataagtataggggcgagcagtgtcgcccgcagagccttgcgttgccgcagggtttacgggccgatgcaagcatcggcccctacagcaggccgtgtggctggatttgtaggggtggatgctcgcatccgcccgcgggcttgacacgctgttcgcccctacatcctctacaatttccacgcacagccagcgtaaaagggggtacccatgcaacttatcaccatcaccggcgggcagacgcttcacggccgcatacgacccgccgccgcaaaaaacagcgtactgccgctgctggctgccaccctgctgtgccgtacccccagccgcctgcgggccgtgccgcccctggccgatgtcgccaccagcctggcgctgctgcaatccgtgggtgccaaggccgaacggcaggggagtgacctgttcgttgcccccggccaagacctgcaaggggagattcccgactacctcgccggggccatgcgcagctcggtgttctatctggcgccgctgctctgccgggtgggcgaggtgcgcctgccgctgcccggtggctgcaagctgggcccccgtcccgtcgacatccacctggccgggctggcggccatgggtgcccaggtggaattggagggcatcgccgtgacactgcggcggcgcggaccgctccacggggtagatttcgccctgcgcctgcccagcgtgggggctaccatgaccctgatgatggccgcgacccaggcgggcggcacaaccatcctgcgcggggctgcctgcgagccagaaatatgcgacctagcgaactttctgcgtgcctgcggggcgcacatcaccggggccggtacgccggtggtggtgatacagggcggcaagcctttgcagggcaccgcctggacgcccttgccggaccgcattgccgccgccacctacgccgccgccctggcctgcgccgggggagaggtgaccgtcacccactgcgcccccgcctattatgcggcctttctcgactttttgcaggcggcgggcgtggatgttgcccgccaggataccaccgtcacgctggcccgaagccccgcccggcctttgcgcggcgggcaaacgctttgcgccaacgcctggcccgcctttgccaccgataccgcgcccctggctgccgccgtgctgctgaccgccgacgcccccagcgagatctacgaccacctgtttgcccgccgctttgcctgcgccgagggctttaccgccctgggggcaagatgctgcaccgccgggcgtacactttatatggacggccgcgcagccctgcacggagccgcggtgactgcccccgacctgcgcggcggggccgccctgctgctggctgcactgggggccgaaggcgtgaccctcctgcgggaccccggccatattccccgcggttatgccgatctgcccggcgatctgcgcacccttggggccgattgcatcacagaaaagacataatttttctacgttcctgccaaaaaccgggcatccccccggcccgtattggtggattctgcagtgatgagggcatttttttgcaaaattctggcgcaggtattgaaattgacaggaaaatttggtattctaataatcagttatatgcaaaaaatccacggaccagtgtgcccatttacagggcctgccctgggtcctgtgccattttaaacaaacacttagggggatacactcatggcattcgttcttgacgaagaaatgcaaaatgtgaccaacattaaagtcatcggcgtgggcggtggcggcggcaacgctgtcaaccgcatggtcgagtccggcctctccggtgtcgagttcgtcgcaatgaacaccgaccagcaggctctgctgaattccaaggccacccagaaggtccagctgggcgcaaagctcaccaagggccgcggtgccggcgctgatcccgagatcggccagcgcgctgccgaggagagcaaggatgagatctccaacgccctgaagggcgcccagatggtcttcatcaccgccggtatgggcggcggcaccggcaccggcgctgcccctgtcgtggccgagactgcccatgacctgggcatcctgaccgtcggcatcgtcaccaagccctttgcctttgagggcaagcgcaagatgagcctggccgagcagggcattgcctccctgatgatgcacgtcgactctctgatcgtcatccccaacgagcgcctgaagctcatcagccaggagcgcatcaccctgatgaacgcttttgaggctgccgacaacgtgctgcgtcagggcgttgagagcatctccagcctgatcaacattcctgccttcatcaacctggacttcgcagacgtccgctccatcatgaaggacgccggcttcgcccacatgggtgtcggcgtcgccaagggcgccggcaaggccgagaacgccgccaaggctgccatctccagcccgctgctggagaccagcatcgccggcgcacgcggtgtcatcatcaacatcacttccagcccggacatcggcctggaggatgtcgagaccgctgcctccatgatcacccagtccgcacatcccgatgccaacatcatctggggtactgcgttcgacgagcgcctgagcgacgagatgagcatcaccgtcgttgccaccggcttcgagagcacccccgaggtcgacgagcccatccaggcccatgtcgatgccaagcgcggtgtcgcccctgcccccgccgtccagcctgttgaggctccggctcaggccgaggttgcccagcccgcacagcgcaccgctgccccgcagcaggacatcaaccccgtcatgcccaaccccatcttcacccagtcctttgacgcccagcccgctgccaagcaggccccggccgaggaagaggatgacggcgattacttcgacgatctgctcagcatcctgaacaagcgcagctgatcgcccctgactttaaattttccgcgagaggatgtaaaacgccatgccatctgattccatgaacatacaggagcaggggttccgctcccgtatgtttggcggcttcgataaaaatgatgtcctggcgtacatgaacacgctcgccaacgaagcccagcagcacgaactggaataccaggaaaagctgcgccagcttcaagcccagctggatgatctgcgcagccagcgcagtgatgccgaagcccgcatcgaggccctgaaagccgagttagctgccgccaaccagcgggctgacctggccgagagcaaacgccacgaaagcgacgagcagctgcaaaaagcacaatccgtcgctgaaagcgtgcagagcgagcaccgggagatccagaaaaatgccaacatctggcagctgaaatgccacgacctgcagcaacagaacgaaacgctgacgcagcagttggctgcagcccgccagttgaacgcagccccggcccccacgcccgatgtagtgcgggaagccaagctggaagcccagaaaattctggccgatgccaagctgtatgccgagagcgccgaaaaggagctgaagcagcaggccgacacccagaagtcccgcatggccgagaatgcccggggcattgcctccggcgtaatgctggtgcgcgaccgcctggcacgggtggatcagcgtttgagcgctgccactttggacctcgataacctgactctggccatctaccaggcgttggatgagaccgaggccgagttgaaggagctgggcgtggaaatgcgcgattatgcccagggcaccccggagacggatattcccgtggagccgttgcccacggaaagtgcgcccgccgcaccggttgtgccgcagcctgtaccccagactccccagcctgcgcagcagcctcagccccaggccgcaccgtccaagccggagaagttccgggtcaaggcaacgccgcaccgtgcgcccgccaagccggtacgccgcctgcgcagcgtgaaccgcccagtatcccagctattgcaggatcagatcgaccgcatgggcgataaccaataatttgtacataaactccccgatgaagatcggggagttttttgttgcctcacgctccacttctgtaggggacgatgctcgtcatcggcccgaaacttttccccatttccctgtaagattttctccgtcccgcttgtctataagagtgaaaggcgccaaaacaaaaggagttgaagctcatgcaaacaaacaccacgcccacgctgttgcaggccatccggcaggacccggataccgggctgcggtgggccatgcgggactacgccgcgctggtgcggggcattgcccgccgcatcctgcccgggcacgaccgagatatagaggaatgtaccgccgatgtatttgtggcgctgtggcgcaatgccgcccggctggaggccaccggcacaccggtgcgggcctggctcatcgtcacagcacggaataccgccatcaaccgttaccgcgccttacagcggcacgacactctgccgctgaccgatgaactggccgccaccatcgccgacctgcccgccgacccggctggggatgccgccgacgagctggccgtgctggtggcagcgctggagccgcccgaccgtgagatatttctgcgcaaatactacctgatgcaatccagcagggagatcgccgccgcgctggatctgcgggtatccaccgtaaacacccggctgagccgcgggcgcgaccgcctgcgccgccaattacaggaaaggggttatacacatggttgatctgcatacattctggaacgagcttgacgccctgcccaccgaggaaacaccgctgaccgccgccgaaagcgaccgcctggccgatgctgtactggaaaaagtacacgtcgaatccggcgaagcaccgcgcaaaaaatctgtacaccgtgcaaaatccgccaagcgccgccgcgttcctgtctggggcagggcactggccggagtcgccgcctgcatggccgtactgtgtggggtcaatacagtgaatcctgcgctggccgagggtctgccctttgtgggggatgtgttcagtttcctcaaccagcatgacagcaaaaaccaactgaaaagcgaccggctttccggctatgcccagcaggccgcagtgcctgccgtaccggaaagccagagcgagacaggggagagcagcaccgccagcccctacaccctgacgctgaaccaggtctactgcgacggcctctacctgcgcatcggcctgacgctgaccgccccagacgggaatgacagtctggcgggttacgactggctggcccagaatccgggcggcgaaggctggatcgagatctgccaggcgcaggccgacggcaccctgctagcgaacgggcaggccctttacccccagaacggttttgtgtttgaaaaagtggacgaccacacctacgccgccgctatggactatgacctggcggactacaacggcgacaccgctgccatcgactgccagctgaccgtggcgggcttgaccggcgtgcagaatgcctatgatgccgacggcagctatctgcgcaccatgctggatggccgctggaagctgaactttaccgcctcgtccggcgatacggccaaccgtatcggtacggtttccgaaccggaagtcaacggctatacgctgtccagtgtgattgctgcccccggcgagacccgtgtaacggtacagctatcggcagatacccccgaaggcgccacgctgcagctgttctccgcggatggccaaaagctgcaatgcgccagcagccgccccagtgcagacagcagcaccgtcagctacgactttgacgctgcccccgccgatgccgccggtctgaccgtaaaactagtggataaaaacaccgatccgctggtcgagctggcccagtgggacgtcagcctgccgacggaataagccctgccatgaggcccacaaaatttcctcttgcacccgcctgtgctctgtgctatgattagaaaaaatggatgtatgcgtctgaattttgtgcaagatgcacgattttggcagcatccaaagtaagcaggaggtttttacaatgcttggatttacctattacaccccgaccaaagtcgcgttcggcaagggttcggtcgaaagagtcggcgagctgatgaagcagtttggcggcacccgcgtgctgatccactacggcggccagagcgctgtgcgttccggcgtgctggaccgcgtcaagaagtcgctggatgaggcgggcatcttccacgtagaactgggcggcgttgtgcctaacccgcatctggccaaggtgcgcgagggcattgagctgtccaaggccaacggcgtagacttcctgctggctgtcggcggcggttcggtcatcgactcctgcaaggccatcgcttacggcctggctgagccggagcatgatgtctgggagctgtacgcgggccagcgcaaggccaaagcctgcttcccggttgcatccgtgctgaccatcgccgccgctggctctgagatgagcaacagctgcgtcatcaccaacaccgacaccgaggaaaagcgcgcctacgacgacgacctggcccgcccgaagtttgccatcatggaccccgaactgaccatgaccctgccggactaccagaccgaggccggctgtgccgacatcatgatgcacacgatggagcgttattttgtcaacagcggcacgatggaactgaccgacgcgctggccgaaggcctgctgcgcaccgtcatgcacaacgccgaagtgctgcacaccgacccgcgcaactacgatgcccgcgccgaggtgatgtgggcgtcctctctggcacacaacggcctgactggctgcggcagcgacggcggcgactggatgccccacctgctggagcatgagatgggcggcatgttcaacgtcacccacggcgcaggcctggccgcagtctggcccagctgggcgcgctatgtctacaaggactgcctgccccgctttgtgaagtacgccgtcaacgtcatgggcgtgacccccggtgccaccgatgaggagaccgcgctggccggtatcgccgcgatggaggagttctatcatcgcatcggcatgcccgtcaacttcaaggagctgggcatcgaccccaccgacgagcagatggccgagatggccgccagctgcgcccgcgcctgcggcggtgccaagggttccgccaaggtgctgcaccagagcgatatggaagctatttataagatgttgaagtaattgattgtttttgtagaaaaagcaggtcccgtcatatggcagggcccccgtaaaacagtattttgacctgataacaagaaacccagaactgttggctgaatcagctgtgcagttctgggttttctattgtttatgagagcacgaatcgttccgtggccacaaattttcaatttttgccccgcggacagtttcttgttggggcgtacctgccccaacccctgccgggaacgagtacggtaaactggaagttgtcaagcaattatttgtccttttcca

SEQ ID NO: 7835 - DNA, 3448 bp, Unknown
  gut microbiota DNA sequence
cttttaccaaataatcccatagtgtttttcctttataactttcgatttagatgtcatctttcttacggtgaacagaagcctgtgtatcaaaaccgtttgggaaacgtctgtgcagtttgtcaagattctcttgaaatacggtttccaacggcacatccaatgcggtagctgcttctgccagataccatgctacgtcgccaagttcctttatcagatgttccttgtccaattcgtgtccctgcatcagccattttttcacaatatcaattgcttccccggattccccgcataagcccattacgctgttgataaggacgtctttcctgtcaagcgtaggattcaaggtggtcattgcagacttctgatattcattgacatccatttacgattccccaaaatacaacgcaagcaagaacggactttttgcactgtgcgttctccggctttcgatttatgggaaaaaatccccgcggtaaacaccatcaaattgttaaataaaaaacaaaaaaaacggaaagattcaaaactttctcaacttcctgcccagtatagtttaacagatttttgtgcaaattgcaataggtgatgcaaaaaagtttgtctatttttcggctaaactatttagcatttttttaacaaactactggaaattcgttttgcagtctgttataatggactacgcaaacatgatatgtgatgcaaaacaagtcacccggtgatgcagaaaacatcacccaaattgggaggtaactatgagcaagaaattcttgtatctgttcaaagagggccacgatgccttcggcggcgaccagaccaccatgaagaatactcttggcggcaagggcgctggcctggcagaaatgacccacgccggcatgccggtaccgcaaggcttcaccatcaccaccgaagcctgcacccagtactacgctgacaaccgcgagatcaacgatgagatcaaagcggacatcttcaaatacatgggcatcctggaggagcagaccggcaagaccttcggctccatcgagaaccccctgctggtttccgtccgttccggcgcacgtcagtccatgcccggcatgatggacaccatcctgaacctgggcctgaacgatcaggctgttgagggcctggccaaaaagaccgacaacccccgctttgcttatgactgctaccgccgcttcatccagatgtactctgacgtcgtcatggagctgggcaagagcttctttgaggagcgcatcgacgccatgaaggtgcgcaagggcgttacccaggacgttgagctggacgccgaggatttgaaggaactcgtcaaggagttcaagcagatctacctggagaagcagggcgaagagttcccgcaggaccccaaagagcagctgatcggcgccgtcaaggccgtcttccgctcctgggacaacccccgcgccaacgtctatcgtaagatgaacgagatcccctacgagtggggcactgccgttaacgtgcagcagatggctttcggtaactccggcatgcgttccggcaccggcgttgctttcacccgtaaccccgctaccggcgagaagaagctgatgggcgagtacctgatcaacgcccagggcgaggacgtcgtcgccggtatccgtactccttctcccatcagcaagctgcatgaggagatgcccgaggtctacgatcagttcgttgagatcgcaacccgcctcgagaactactacaaggatatgcaggacatggagttcaccatcgaggatggcaagctcttcatgctgcagacccgtaacggcaagcgtaccgcccaggctgctctgcagatcgcctgcgacctggtggacgagggcgttatcgatgaaaagaccgctgtcctgcgcgttgagcccaagcagctcgacaccctgttgcacccgcagttcgatgccgctgccctgaaggccgcccaggctatcggcaagggcctggccgcttctccgggatctgcctgcggccgcgttgtcttctctgctgaggacgccgaggaaaaggtcaaggacgatgcctggaagaaggtcgtcctggtccgtcttgagaccagccccgaggacatcgtcggcatgcaggtctctcagggtatcctgaccgtccgcggcggtatgaccagccacgctgctgtcgtcgcccgcggcatgggcacctgctgcgtttccggctgcggcaacgacaacaccgttgctatcgactatgatgccaaggtcatcaccatcaacggccataccttccacgagggtgactggatgagcatcgatggctctaccggcaacatctacgagggccagatcgctaccgtggcttccaccgagaatgccaacttcaagcgcttcatgggctgggctgacgctaaccgccagatgaaggtcatgaccaacgccgacaacccgcgcgacgcacagaacgccgtcgatatgggtgctgagggcatcggcctgtgccgtaccgagcatatgttcttcgccgaggaccgcatcgccgctgtccgtgagatgatctgcgctcgtactgttgaggagcgcaagaccgctctggccaaggtcgagccgttccaggaagctgacttcaccgctatgtaccgcatcatgggcgaccgtccgatgaccatccgttatctggatccgccgctgcatgagttcctgcccaccaaggccgaggatatcgaggctttggctaaggacatgggtatgaccaccgaagagctgaacaacgtcgttgtcagcctgcacgagttcaaccccatgatgggtcaccgtggctgccgtctggccgtcacttatcccgaaatcgctgagatgcagaccaacgctgtcatcaaggctgccatcaaggtttctgccgagactggcaagatgatcaccccgcacatcatggttcctctggttggcgaagtcaaggagctgaagtacgtcaaggacgtcatcgtcaagactgctgatgccctgatcgccgctgccggtgttgacatgaagtacgaggtcggcaccatgatcgagattccccgtgcagccctgactgccggtgaaatcgccaaggaagctgacttcttcagcttcggcaccaacgacctgacccagatgaccttcggcttcagccgtgacgatgctgctaagttcctgaccgcttactatgataccaaaatctacgagagcgatccgttccagcacctggatcagatcggcgttggcaagctggtcaagatggctgcccatgacggccgcgagaccaaccccaacctgggtctgggcatctgcggtgagcacggcggcgatcccagcagtgttgagttctgccacaacgttggcctggactacgtcagctgctctccctaccgtgttcccatcgcccgcctcgccgccgctcaggcagcaattaaaaatccacgttcttgaatcacgtagatttttacaattaaatgtgg

SEQ ID NO: 7836 - DNA, 12208 bp, Unknown
  gut microbiota DNA sequence
gtggaaaagctggaatgtcccagccacatctgtacctctttcattgtgactttgttcttgattagcaagctggcgcaggagtggcggaggtcgtgatagcgaatcgggcggaaaccattcttcaagagcatttcgcggaaaacccgtgtcacatagtccggggccacaagataccagcaccgtaatctttaccgtcagcgttgatgaaacaccgcccccctaaaataaaacagcaccagccgtcacgtctccgtggcagctggtgctgttttataggcacaacgacagcagcgcccgggcggcacaggaagaaaagcccctgctgcagctttcaatggcgctgacgaatgaatggcaaacgggctttttgcgctcgaaccagcagaatatgcgcctttgccaattcctgattccgaaaaaatagcgcattacagtattttgcgcatctcctgcacaagatcggcaatcacgatgggcttggacaagaaaccgttcataccgctttccagggcgttgcggcggtcctcatcaaaggcgttcgccgtcatggcaagaatggggatgcacgccaagacagggttttccaattcgcggatgcggtgggtggcggtgtagccgtccatgatcggcatctgcacgtccatcagtaccaaatcgtactgccccggcgctgcggtgctgaccttttccacggcgaccgcgccgttttcggcggtatcgacctcaaagccataggcgttcagaatctccacggcaatctcgcggttcagctcgttatcctcggcaagcaggatgtgcttacccttaaagtcggtagtcttttggggcaacacgccctgctcctcctgcgcctgcttctgcccgatggcggtcatcagcgtgtcgcgcaagtcagacataaacatcggcttggagcagaacgccgtgacaccggctgcctttgcctccacctcaatgtcggaccagtcataggcggtaaggataataataggcgtatcatcgtgcaggctgcggatctggcgggtgacctcaatgccgttcatatccggcagacgccagtcgataatataggccttataggtatcgcccatctcgatggactgccgtgcgcgcagcactgcctccttgccggaaagcgtccactcggcacgcatacccaccttgaccagcatcttggttacgccgtcgcaggtgttgaaatcatcatccaccaccagcgccttcagaccctccagctcggtgatttttaccgtcttgcggtgttcttcctgcacgcgcagcggcacacgaacgataaattcagagcctttttccggcgcggtctgcacctcaatggtgccgcccatcatatccacaatgtttttagtaatggccatacccagcccggtgccctgtattttgcttaccgtggaggttcgctcgcgctcaaagggttcaaagatttttttggcaaactccgggctcataccgatgccgctgtctttgacgcggaactcatactgcccgcagccgccgaccttgccggcgagctggcgcacccgcaccgacacggtgccgcctgcgggggtgaacttaatagcgttggacaaaaggttcatcagaacctgattcagccgggtcttatcgcaatagacgtcctcatcggtaatatccattgcgtccatatacaaatccagctgctttgcgtaaatctgcccgctgacgatggtttttatgtcgtgcagcacatcggacagattgacctccgtttcgtccagctggatttttccgctttcgatgcggctcatatccagaatatcattgatgagcgaaagcaggtggtttccggaggccagtatcttggtaaggtattccttcatgcggtccttgtcgtccagatggctgactgccagcgtggtaaagccgatgatggcgttcatgggggtgcggatatcgtgggacatattggaaaggaaggtgctcttggcgcggttggcgttttcggcggcggcaacggcatccgagagggcctggttcacctgcctgtcggcggtgcggtcagacaaaaccaaaatgtacttggtttgtccctcgacctcactgcccatggcaaccacatggaaccagcgccgttcccctgttttctgatgtacatactccatgtcccattcgcgctgttcgccgcccgcaagcccttccagataatttttggtgcggtcggggaaatccttcgggtgcagcagcgccaaggtattgatattttcgcgcacactctcccgcgtcaaacccagcagccgttccatgttcgggctgatataatctgccttgtaggtttttgcatccagcatcaggaaaacgtcgtccacgttttgggacagcttttggaacagctcgtcccggcacagaatctcgtaatccttgcggcgcagcttgacgtgaccccagcgcgtaaccagcagaatgatcagcacggcaatcgtcaaaacaatgccggttacaatctgcaccgtgcgcagccaaagctgattcataccggcattgacgacatctacggggacaatgcccgccatgatccagttctggacaccggcgctctcgtagaccagatagtatcttgtgccgcccagcgtcacctcacggtttccgctggcaccttttgcaaagtcgctgacaagctcttgcatctgcgtctcggtaaggtcggaataatcgcgcagtaccgcaacaaggttatagatggattcctcgccctctgcaatatcttcaatcacgacctgcccatccgggtagatgacatagctgctggcagcaccgccgaaagccgattcgtccacagttttcatcacgtcggcattgtagcggctgatggcgatggcatcgtaggcaaagccgcggtaaacacccttggtttcagggcagataaacaccagcatcgggtcctgccccggcaaagccgcattcatcacaacgtcgtcctgatcggcaagcagctcgtccagattgctttgcaagccaagatagcctgtttcaccgccgggtgtcatgtagttgccgtcgtaagaaagaaagtagaatccggcaaagccaagctccttctgcgcagactccagatacgcctgcgttccggcatcatcggggttgctgtccaaaaagccgttccacaaatgcagataggagatgtttttgttggcgatcatgctcagcatactgttggatttatgcagaatttcatccagatgcgcggtgctttcttcgtagacggttttggatacaaacgaaaggtactgcacgctaaggcagacaaaaaacgcgattgccagcagaacagcggcagccgtcagccttttgcgcggaaaacggcgctttgttttcagttttcgcttatcatcttccatagcgttttacccccccctaacgtaatatagctttccggcgcggcaagcatcacgctgccgctgcaaaccgcatcgctccaagtgtttttgaccgtggcttccccgcgctcaaacgcgccggtttcgtcctgtagcagcggtgccatctgcttttctgtcgccaggcaggtcacggtaacggtatcatcgtcccgcaggggctgcccgctgcgggtaacgccggtcagcgtatagctgccgtcgttctcctgtacctgcagggcgatgccgctgaccaccggcagggaaccgcggttgaacggggtaaagccgccctcgcagccctccacaaaggcgcgcagggtgtccttcagctcggcgcccgtcatggtgcgctggtacgacaaaagcccgttgggcatgatcatggcgcgcaccgttgccttggtatagtcggcctgcagcacgctgccggtgaagctgctggcgggtgccaccaacacatccgtgccgtaaagcccgcgcagcgtgtttgccataaccgagaaggacgcattgccgccgtttttgtggaatacattggaataggcggtttcgctggtcagtacaacatcgcttgtgtcgggtttttcccctgccagaagctgggcattaaacactcgataggcttgctcggcatcatattcgcccgcgatcatcttggagaccacatcctgcgagatggcaaagaaatcgttggaggcgatgcggatatacatgtggttttcttccaccaccgagcgcacgtccttcatggtgtcggtcaggtggtagcttacgctctggctgtagctgagcaggtcctgcccttccgcaaggatctgttcctgcgcatcctccgacagcataacgtgcaggatctgcatcgccttttcgcgccgggtgggatcctgctccaaatcgcggttcaatgccacttggaagtagggcgtggtcatcagccacttttccccgttctggctgaagatcggcaaaaaggttgcgtcaataccctgctcttggaacatccctacaccggcggaggagccgaagtacatggcaagctgcccgttgccgaacatctcgaccacgtcatcgtaattcagctccagatccgccgccgtaagacctgtgtcctggatgaactgctccatacgctcgaagccgcccggccacacggtatcgtccagcccgacacgggtgttgttggcggggtcgctgtaggcggtgcgccatttgcgccctgctatggtcgtaagctcgccagcagaaagcccctgcagcgtttccatgcaggtgtagtcgtacagatagtcggcggtaaagccgcggatgcccacttcctcaaaggccttacaggcagcgacaaagctggcgtaatcggtgggcagcgggatgccgtactgcacaaaaaggtcgcggttgaccacaagaccgtgggcatcggcgcatacgggcagccagtttacgctgccgtcctcatttttgaagctgttgaggtaggtattgtagatggcacctgcctcgttggtggtagcaaggttcatcaggctgtcctttaagggggcagcatcgtgcagggagaaacggcagcaggtaataatgtccggcagaccgccgttttgctgcaaaaacttataaaagtccaagtcgttgttgcctacgataaactcaatgtttacatccggcagctgcgactgcacgtagggggcgtacttttcgtacaggttgttggtccacagatatacctgaatggtttcggcgtcctcctgcgcctgcactgcctcggtgctttttccggcgcatccggtcagcagggacaagctcagcaccatggctgcaagcagggcaaaaactttgtacagtcgtttctttttcatccaatcgttctcctcacggcctgaagacagcctgcccttatccggcaggctgcccgggctttttaacaataccatcacgacctataaaaatactgctgtaatttctttgcggggttcctgtttcgtgcgccgcgttctgcaaagtgcgcgggcaatgtcagacagaataatttaaatcttttatcatgataacgacaagattccaacatccattccatgtttttataaacacattcaaaaattatacaattgtcaaaatgttgacagccgcgcctttgcttcgccggttatcgaatttttatctttaccagaaaccacctgccttgatttgcaaaaagctgtcatgacttattcagatttctcgcaatgactttggctacctctgccacattaagaggcttggaaacatgaccgttcatgcccgcatccagagaggtctgcacatcctccgcaaaagcgttggccgacagtgcaatgatggggatttcttctgcatccgggcgttccgcctgcatggcgcggatggcttttgctgcctgcagtccgtccattttcggcatcataatgtccatcaggataatatcataggtacccgccgggtgatttgcaaacaggtcgacaacctcctgcccgtccgccgcacgggttacgatcatctccgaatcctctaacagtatcgcggcaagctcggcgttcaaatcgttatcctctgccagaagcaccttgatccctttcaggcttttgcgctttgccggcttctttgttttttcgaccttttcagagcttgtcagctccatggggatttccacggtaaaggtcgtgccgactccctttttgctttccaccgcaatggttccgcccatcaattctacatatctctttgcgatgggcatacccagacctgtgcctttatactgcgttcttgcgtcgtttttctcctgttcgaattcgtcaaagagctttgtctggaattcctcgctcataccgacaccggtatcctgaactcgatagcaaaccaccctgtgctgtgcatcggctcccggacggttgctcacatctagacggatcgtaccgccgtcattggtgaattttacggcgttgttcaggatgttgaccagaatctcccggatgcggacaggctccgtcatgacatagggattttccatcggttcacggtgtacctcaaagttcaggctccggttcagaagggtaccttttatgatctcaattgcactatccgtaacggcggtgatatctgccggaaccggggagaataccacctttccgctttcgatgcggctcagatccagtatatcattcaacagggacagcagatgatccgagctgtcctcgatttttttcaggcagttgtggatttcgggtacagaatcctgatgcaacgcgatattcgtaaagccgatgatggcattcatcggggtacggatatcgtgggacatattggaaaggaagacactttttgctttgctggcggcctgcgcctgctctgcaagggtggtcatttcttctgctttctgctgggcggcaagctgtaattctctgcgcgtctgcaaacggctcataataatgatcagcgcgaccgccatcaacgcgataaatacgacgataaggacagccgcaaccggatgcaggcggagcatatctgcaaaggtcagattggtcgctttatatgcggtgtactgcgccgcaagatcctcgacaagattctccggcatcgcgtacattgcctttgtcaggatacctgccagcgcgtgattttccagggaggaaaccaccatgcggtagctgaaggtgggctgttccagcggcgtgtaggtcatggtgcctgtcgtgtcgccgttgataaacgcctgcgccatataatagtagacaaacgctgcatccgccttgccgtcacggacagcctccatcatctcctgacgggtactgcacatcagtttttccgcaccgggtgccaatgcatcttcgatcgacttggccacggtctgattgaccgtggtgacgacatggatgttcccgtcaaaatctctccgcgtcacccttgccatgcgcatcgtgatatagggtgcggtcaatccccatcctttggtttctgcgtaattgtccgtatccaatcgtgcatcaatgctgatgtctaccgcggtcttatcgctttgatacgcgatatattcatctctggttgcggggacaagaaattcataggaaagcccggcatagtccgctatcttccggaaatagtccgggagaatgccctttaccttgccatcttctgtataagaatagggataccgggtcgggtcgcacaggatgtgaaggggattgtccttggaatattgggcgatgatgcgcttttcttcttccgtatactccagatttttggcatcagcgctttcgtaatttttgctatagagggtcgttttccagttgccctcggcggcgttcatctgatcgattgcataatttacctggttcagaagctcggtatttccttttttgacgatcacataaaaatcactgctgccgaatttttcaaggatgcgctcgttgtttatcctgctcagggaactggtgacaatggcatcgaccgttccgttctgaagggcctttgccatctcctcagtcgaatcgaaataaaccgatgtgtaggtaaagcctttggcctgtgcatactctgcaaattcaacattccgggagtttccgttcaggagtgcaacacgcatcccattgtaggtactgtattgcccctcaacgatagcagtattatcgccgcgaatcgtcaggatatcgttgctggttccgatgggacgggaaaaatcaaacaattcttcgcggtcaggcgttttgctggcagaagtgaccatgtcgatctcgccgtccagcagcatctgctgcatatcctcccagcttttgtcatagccgatgtactcatagtctgcatcccaatagcgcgccatcaggcggaggaaatcatagccgtaaccgctgcggtttccatcttcatccatcatgtgatagccgtccatcgcaaaaaagccaacgcgcacgcgctcatgctggctttccgcctcttccgcacgcgccgggaaagacagcagcgccgttagaatcagcatcactgtcagaatggccagtttcctgtaaacaccggctcgctttataagattcatagtacaatcccctctacctttatatgtatggcgcctaaaaaaacaaacaacgctttcaaggtatggcgaacccatacctgaaagcgttatctaaccttataaaacaatatttgcgggtaaccgaaaacggcagagcattatagttgctctgctctgctccgctctgttctgtggtcagcatatcgctgtgcattcacccttgtcaacccatgttttcaaaaaagaacacaaagctactgatgacagaaaaagcaacaatttcttgctggcaactggctgacccaatgggtccctatagctttgcgtcgccggcttgcgccgggtttgcttatgaacttggatgcaggtattataccatataagtcgtcgatggacaagtcaaaaatcataataaattcaaataaattcattctttgctgcttacagaaaagttgtaccggaacacattgctgtttgaaaaatgggcggcgttggtgattctatcatctctctgatgtcgcctcgcccggcttggtcgtgatgagcttatataccgccgtgtccttgggttccagatgggaagattggcttgtaagtcagaatcacttctatataaaccaaaaagccgccggggatgccttccaaaaacgggaagactccccggcggtattcgtttataggttgtattgcggtctatgggtcgttcttatatacggcaacctttatacgacgactttctgtccgcatcaaaggtatttccgcagggtcgatacaagaatgttcatatcgatcggctttgcgatatggtcgttcatcccggcatccagtgccgcttgtctgtcctcggaaaaggcgtttgccgtcatcgcgacaatggggatattcgccttgtgggggtcgcccatccttcgtatttttcttgtcgcatcgtagccgttcatcacgggcatctggatatccataaggataatctgatacgttccgtttgccgccttttccagcatatccacacattccacgccgtcttttgcacggtctaccgtgcagccttcctcccgcaatagctcggcagcaatctccgcattgaggtcgttatcctcggtcagcagaattcttgtaccgcacaggcactttttgtctgaggggttgatctctcgctttgcctgtgcttcctcctcggacgcaatgcggctgggaatggtcacggcaaacgtggagccgacaccgattttgctctccacctccacggtgccgcccatcagcccgaccagctttttcacgatgcccatcccgatgccgctgccttccaccttgctgacggtggacgtgcgttcccgttcaaacggctcaaagatacgctgctggaactcctgcgacatgccgatgccgttatcggcaactgtaatcaccgtatcgcaccagcccgctttttcgcagggcttctgcgtaacatcgcagcggatcgtgccgccggttcctgtgtatttgacagcgttgctgacaaggtttgtgcagacctcggtcaggtgcgggacatccgcatagatatacgggtgcagcaagtgcgtggtcaccgtaagcgtctgattcttgctgtctgcctgattccggaacatggcaatgcaattccggaaatccttctcgacatccgaaaccgaatactccatctccgtcttatcgttttcgatgcgggcaaggtccagcacattgttcagcagcatcagcaggttctgcccgcacacctgaatgttcttcatgtattttttcagcttggcagggtcgtccgaatgtcgggcggccaagtctgcgtagccgataatggcgttcatgggtgtgcggatgtcatgcgacatattgaacaggaaggtggatttggcgcggttcgcgctctcggcgttttccgcagcgatctgcaattttgcattcagctcctgcgtgtcgttggcggcttttcttgcggcagcctcggctttgcgcgccttttgaagcagcttcaggatcgcgagcagaataactgccacaaaaatgctgctgaccagcagaaccataacgaagttgtcccttataaactcgccaagggtaaccttccgcgcggcgcttttatacatcgccagagcgccggtaagcatattggccggcatggccttgattgttttgttcaggatggacagaaggatgccgtttccgctgttgaccgcaaagcaggatttggcggggtttggcagcggaacactgtaaaagtcgtatttcttgctgtaattttcctggctgctgacccctgtgacaaagcagtccgcctgtccgtccttgaccagctttgccgcgtcctcctgtgtagcacagtccacgatttcccactgcggataataaaccgcaaggtatcttgtcagcgagagcctgttttggggaacggcaacgcggttcgtttggttttcgttaaagtgctgtttgttcgtgaccgccatcatgttggaggtccacgttgtgttggtgcaggcaacgcggtactcttccgccagattgggactctggtcgaaatggaaaaccatgtcgattttgccagatttcagcgcatcgagttccgcttctttgctgtcataaccgaccatctggaattccagttcctgattgcccagacaatctttggcaaactgaatatagtcggtgattgtcccggtaatctcccctgtggcagggtcataggtgctgacgccgctgtcgcttgtcagaaagcccatcttgatggcaccgtgttctttgacccacgccttttcctcgcccgtaaggatgggggtataatccagcgagaaataccgtttatacagatccgctatataaaaaggctccgattcgtccagcgcgcgcattgcactgtccagttcttccttgatgtcggggcggtctttgttgattgcatagtagatgccggagcttcccacgcgggttatggtcgagatgccaagctctgcccagaaggcttcttccagcgaaacaaagcagtcgatttcgcggtttgccagcttttgctttacatcctcattgttggcgatgttgacgtgctgcgttttcaggtcgtatttttcttcccactcggtcagcatcacctccggctcggttcccatcagaacgccgattgttttgccgttcagcgttttgaagtcggaagcggtgatgtcctcgcgcgaaagatcggcgtagaggtagtatttttcttcgcccatcggctcgtccgaaaacagcatttcctcggcgcggtccggcgtataggaaatatcgcccataatgtcgatttcgccgtttttgagtttttcaaagcagtcggaccagtcgcagctcacatactcgaactgccagcctgtatagccggataaggtctgcagcaattcgtaaccgtagccctttcttacgcccttctcgttgacatagttgaaggtgtcctcaaacgagccgacacggacgaccttggcgggggcggtttctgcggcagccttcacggggagcaatgctgacagcaacagcagcaggcacagcattgcacagatgcttttccttatcggggtctgcatggctttgcgcgttccggagtttttcattctttcccatctttctccgctgatttcaaaataccatggaagcatcatccccgtctggttgtcagcagcttttttgaacagtatataccaacaaatacaatatgtattatagcattgccgcagaatcgtttcaagatttttttcgttatttcgttatgtggatatgaaattataactaacggttgagccggtagcatgat

SEQ ID NO: 7837 - DNA, 1625 bp, Unknown
  gut microbiota DNA sequence
agcatagcgtttggatatattgccgtgttggacatcgccgcaaataagctgtacaataaggggtatggggtgcaagccccatattggcggcaagacccgccgcagaacctcgcccagacatcccccacgggcgggtcgcggcagtgcaggacttttccgtgcctgcgtgtttctattctatcagctaaaccctcgcccctcggagagggcagggcgggccgaacaggacccgcccgtttccctggctcatcctcgcccacctgcggcggacgtcaaaaaaatatgtaagacgaaaactgccgttgcgcggcccaaagggacgcggcggcagtttttgcgtagaggtgaacagctatgtatgaaaccccacgaaagaaaggccgaccattgaccgagaatgagcgcaatctgatttcgcatcttctgcgcctaggccacacgcaaacagatatagctaaggtaataggtgtgtacccgtccaccatctgccgcgaactgcgccgtggcgaggtcgaactactgaacagtgacaagtggatatactacaagacctattcaccccaaaaggcccagatgcaggctgactacatgaaaaccgcccacggcccagacctaaagataggcaatcggcgagactacctcgccgcactggaggcctacatgctgaccggctccagtccagaggacgcaatatcgaaagttggcgacgattacggcatccgtataagcaagacgacctgctaccgctacataaaaatgcgccttttcccatccctgtgctataagcacctgccacaaggccacccaaagaaaggcaagggccaggtgcaccgctccaacgtggcacacccgggccaccgaagcatagagcgccgagcatacaccatacacaccagaaaggccccgttccactgggaaatcgatagcgtggtaggcaaggccgagggcaaaagcgaaagctgtttggtaatgaccgagcggacgacccgcgccgaaatcgtcctgaaggtcaaggataagaccgccgccgaaacggtcaaggccctgcaacggctcaagcgcgagattggccgcgattggtacatgatcttcaagacgctgacctgcgacaatggcccggaatttgctgaccaggccggtatagatgccctcggcgtgactacgttctactgccatccgcaagccccgcatgagcgcggcacgaacgaggtcacaaacaagctggtacgccgtaaactgcccaaaggtaagagcatggcaaaagtaacgcagaaacaggccaccgaggtacaacactgggtaaaccattacacccgcccgatgttcggcggcaagtctgccgccgataaactccgcgcggaactggacaagctaccgctgtataaccgcgccaaggtgtaccggttcttcgacctgtagccagacggcccaatagccctacacagcccgccacatagtgacgggctaaaagtgttgtgcaaaaccaaacaccgccccatagccaagccacggggcggttgaactgtgtctcaagcaacatttatctattgacacattgaaatttattgtctaattttgtcacaaacccttgacagtagcaatcaccttgcaaactacattgcaag

SEQ ID NO: 7838 - DNA, 4280 bp, Unknown
  gut microbiota DNA sequence
cccgctggacaccgtgaccattatgctggccaccaacgacagcaaggcgcggttcggctgcagttcctatttaatagcgctgggcatcacccggctggtgaaaaaagccctgcgcactgagtgctggcgcgacaacgcccacccggacgtgctggtcatcgtgccgccgtccatcacgccggagtatgacaagctgaaatttcgtgaggagatgggccccggttgtcatgagcggtgtgccggcatcgccgcccagctggagccgatgctgaaaggcctgcccggcgtgcggtttctggacgccaacctgctgcccagggcggggtgctcccctgttgacggcatgcacctgacgccggaggcccataaagcggtggccgaggccttgaaaaatgcgctgacaggcgttacactattatagtaagggttaggcgaccctcagcaggaccgcaaaaccgagggaaaggaatcttcatctatggttgagcagaatttttgggagatgctgcgtgccaagcacgacagcctgacaaaatccggcacgatcgtggcggactacctggtgcagcatgccgaggacgcccagtatttatcgatctcctcgctggcaaaggcgtgcggcgtggccgaggccaccattttccgcttttgccgctccctggggtttgacggctacaacgagatgaagattgccctggccaaggccaacgccatgacggtgccggtggcattaaagctggaacccggcgtagatacgcagattttatgcacccatgcctacaatacggccatcgaggcactgaacggcacccgcaacgcgctggaccccgatgccatcgaccaggccgccacgctgctgcagcgggcacggcaggtgttctgcttcgggcagggcggcagcagcctgctggcgagtgacatctgggcgcggtttgccaccatctccacgaagttccataccagcggcgacagccacatgcaggccatcgcggccagcctgatggggccggaggatgtggtgctgttcgtttcctactccggcgcaacgcgggacatgatggatacgctgcgtctggccaaggacaacggcgcaaaggtcattctgctgacccactatgatgacgcccccggcacggcgctggcggacgtggtgctgctgtgcggcgctaaggaaagcccgttggactccggcagtatgccggtgaagctggcggtgctgtttgtggccaatgtgctggtactgcgctacacgctggacaaccaggagcttgtcagcctctcccgcgagagaacgaccaaggcactgggaaataaactgttgtaagtacgtaaaatttgagcaggcagcccggatgagaccggccgcctgcttttttgttgtgcgggcggaataacgggggtatcctccatgcggccggggacaacgccccgcccgccctgcgtgggggacggctcagaccaattgccccgataaaatccgctttgcaaaatccggccggggctggtataatagctataattgcgcagcattctgcgccggaaaagtgaggtcttgattttgaagaatctgtacatcagcgcggccgagtatgactaccataccctgctgaaagtggccgagatggcaggcctggccgggatcgtgggtttccacgaagccggggacggctacttggtcagcttcccggacggggaaaatacggacaccctgatcaacgactacaaaagccgcctgaaggacctggaaaacaacatctggatgcactgaccgcctattttggcgggattctgctgcttttgggcggaaaattgatagaaactgtgccatcacggtggtatactgatcgtatatcgtttaaaggagaggtaccccatgccacagacgaaaatcgttttctttgatattgacggcacgctgatcgatatgcaggcgaagaaaatcaccccaaaaatgttggagactctgcaccgtttgcaggaccgcggcatcaaaatctgcatcgccaccgggcgctcccccatggtgctgcccaaaatcgacggggttgcgtttgatgcgtacctgaccttcaacggctcgctgtgctatgacaggaaaggtgtcatcttcagcaaccccatcccccacaaggatgtggtgcgttttatccaaaacgcggcggcgctggggcggccggtctgtgtttctaccagggaccgcctggcggccaacggcaccgacaccgacctgaccgactactttttcattgccaacgaacccgtgcctgtggcggacgactttgacgctgtgtgcgcggaagacatttaccagctgatgctgggctgccgcccgaaggactaccctgccctgctggacggtgcaccgggggcgaagatcgccgcctggtgggaccgcgcggtggatgtcatccccgcgggcggcggcaagggcatcggcattgaaaaaatgctggcctattacgggctggacaaggccgaagcattggcctttggcgacggcaacaacgaccgggaaatgctgcaggctgtgggcaccggtgtggctatggagaatggctcgcccgagttgaaagccatcgccgatgaaatctgcggcccggtgtacgaggatggcatctatcactattgcgccgacaagggcttaatttaaaggaatagcgataagaaaactgccgcacagagacgaagctgtgcggcagctttgttttatagtgcaatctcacaaatactacgctggagcgttattccgtaggcagcgtaggctttctgcgcgatggcgttgtggctccacactatcaactccacccgctgggcaccaaacttgcgggcgcacttttccacatcggcaaacagcgcccacacaaacaaaataccggccgccttatccgggcgaccggtatttttatagtgcgcttagtctttcttctgctgtccctcggggaagatgattttattcacgaagaagaaaatgaccatcgagatgccgccgttcaaaacggtagtgccgatgttgtagatgaagtccggcaccagcaggccggccaccgccacccacacacagttgatggagttgacgatgcaggtgatgaggcagaacgccaccacgtaccagccgatctgcttggccagattgcccttgctgcggaacacaaagttgcgctggatcgggaagttgatgcactcgccgatgaccatggcgatcatgtaggcacagaagtagggcaggccgccgtgggcagcatcgtagcccagaatattccactggaaggtctcgccaaacagcgtgaccgggatgcccggccaaccgaagtctaccaccggcaggctggcaaaggccttgggcaaaaactgcagcagcagatacttaaaaacggtgataaggttggacacgaccacgaacaggccgccctcccgcacccacttggcagcggcggggtgcttggccgcgaagttattccagaattgcacgttgcacctccgtcaactgttgcgcaggcggctttccagctgcgcgttgagagttatgtttttgatggcctcaagaatgaccttgaccaggccaatcacccagaagcccttggcttccagcacgatgccgtccaccatgcccatactgatggccccgctggtcattttggccagggcgcgcagcggcatgttgtattggaacatcacgttcaggttgggctggccttttttgtagctggcggtcagcagcgtatgcagcaccagccagatcagccagcacagcgggctgcggctgtggttcagctcgcccagggtcatgttgcggtcgatttttacggtgtcgtccgggatggggcggcccagcagggtctcccactcggcgtcgggcacgttctgcaccttgccgcttgtgtagtgcggcaggctcttgccctcgtaggggttgggtgcaccggtaccggccacagtaacaacagcggtcaggcggatgtcctcgcaggaggcaccgacgcggacttcatagctgccgccctcgacctcccaggcattggtcatcgtgttccagtagcggaacgccttgtcatccagcgcaaccgtcacccgcttgctctcccctgccgccagctgcaccttgacaaagcctttcagctcctgcgcggggcggaagatcttggcatcaggcttggctacgtagacctgcacgatctcggcaccctcacggtcgccggtgttggtcacggtcaagcttacgccctggggcgtggcttttacgtcagaataggcaaaggtggtgtagcttaagccaaacccaa

SEQ ID NO: 7839 - DNA, 10425 bp, Unknown
  gut microbiota DNA sequence
cttcgtccatcaacgcacctccgtgtcgctgtacaccgcgcggctgccgccaataaacggcgggcgggtgcgggcgcacagcaaaattgcttcaccgatgtgatccatcgacaagcgcaccggcacggctacccggcgcaggtgcatgccgatcagcgtaccgccaatgtccataccagcggcggctttcacttcctccaccagcacagggtccttaaaggtgcgccagcagttggtggcccagctgccgcccgcgtggggctgcggcacggcagccacgatctgatagccgtactttttggcggcttcgcgttcaatgacgatcgagcggttcagatgctcgcagcactgggcggccaggtagacgccctgctcctgcagcgggggcagcaccccggccagcacggcggcggcaacctccatgctggaatcatggccgatgcgcccgccgcgaatctcgctgctggagcagccgacgacgaaaacatcgccggtctccagatgggcggcttccagtaattcttcggtggccttgcgggcctgggcagtcagttcagaaagttccataataaacctccttgatacgttttattttgtaggcggaaacgagaacacgaaaacacttccaccgttttgctaaggttatttgcgggccgcgcaggtcaggtcccggatggtcagcccgcggcagtactgcaccggcagggtcatggtgccggtctcgttctccacggtgatgccgtccagcaccacatcccgcagctcgtggccgggggcgtcaaagcctgccagctcaatcggctccacgttctcaaagctgccgtcccgcaggccgcggccggtcagggtcaaccgctcaaagctcaaatggctgaataccggctggcggggggccgcttcgccgtcgtcgttgtagggcacggtgtgtaccagcaggcgggaggcggtgcagtcccgcaccgacacgccgcgcacatagccgccgcgcttgggcgtggccttgatctcaatgcccgaccagctgttggtcaggtcgcaatcccaaatttgcacatcctcgatgccgccgcttatctcgctgcccaggcagatgccgtgcccggcggtgctgcggcaatcgaacacataaatatgagcgctggggcggccgattttgttgccctcgggatttttgccggacttgatggccacagcgtcgccgccggtggcaaactcgcaggcaaacagcgtgcagttggtgctggagtccgggtcccagccgtcgccgttccacacgccctcagatacaaagcggcagtggtcggtagtgatgttgtcgctgtagatcatgtgctggttccagctggcgccgtttttcagcgtcaggccgtgtacccacacattgcggcagttgctcatgttgatcagccgcggccgcacccggccggggatggtccgctcgttctcgcactcggccaccagggcggcgtgctcggccaggtagtccttcaggtgctcctgctcgtcggcgatgatcttctcagccaattcgcggccgccgctggcaatggtgcccttgccgcggatgaccacgttttcgcagttcggcccggcggcgtggtccagcgtgcccaggttcaaaaggcttgagtagcagcgcatctcggtgccctcaaaccggctggggatgcggggctggtagtctacgatctcggcggtgccctgcaagatggcgccctcgtccaggtacagctccatgttgctgtgcagccgtagcgcgccggtcaggtagatgccggcggggatgtacacggcatccccggcactgcaggcgtcgatggcacgctgcaaagcggcggtgtttttggttttgccgtcgcccctggcccagaacggtgcctcggtcacatcaaggcggttcttgatcggtgtggtgcggaatacgcagctgcccacgcactgatggccgaaaaacacgtcggcctggtagtcgctctggctgcgcaggtcggtcagggtaaagtgggtgcggccgcaggtggccacgggctggccgcccagatagacggtatattgcgccccggccttggcggctgcgggcttatcccagtacagcacggcagaatgcgcggtactgcgtgcaaaaacgtgcgattcaaacatgcggggtccctttccatgatgcaaaattcggtgcatacgcctctatctttgctcttattgtagcacagaaaatctatgggggaaaggtgcaaaacttgccaacatttaggggccactaggggcattttttctccaaaaagcagcccggctcgtgggcatacagcacgcccacggcctgcaaataggcgtaaatgatcgtggagccgacaaacttcatgccgcgctttttcaaatctttcgagatggcgtcggacaggggagaggtggtcggcccgcgctccaccagcgttttgccgccggtccactgccaaaggtagctatcaaagctgccaaactcctgccggatggcagcaaacacagcggcgttgcccacggccgccgcaattttgcgccggttgcggatgatgccggggtcggcgtacagcgcggcctgcctggcctcatcgtaggcggcgactttgtcccaatcgaaatcgtcgaacgcccggcggaaagcctcctgcttgttcagcacgcactcccacgaaagcccggcctggaagccctctaaaatgagtatttcaaacagcctgcggtcgtcgtgcaccggcacgccccactcttcgtcgtggtagcggatataccgcgggttgcccgggtttgcccaacggcacctgcattttccatcggaccaggtcatagcatagctcctttgccagaggttgtaagggccgcttgcatcggcccgcaggcgcacacggtgtgtccctgcctataattatagtataacacgcttagcaaggcttgcaccttgcccctgaattgtgtataataagatgttacaatcactattctggggaggtgtgccgtatgagcctgcaaagcattggctttttcggctttttgctgatcgtggctgcggtgtacctgcacctgccgcagcgctggcagaatccgtttctgctggcggccagctggtacttttacgccaaggccatgcccgccatgctgcctgtcactatcgccattgccgcgtgtacctacgcctgcggccgggcgatgcagcggcacaaaacagcggcgctgcgggtgggcgtgatcggcctgttggtaattttggctttctttaaatataacggcgcttttgccgccgatggcggttggcaggctgtggccatgccgctgggcatcagcttttacagcttcgcggccatcagctacctgatcgacgctgcccgcggcgattgcgaggtcgagaccaacttcatcgattgtgtgctttacctcaactttttcgccaccatcacccaaggccccatctgccgcgccggggacctgttgccgcagctcaagcaggagcatcgctttgacgccgcccgcacggtgcgcggcctgcggctgctggcgctgggcctgtttaaaatggtggccatcagcgatgtgctgggcctggtggtggatgaggtgttccccaactaccgcagctacggcgggccgatgctgatcctggcagcaattttttacacgttccagctgtattttaacttctccggttactctgaagtggcgcgggctgtgggcctgctgctggggctgaatctgcccgaaaacttcaagaccccgttttttgccaccaacttttccggtttctggagccgctggcacatcagcttttcctcctggctgcaggactacctgtttatgccgctggcctgggccgatgtctcgggcctgacgggcggaaggattcagcgtcttcctgcggaattctgcgtgttcacggtgttttttgtctccggcttctggcatggcaacacgctgccctttgttatttggggcctgctgcaggcctgctaccgcctgggcgaggaactgatgcaccgccgcttcggcaagcccaaaaagaaagccccggctaaaaccctgtgggccaagcgtgcgggcgtatttgtgctgtggaccatcagcatggtgttcttctgcgtgggcatgtccggtgcgggcttaacggcgggggatgccttcgcctatctgggcggctggttcaccggctggtccccgacccgctttggggccgagctgtacggcgcggcctacaacgggttctacgccaacaccatcatggtggcggcctactacgcctttgtgggggttacgctggccctgggctttgcccttgacgcccgccgcgcctttacctataaaaataagccgtccgaaatttgcctggccaacgaaaagcaccgctgggggatttactacgtattagtaatttgtttgctggtaggttatatcatgcaaaacggaggctttggcggggcatccgggtttggcatgtatgcaaacttttaacgcgcttcgcgcgcaaagaaggggttcatcgcttgtggctgcgccacgctcctgcactcctcctttggattcaccccgtcgcaaaaagcacattttcacgcctgacgacacaaaaatgcacttttttgctcaagaggtgtcagcatcggcggcgcatgtccgccgatgctgacggtttaaaaagaaaggaggttttcgcccaatgaaaaatatcctgaaaaaactggcgctgctctgcatcccggtcgtggtgtggttcgtgttttttgcggcgtttgagccgaacaactactttggggtgaaagcctccgctacctccagccagccggtggcccgggtgcgggcctaccagcaggagccgggcaccaacctgatcctgggcgacagccgcctggctcactttgatatggcccgggtcgagcaggtcagcggcaaggcgtggcaaaatctggctttcggcggtgcatcgctgaaagaaacgctggacctggccgattacgtgctggattccggcaaccgggtggacagcctgctggtggaagtctcgttctacaccctcaacgccgggtacaacaccgaccgcttccaggcgctggaggaaacgctgaacaaccctctggcctactgcctgaatctcgaatacaacgtcaacgccctgaccgtggcgatggacaccctgaagggcacgccggataccattgaatccggcgattggaccgccgcagactatctggcggacgacggcactaccctgccgctgcaccgcaaactgtacgattacccggccatcatcacccccaagtgccgcagctggacgctgaacgaagcccagctgacccgcctggccgagctggccgcccgctgccagaacgaaggcatcgccctgaccatcgtactgccgcccatggccgagaatgtgcgcaccgaggtgtgcgatccgttcggcattaccgaggccatgcaggaggaggtcttgcccgaactgcacgccatcgccgccgagaccggctgcaccctgctggattacgagtggaacggcagctgcattactgacgatgatacgcagttctttgatggcttccacctggatgaaaagtatggcctgccggactggacagaagaactttttacggatatagggtaaataagtagactgttaaagagcctccctctgggaggaaggtgccccgaaggggcggaggaagagagctttaccggtatccgaagcattggcgatcaggctctctcccccatccgcctatgcgggagccacctcccagagggggccgaagtaaattggcaataaaatctacaacgaggcaaaccatggctttagacttcttaattttgtacgagcacactgtgcgcgaatatgagagcgacctgctgctcaagctggagttggagcgccgcggctataccgccgagatccgccagctgctggaccccaagcacctgcggcttttcggcaaagacaagccggaagtgctggtcgccagctgcatgtatgataacgaggccatcaacagccacgtctacaacaacatcggcaaatgcaacaagatcgtcaacctgcattgggagcagatgctttccgatacgcaggaggagggtgactggttcaacatgaacggcaacgccaagcgctgcgtgcagacctgctggggcaagcgcaccgccgcccgcctgcaggcccacggcatggacgccaaaaacacccccgtgaccggcgccgtcatgatggattttttgcggcctgaatttaacgggtattttaaggataaagccaccctctgccgggagtttggcctcgaccccaacaaaaagctgcacctgtatatttccagcttcggctacgccagcatgaacaatgacgaggtggccgagctttccagaatggcgggcaccgactttaccggctttgccaaaacaaaccgtgtatcgatgagagagacgctgagctggtttgaacagtacctcaccgcccacccggaggtagagcttgtctaccgccgccaccccagcgagtggaacagccccgcgctggaagaactggccaggaaatgccccaacttccacgtgatctttgccgattcggtcaagcagtggatcgtggcagcggactccatctccatctggatgagcaccgctatcgccgaggtgtacatggcgggcaaaagctgccacatcctgcgccctgtgcccattgagcacgagtatgacccggtcatctacaaggacgcccgctatatcaccacttacgcggactttgccgccgccatgcagcaggacgacccgccgttccccattgcgcgcgaagtcatcgagggctacttcgaccccagcgagacgccagcctacatccgcatggccgatctgctggaggatgtctacaaaaatcccccccgggacgagccgatgggtgagggctttaccccccactttaacttgctgaaattctgtgcactggcgggcgtacactttttgtaccgccgcggctgggagccgaaaaaggtgttcgccttctgcccgccgctggccaatttcgcccagcgcatctacggttatgtggataaagcccatgtgacgcccgagcaggtggaagccatgacagctcgcatccggccctacgtgaaataagtataaaagtttcttcgcttccttcttttcaaagaaggcgggaaaggacctcgaatcatgccagagaaaaaatccgccggggaatcctttgccggcaacgtaatgaaatactcggtggccacctacctggggtttgccatcaccggcctggcgctcatcgtcaagggcctgctgcctgccgaggtgctgggcgcgccggtcacctttatgacctacaccgccaccgtcatgaaccttggcatcctgggcctggaccagaccctgctgcgcttttaccatgagccgcccgccggggccgaaccccgccagctgtttgccgcctgcacccggatgtcggtggtgttcatgctggtgctgggggctgtgtgcagcctgttcgccgcccggtccatggcggtggccttcggctttggcgctgacggccaggggctggtgccgctgctgttcgtgaacgccgcgctgtacatgctggtgcgctacctgaacgtgctgctgcggctggaaaacgacctgaaagcctacaccgccgagacgctgtggatgcaggggtgcttcaacctcatctacctgctgcccggcttcttcacctccaacgtctacctgctggccatggcggccatcatcagcttcggcgtggtggtcattgcgtttgggtataagtaccgcagcgccttcttcagtccgctgcctgccgaaaaattcggcggtatcgccaaggtggctgtgccttatggcatcgcgctggccccggcgcagattctgttcagcctgtccagcggcatctgcctgtcctttgtgggcaacgagtgcggcgaaagcgcccagggactctttgccttcggctacagcctggcgcagctggtcaccgctatccaggcgggcttctccacctactggggcccctatgtgtacgcccactaccgcgaggaacaggagcgcatcggccgcgtgcacgacgtgctgaacctgctgatcttcggctttttctgcgtgctggtgatgtttgaggacatcgtattcctcatcttccccaacaaaaaagagtgcctgaccatcttcccgctgctgatgctggcggtggtgttcaacattttgtgcgagggcaccgtctacggcaactccatcgcccgcaaaccctggcatgataccattggcattggcatcggggcgctgtctaatttggggctgtgcgcggccttcgtgccccgctttggcatgaccggcgcggcctttgcgctggccgccagcaacggtctggcatttttgtaccgcagcgttaccgggcagatgtactaccgcaccatccccagctttgccaagaccatctccggctttctgctggcgttcgccgtcacggcggccggcacgctgctgtggcagcattttgtcctgaaattcgtgcttaccggcgcggtgctgttcatctactgcaccctctaccgcgcccaactgctcaaactgtggaatatggggctgggcatcctgcgcggcctgttaaagaagtgaggaaaaccatgaaacattgcggcacacaggaactggaaaccgggcggctgctgctgcggcggctgtccattgacgacagcgagatgatgttcaacaactgggccagcgaccccgaggtgaccaggtatctgcgctggaacgcccaccgcagctgggccgagaccgccgagatgctgaacgagtgggaaaagcactacggcgaccccaccttttaccagtggggcgtagaaaataagcgcagcggcgtgctgatgggcaccatcagcctgttccccgcgccggagctgaagaccggctggcacctgaataccgagattctgggctctgcctgggaggcgggctatgcactgggccgcaagtggtggaacaacggctatatgaccgaggccctctgcgccgtgcgggactactggttcaacacggtggatgccccctggctggtggccatccatgccaacgagaatgtggccagcagcgccgtgctgcaaaaagccggtttcgtttacgaccacgatgtgatcgaccacaaatttgacggcacggcggtgccctgccgcgcctaccacctggtaaaagaggatctatgagcgagaatacgatcgatttggactttggcaccacggcccagaaacagcaggacggcgagaaactgcccgtcgtgctgctggcgctggaccagggcaagtacgatatggcccgcagcctggacgagctgcgggcgctggctgacgccaacggcatggaggccgtggccgaggttacgcagaaacgcgccacccccgaagccgccaccctgctgggggagggcaaggtggccgaagcgcggcttgtctgccaaaatttgaacgctgcggcagctatttttgacggcgaactcaccggcagccagatccgcaacctgtccgccgctttgcaggtggaagtgctggaccgcacgatgctgattttggaaattttccgtgcccgcgctaccaccaatgagggcaagctgcagaccgaactggccaccctgcgctaccagctgccccgtttgcagggcctgggtgaatccctcagccgccagggcggcggcggcgggggcggcggtggtgcccgccgcggtgccggtgaaaccaagctggagctggaccgccgccacctgcaccaccgcattgaacatctcgaaggccgtctaaaagagatggagaagcgccggggtgagacccgccgcgcccgccagaaaaacaatgtgcccgtggtggcactggtgggctacaccaacgtgggcaagtccagcctgctgaacgccctgtgcggcgagcagatctttgaggcggacatgctgttcgccacgctggaccccaccgcccgcaagctgaccctgcccagcggcctgcaaattattctggtggatacggtcggcttcgtcagccgcctgccccaccacctggtggaagcgttcaagagcacgctggaagaagccgcctatgcggacgttatcgtaaaggtggccgacgccggtgacgaccaggctgccgagcagctggccgtcaccgatgaggtactgagcagcctggattgcgagggcatcccccagctggtggtgtacaataagtgcgatacagcgaacctgctgtcctttgacccggacatcctgctgaccagcgccaaaacgggcgtgggcctgcccgccctgctggccaagatcgatgatgtgctggcccaccgtgtgcggggcatcgaggtgctgctgccctacgataaactggcgctggccgacatcctgcgcagccgcggcagcgtggccgaggaagaataccgagagga

SEQ ID NO: 7840 - DNA, 4375 bp, Unknown
  gut microbiota DNA sequence
agtaggcgtagaccgtgccgtggccgcgctttttgaagcggaccatgatgtcctgctcaggatacagcttgaccagctcggcgcggtcgttgctgacccaagcaatgaaggagatgtagtggcttttgggtcagggccttgcgctcccgcagggcgcggatggtttcgttttgtacatagctcatggtttgtaccctcactttccggtgcccagtatacggcaaaacgggtttggcggcaacctacgctgcgtagagttcgtcattttgccggatattgggtgccgattttgtcgtaacgccaaattttataggctggattgcagttttttgtacatgatgttaaaatgttatcatcgagaaatgataaggagcagcccatggacactgtaaaaattctggaagtaaagcagagcatctttgcttccaacgacgaacaggccgaagccctgcgcaaggaactgaaaaagaaaaaggtatttttgctgaatctgatgagcgcacccggctccggcaagaccactaccctgcgccgcaccattgccgcgctgaaggacgagctgcgcatcggcgtgatggaggcggatattgactccgacgtcgacgcccgtgccatagccgagaccgggacgaaggccatccagctgcataccggcggcatgtgccacctggacgccgagatgacccggcaggggctggagggcttaggcgaggacgggctggatttggtagtgctggaaaatgtgggtaaccttgtctgcccggccgagtttgacacgggcgcggtgaagaatgcgatgattttgtcagtacccgagggccacgacaagccgctgaaatacccgctgatgtttcaggtgtgcgatgtggtgctggtcaacaaaatcgacgtgctgccgtactttgattttgacatggacaaatgccgggagtatgtggcaatgcgcaacccgcaagcgaaggtcattcccatctgcgcacgcaccggcgaaggcatggatgaatggaccgcctggctgaaagagcaggtcagccagtggcaggcgtaaactgagcaaataaacggactacggataaaggagcaaggtatgagcaaaccgactgcgttcccgttggatgagagcaagctgcctttcgagatatcgaaagacgccgtgctgcgggaaaaaatcgtaaaactggggcagatgatcaccgaccgcatccccgccaaaaaccgccccctgacggcggaggacccagagtattggggcctggccagcatcgtgaccgacgagatggccgacgttgccttaaaaatgaaggtgcgcaagccgatgaccctgccggagatcgtaaaggctaccggcaaaactgccgaagaactggaaccgcttttgtacaaaatgtcctgcgtgggcttgctggagtataactgggagaacccgcgccgggagaaacagtacgtactgccgatgtttgtgcccggcagcgctgagttttttaacatgaataagcagcagatcgccgaacacccggaagtgacggcgttctttgagcggatgacttttttgccgctggagcatatcaccgccatggtgccgccgggcggtgcaggcatcggcatgcacgttatccccgtggaaaaagccatcgagaccgagaaccaatcgctggacattgagcatatctcccactggctgaaaaagtacgagggcaagtatgcggcggggccctgttcctgccggatgtcccgcgcggccatgggcgagggctgcggcgacgaccctgacgattggtgcatcggcgtgggcgacatggcggattatctggtggagacccacaagggccactatatcacctacgacgaagtaatgcagatcctgcagaaggccgaggacaacggctttgtgcaccagatcaccaacattgacggcgagaacaagatttttgccatctgcaactgcaatgtcaacgtctgcaacgcgctgcgcaccagccagctgttcaacacgcccaacatgagccgctcggcctatgtagccaaggtggaaaaggaaaactgcgtggcctgtgggcgctgcgtggagtactgccccgccggtgcggtgaagctgggccaaaaactgtgtaccaagagcgggccgatcgtttacccgcggcaggaattgcccgacgccgccaagtgggggccggagaagtgggccatcgactaccgcgacaagaaccgcatcaactgctacgacaccggcacggccccctgcaagacggcctgccccgcccacattgcagtgcagggctacctgaagatggccgcccagggccgctaccgcgacgcactggcgctgatcaaaaaggagaatccattccccgccgtgtgcgggcgcatctgcaaccgccggtgcgaggatgcctgtacccgcggcaccatcgaccaggccgtggccattgacgctgtgaagaagttcattgcccagcaggacttgaacgccgagagccgctatgtgccgccggtggtgcagccctcactgcaggggctgtggaaacagaaaattgccatcatcggcggcggccctgcgggtttgagctgtgcatactttttggcgctgcagggctacaagcccaccgtgtttgagaaaaatccccatccgggcggcatgctgcggtatggcatcccctcgtttaaattggagaaggacgttatcgatgccgaaattgagattttgaaagaactgggcgtcgagatccgctgcggcgtggaggtcggcaaggaagtaacgctggctgacttgcgtgcagacgggtataaggcgttctatctggccatcggctgccagggcggccgcaaggccggtgtgcccggcgaggaagctgcgggtatccagaccgccgtgaacctgctgcgcaccgtgggcgacgatgagaactataagatgagcggcaggaccgtggtcatcggcggcggcaacgtggccattgatgcggcgcgtgtctcgctgcggtgcggcgcggacgcggtaacgatggtctgcctggagccccgggacggcatgccggcttcggccgaagaaattgccgaggccgaggaggaaggcaccgccatccgctgcggctacggccctaaagagttcgtgacggaaaacggccatgtgaccgccgtggtgctgaaaaaatgcacgggtctttacaatccggagggacgctttgcacctacctacgacgaaaacgacacccttaccctgtcctgcgacaatgtggtgctgagcattggtcagtgcatcgaatggggcgatctgctggacggtgaagccgtagagctgggccgcggccagggcgctgtggccgaccctgtgacctaccagaccgcccagccggatgtgtttgtgggcggcgacgtctacaccggcccgcgctttgccattgacgccattgccgccggcaagcagggcgcggtatccatccatcgctttgtgcagcccaacaccagcatgaccatcgggcgcaaccggcgggaattctttgagctggacaagggcaacctttctattggtgaatacgaccatacgccccgccagcaggccgccgtagatgagcacatcgacgcgcatcgttcgttccgggatgcccacctgacgctgaccgaaacgcaggtacgggccgagaccgcccgctgcctgggctgcggcgccagtgtagtggaccccaacaagtgcatcggctgcggcgtttgcaccaccaagtgcgagtttgacgccatccatctgcatcgtgacctgccccagtgcagcaagatggtaaagagcgaggacaagttcaaggcaattttgccctacatggccaagcgggagatcaagatccgctttgccaaaaagggaaagtgagccgttatgcatgaactgggaatcgttttccatatcatacgcacagtggaagatgtggcaaaacagaacgatgtaacgcgcatacgacgtgtaacgctgcaattgggcgaggtgagcggcgtggtggagagctacctgcaggattgctggaagtgggctgctgccaaaacggacctgctgcccggcgcggtgctgacggtggagaccatcccggccgtcacccaatgccaagcctgcggccggcagtacgagaccgtgcgctacggccgaatctgcccccattgccaaagcccggatacctacctggtgcagggcagcgagatgatgataaaagaaattgaagcggtggaagcggacgacgcggccacctgaatacgagcaaaggccccggtatccacgccggggcctttgtgtttttatggcaataccgcataattctaagtgccgagatacggcgagcgaggtgcggcagctgctaagccaaaagcgcagataatactttgtgctgcaaaggtg

SEQ ID NO: 7841 - DNA, 7403 bp, Unknown
  gut microbiota DNA sequence
ccatctcggccgccgaggtctacaccgccgtgaccggcaaagccgattggaccaatgaactgcccaagtccccgtttgactacgacctgcgcagccgttatgccgccgttttgggcggcagcggggactacctgtgtaccaaagaagaagaacttgacgatgttacgcatttcctgcgtgagtggagggattgaggatggcaaactatcagctggcgatctccaacattgcctggcataaggaggacgacgaggcggtctacaccgccatgcagcaggccggttttaccggactggagatcgcgccgacccgcatcttcccggagatgccctacgaaaacctgaccagcgcgctgctgtttggcgggtatctcaaaaaccagtggggcttctcggtgcccagcatgcaaagcatctggtacggccagaccggcaacatttttaacccggcggacgccgagcacttgctggattataccgccgaggcattccagtttgcccacagcctgaactgcccgtcgctggtgttcggctgccccaaaaaccgcatgcgcgccctgggtgacagcgatgctgccgccgaagccttctttatgcaggcaggcaacctggccgcgcggtacggcgtgcgcctggccatcgaggctaatcccccgatgtataccaactacttaaacggcaccgccgaggcgttcagccttgtcaagcggctggataaccccggcctggccgtcaacctggacctgtccaccatgctggcccagggtgaaaagctgcagaattttgtggatgacctaaagtacgtcagccatgtgcatatcagcgaaccgggcctggcccccatccagaagcgccccgagcataaagagctggccctgctgctgggcgcggtgggctaccggggctttgtttcggtggagatggcccgcaccgacctggataccgtaaagcggacgctggactatgtggcggaggtgttccaatgatcgaatatgaacgcaaggcgttgcagggcgtgcctgattaccgcgccgccgagctgctgcccaagcgcagtgaatactgcctgctgatccccgttatcaacgagggggcgcgcattttgaccgagctgggccgcgcccagaccgccggggtggacaccctgtgcgacattgtcatctgcgacggcggctccaccgacggcagcatgaagctggacaccctgcagctgtacggcgtcaacacgctgctgaccaagaccggccccggcaagcagggggcacagctgcgcatgggcatctactttgccctgaaccgcggctacaagggcgtgctgaccatcgatggcaataacaaggattccatcgaggacgtgcataaattcatcgagaaattacaggcgggctatgactttgtgcagggcagccgcttcatccgcggcggccacgccgtcaacaccccgccggtacgctacgccgccgtgcggctggtgcatgcgccgctcatcagcctgggggcgcaccggtggttcaccgataccaccaacgcctaccgcgcctacagccgcgagtacctgacccaccccgaggtgcgccccctgcgggacgtgtttatggggtacgagctgctggcgtatctgagcatccgcgccacgcagttgggcatgaaggcctgcgaggtccccgtgacccgcgcctaccccgccaccggcaagacccccaccaagatcagcggctttaaaggcaacagcgacctgatgcaggtcctgctgaaagcactggcaggaaaatataacccgtgaaataaaaacggcagaacgaaggaaaacgccatgacctacgataaaatcatccttggtgcgggcctgtatgggctgtatgcggcgcaaaagtgcggtgcggcagggcagcgggtgctggtgctggagcgtgaccccgcgccctttatgcgggcaacctacatcaaccaggcgcgggtgcatatgggctaccactacccccgcagctactccacggccatcaaatctgcccattattttgagcggttctgccgggattatggcttttgcctgcataccgagtttgaccaggtctacgccaccagcgcccatttttcctggacgaatgcggccgagttccgacagttctgccgcgcggcgggcatccgctgcgacgatgtgccgccggaacggtactttaaccacggcctgtgtgacggcgcgtttttgaccaccgaatacacctacgacgcccaagtgctcaagcgctggtttttggagcagctggcccggctgcccaacgtggaagtggcttatagccacaagcccgaccgcatcgagaaggcgggtaatgtttggtgcgtgacggcgggggacattaccgccgaagcgccctacctgctcaacgccacttacgcgggcgtgaacgatgtgcacgccatgctgggcctgccgcctttcggcattaagtacgaaaagtgcgagatcattttgtgcactgtggacgaaagcctgaagaacaccggcatcaccgtgatggacgggccgttcttcagcctgatgccctttggccagaccggtctgcacagcctgaccagcgtgacctttaccccccacgagaccagctacgacagcgtggcgaccttcccctgccagcaggcgtgcggcggggtgtgcaagccgggcgacctgtacaactgcaatgagtgcccggccaagcccgccagtgcctggccctacatgagccagctggcccgtaaatatttaaaagaggaatatggctttgcctaccacagcagccttttcagcatgaaaccgatcttaaaggccagtgaggtggacgactcccgccccacggtggtgcgtgtgatgtgtgacgagccaaagctggtcagcgtgctgtccggcaagatcaacacagtctatgatttggacgaggtgctggaactgtgagtagtatcaacaataaggaaaaaaactttatctccgccgtggtctacctccataacgacggggcccgcgcggtggagttctgccgcgcggtggcggcggagctggacagccacttcgcccagtatgaactggtagtggtggatgacgcctgcaccgatgacaccgtggagcgcctgcgcgcctggggcaaagaccaggccgccccgctgacgattttgcatatgagcctgtaccacggcctggaaaacgccatgaacgcgggcctggatgccagcatcggcgactatgtgtatgagtttgactccaccgagctgtgctacccggcggccatgatctttgacgcgtaccgcacggcgctgcagggcagcgacatcgtttcggtctgccctaaggcgacccgcagcgggctgttttaccgcattttcaacgcgaattcccacagcaattaccagctgcgcaccgatgcgttccggctggtcacccggcgggccatcaaccgtgtgcatgccagcagcgcccacctgccctaccgcaaggcggcctatgcggcctgcggcttaaaaatgaccgacctggaatttgacggcagggtgggggccggtgcgccccaccgcttcaacctggccatcgacagcctggcactgtacaccgatgccgggttcaaggccagcgtgggcattaccctgtttatgctggcactggcattggcggaactggtgtatacgctggtcatcttcgccacaggccacccggtggcgggctggactaccaccatgtttgtgatcaccgtgggctttgccgggctgtttgccgtgctggccatcgtggtcaagtacctctcgctgctgttggaattgacgttcaaacagcaaaaatacctcgtggaaagcatcgagaagctgcaaaagtaaatgggagcatctatgcaggcattgcagaaaaaacagaaaacctgggccttgctgttgctgggggccttgttgggactggcggcgtttttgtgtttgtacggcaccgcgccgctggaccccgccaacgatgcctggatctggtacggctacgacgagaccgacatccaccagcattacgccgggtggctggggttccgcaacagcagctggcagttcccgctggcccaggccgatgccctggcctacccggcggggacgggggtaaacatctcctttaccgattcgctgccctgggtgtcggtgctgtttaagctgctggccccggtgctgccagcgcagttccagtggttcgggctgtatgagctggccgcctttattttgcagggcatggccgcggcgctggtgctggggctgttcctgtacgatttgctgccgcttgcggcgggcacggcgctgtttgcgttttcgcccatcatgatcgagcgggcgttccgccatgtggcgctttcctcccattacattgtgctgtttgcgctgtatgcctacctgcgcggccggcgggagcaacgctgctttatgccggtgttctggctgctggcggcactgggcgtgggcattacgccctactttttgccgatggcggccatctttgcgttgctgctggcggtggaaaacgccctgcacacccgcaaactgctggccccctgcgggctgtttttgggcacctgcgcggccgggtatgcggcgggcgtggtgctgggttcgctgaacaacggctactccgccagccgggaaaattacggcgtgttctccttcaatttaaacgcgctgttcaaccccagctccaagggcgggtacacctggtcccggattctgcccgcccggccgcagctgtacgggcaatatgacggcttcaattatctgggctttggcatgctggcattgctgggcgtgctgtgcgcggcggtagtggtgttggctgtgcgcagtaaggcaggccgcgccgcgctggcggggctgctgcgccgcaatcttgtacttattttgggcatggcgtttatgacgctgttcgccattaccaatgtcgtctgctttgacgatgtggaactgctgaatatccccctgccggaggggctggtgaaactctgcggcatcttccgcgccagcgggcggatgttctaccctgtgtactacgtgctgatgaccgcctgcatcgtggggctggcgcggctgctgcgccgtgtgggcaaggctgcgctgtatccggcggtgctggtgctggtggcggctgtgcagctgtttgacctgagtgctatgatcgctgaaaagcacactgctatgtcagaaacagccgccaagccacagccctacccgcaagagctggtggactgccgcgataactacggcacgctgatgctggcggatgacatcatccacgcccgcaacgtcatctgcgcggcatggcaccccggcatggtcaccaacgggtacgatgtgaacacctacaccggcgcgtggaatgtgaccatcgactggacggcccaaaccagcgccgccgtggacagcggcacgctggacccggacaccctgtatgtgaccggcgacgccgaccgctttgccagctggcaggcacagtacggcgacaaggccgactatatcacctgggatattgccgccaccggcatctacgaccggcgggacgaatactactttatggcaccaaaacaataacgaaccatcgaggtaaaatgtatgaagcatccccgcctgcaactgaacaagcgcgctttctggtgcggcgtggccgtgctggctttgctgcgctgcggcctgaccagcttccagcaggcgtatacctgggtgggcggcgcaccgttggatgacgagctgatgttccgcgcggcgcaggccatcacggcgggggagtggctgggggcttacgattatctgaccctctccaaggctatgttcttcccggtatggctggcgttgctgcatgtgctgcacctgccgtatctggtcagcggggcagcattgtggtgcgcagcttcgctgctggcggcctttgcctttgcgccgctgtggcgcaacgccgagccgggctgcggccgcgtgctgacactggggctgtttggggcgctggcgtttttgccctccggttgggcggcctacacgctgcgcgtttaccgggacaacatcttcccggcactgtgcctcgttttctttgcgggcatggcgggcatggccctgcgggccgtgttttacactgcgagacaaaagccgctgtggccctggctgctggcggcgggcgtggggctggcttgtgcctatctcgaccgcgaggacgcggggatgttcctgcttccctttgccggggcggcgaccatcatcgtgctggtggtgctggttggcaagcgccggtggctctgctgcgcggcgcaggctatcccgtataccgtgctggcggcgggggtgctgaccttctgcgggctgaattacagccactacggcgtgtttgccctgtcggatttttccgaaggctcctttgccgccgccatgggcgcgatgatgcgggtggataccgacagcgacgcgccctacttgtcggtgcctgccgatgcccgcgccaaaatttacgaagccgtgcccgagctggaacccctggcttactggctggaggaggacgcccagatggagaatgacttccgtgaccccggcctgaacgactaccgcgcgggcagcttctattgggccatccgccgcgccgcccagtttgagggcatctacgacagcgcccaggccgccgatgcttactggcagaacgtggccgataagatcaacgccgcctgtgacgcgggcaccctgcccagccgcaccggcaagcgggttgccaccagccagcccatcaaggccgagtacgtgggcgcgaccctggccgagacctggaagggcttttggcatgtgctgggctttaaggattgccagccctatgaaaacctacggtccatcggcaccaccgatgatattgccgcctggtcctgctacctgcactgcggtttcaacaatgccgctgtggcgggggaggataccccctattacagcccctaccagaaggctgtgtttgcagtgatgcaggcatggaccgccgtgtacagcgtggtgctgacggtctgcgtgctgtgcgcggtgctgttccggttgatacatctttttacgaatctgcgaaaaaaacacacggccgaaacggtggttccgtggctgctgctgttcggcatcttcggcattgcactgctgcgctgtgctatgatcgcctttgtggaggtgtccagcttcggcatcggcaccagcacgatgtatctggctaccgtgcccccgctgctggcggtgtacgcgtttaccgggctgtttttgtacggacggcccattgggaaaaagagaaaggataacgcatgacggatctattggtcatcggcggaggcgccgcaggtctgatggcggcgggcgcagcctgcgccaagggcctgacagtgacggtgctggagcacaaccccaaaggcccgg

SEQ ID NO: 7842 - DNA, 9457 bp, Unknown
  gut microbiota DNA sequence
cccgaaagatacgcgccggtgatgctgcgcttgaccttgcagatgtctgccacactgcccgcagccacgatctcgccgccgtgcacaccggcaccggggccgacatccacaatataatcagcctggcgcatggtatcctcatcgtgttcgactacgatcaaggtgttgcccaggtcgcgcaggcgcttcatggtggcgatcagtttatcattgtcgcgctggtgcaggccgatgctcggctcgtccagcacgtacagcacgccggtcagcgcgctgccgatctgggtggccaggcggatacgctggctctcgccgccagacagggatgccgcgccgcgggacagggtcagatagcccaaacctacgctctgtaaaaatcccagacgttcgcgcacttctttaaaaatcggcgcaccgatcatctcatcctttgcgctgaccttggcgttctcgatgaacttcaactcctcggtcacgctcttatcacagaaatcggcaatgttgatgccgccgaccgtgacggccaggctggtgggctttaagcggcggccatggcaggcagggcactcctcgctggacatgacgagggcaatctcctctttgacccactcgctgttggtctcacggaagcggcgctccaggttggggaccaggccttcgaactggttgtagtaggtgccggagccaaacatgctctcgcgctgcatctcaatgcgctcatcgccggtgccgtacagtagggcatgcagggcttctttgctgaaatccttgatgggagtatccagcgtaaagccgtagcgcttgcctagggccttgtaggtcatctcggagatggaaccctcggcatagtaccagccgctggctttgatggcgctttcgcggatggatttgcgcttgtccgggatgacgcgggcggggtcgaccttcataaaggtgccaaggcccgtacatttctcgcaggcaccaaaggggttgttgaaactgaacatgcggggcgtcagttcttccaccgagatgccgtgctccgggcaggcatagctctggctgaacatcatcggctcgccgccgatgacatcgataacgaccaggccgtttgcctgggccagggcggtctcaatggaatctgccagacggccgcgcactgtatcgctgatgaccaggcggtcgaccacgatctccacggtatgcttgatgttcttttcgaggttgatctcctcgctcaaatcgtacatgttgccgtcaatgcgcacacgtacaaaaccggcgcggcgggcggcgtccagttccttggcctgggtgcctttgcgggcacggactacgggggccagcacctggaagcgggtgcgctccggcagcttcatcacctcgtcgaccatctcatcaatagactgctgggtgatctcccgcccgcagatcgggcagtgaggcacgccaatccgagcatacatcaggcgcaggtagtcgtaaatttcggtcacggtgcccacggtggaacgtgggttgtggctggtggtcttctggtcgatggagatggccggcgaaaggccggtaatctcgtccacatcgggcttttccatctggcccaggaactggcgggcgtaactggaaaggctctccatatagcggcgctggccgtcggcgtagatggtgtcaaaggcaaggctggacttgccggagccggaaagtcctgtcatgacgatcagcttattgcggggcagcgtcaggtcgacgtttttcaggttatgctcccgcgcgcccttgatgacgatgcggttgttggggtcgatttgaatcttcgatcggcgctttgtttctttcacttcggtgctcaacttttgtatttccctcttcccttgcgctttttggcagtcgccttgcgctcactggtatcggctgcggtagggtcttccccgcgctccagccgggcaatctcgtcgcgcagctgggctgccagctcaaactgcagcaggcgcgcggcttctttcatctctttggtcaggcgttcaattgtctgctggcgttccacgcggctcatacggtgctggcgcatgcgcttgttttcctcgctcatgctgatctccagcccgccgccgatggccttgacgatggtcttgggggtgatgccatgctctttgttgtaggcgtcctggatggcacggcggcgctcggtctccatgatggcgcgttccatgctgggggtcacttcatcggcgtacatcagcactacgccgttggcattgcgggctgcgcggccaatggtctggataaggcttgtctcactgcgaaggaagccctctttgtcggtatccaggatggcaatcagcgaaacttccggcaggtcgagaccctcacgcagcagattgatgcccacaatgacatcaatggcgcccacgcgcaggtctttgataatttccatgcgctcaaaggtgtcgacctcgtggtgcatgcacttggtcttgacgccgtgatcttctaaataatctgtcaggtcctcggccatcttgacggtcagggtcgtgacgagggcgcgctcgccgcggtcaatacgcacacgtatttcacccagcaggtcttcaatctgaccttccaccgggcgcaccatgatgacggggtccagcaggccggtgggacggatgacctgctcggccacgcggctggagtgttcccgctcataatcgccgggtgtggccgaaacaaagattttctggtggactttctgctcaaattcctcaaatttcaacgggcggttgtcaaaggcagatggcaggcggaagccgtattccaccagcgttttcttgcggctgtagtcgccgccgaacataccgcggatctggggcagcatgacatggctctcgtccaccatcaaaaggaaatcatccgggaaataatccagcagcgtggtgggcgtggagccgggggcgcggcccgacagcacagccgagtagttctcgatacccttgcacatgccgacttcctgcagcatttccatatcgtagttggtgcgctgctggatgcgctgggcttccagcagtttgccttcctcggtgaatttcttcacctgctgctccatctcgatggcaatcttggcaaggccttctttcatcttttccggcccaacgatataatggctggccgggaagatagcgacatggcgcaccacgttcttgtgctcgccggtcagcgggtcaaactcaatgatacggtcgatctcatcaccgaaaaactctacccggatggcaaattcatcgttgtaggccaggtggatgtccactgtgtcacccttgacacggaacttgttgcggataaagttcatgtcgttgcgctcatattgcagtttgaccaggcggctgcaaagttcgtcccgctccatctgcatgccgggacgcaggctgataaccatgctgcggtaatcgatagggtcgcccagagagtagatgcaggaaacactggcaacgatgatgacgttgcgctgctctgacaaggccgccgtggccgagtggcgcagacggtcgatctcatcgttgatggcgctgtccttttcaatataggtatcagtggacgggatataggcttcgggctggtagtagtcgtagtaggatacgaaatattctacagcatcgtctgggaaaaaactgcgcatctcggtgcagatctggctggccagcgttttgttgggctccaggatcagcgtggggcgattgcaccgggcaatgatattagccatggtaaaggttttgccggaaccggtaacacccagcaaggtctgggcatcgtccccctcattgatgccctgtaccagggcgtcgatggcctggggctggtcaccggtcggctggaatggtgcctttaggtgaaacacatcatccataaaagtttcctttcaacacaacaattggttgtaagctgattatatcacaactgaaaagtaatgtaaagtcttttggtaggtattttgtgcactcggcggccaaaaatataccctgccgcggcataaggcggcagggcgaaacggcagcttaaaaatccgtactggcggcgtttaaaatgccggggtgggcgttgatgtccggcaaacggccgcggtctgccatcgagcaggcgttctcccctgccacgatgatgtggtccaaaatagagatgcccgccggggccagcagctgcataattttcagcgtggtcagctggtcggtggcactgggcagggccggcccggtgggatggttgtgggccaggatggcggtggaggcgttggagcgcagcacatcccgcagcagcttgcgggtatcgatgctgacgtggttcggcacaccctcggcggctttcaggtcgtagagcggatggcaggaatcgtccatcaaaatgatgtacagcacttcgttttgcaggccgaggaacagcggcttgatgtactcaatagcgttggcagtggtgtccaatgtagcctgctttttccgctttttcacggcataatagcggccaaactccataatgtcggagatcagctgggcgctgcgcgggccgacgcccttcacctgcatcagctcttgcggcgtggcttccatcacgcggcaaaagctgccaaaatggtcgatcagccggtgcgccaggggattcgtatcctggcgcggaatggccaggtacagcatatattccagcacttcgtgttcggccaagctttccatgccgttatgcgccacacgctcctgcatgcgggcacgatgattctcgtgaataggccgctctttgccgtctgccatggttccacatcctttttgccactttacgttttcctgatttcattatatactgaaagaaagattttgcaaagagataagtgagggttccatgaaaagttttaccgccggtgccaacgagaatgacgtccgcctgagccgctttgtggagggcgtgaccaaagatatgccccgcagcatgatgtacaaggcgtttcgcaacaagcgcatcaaggtcaacggcaaacgggccgagccggacacccgcctgaaaacgggcgatttgatcgagatgtacatcaacgatgagttcttcccgcccgagggcgtcaagcccaaggccacgccgccacgtcgccagccgccggtgacggtcatctacgaggacgccaactttgcggtgctgtacaaaccggcgcacctgctgtgccacagcgaccgcaccggcgatgccaacctggtggacgcctttgccgcctacctggaggccaagggcgagtacgatccccacgccgagcagcgctttgccccggccctgtgcaaccggctggaccgcggaaccgagggcctggtgctggccgccaaaagctacacggccttgcgggacctaaacgccatcatccgtgacgacctgatgaaaaaagagtacctgaccatcacggtaggtgccccgcccgccgggcggcatatcgcctggctgcagcacagcgagaagaacaacaaggtgcgcatccacgcccgccagtgcgagggctataagcagatcatcaccgatgtaacggtcatccgccagaacggcccctttgccctatgccgcatcggactgatcaccggccgcacccaccagatccgcgcccacctggcctacctggggcacccggtgctgggcgacatcaagtacggcaaccgcaagatgaacgagcgtaccggcctgaagacccaggccctctgcgcccagcggcttacctttggccgcatcccggaggaaaacaccctgcactacctctccggccgcgtcatcaagctggacgacccggccattgtaaagaagttcgatgcactgactaagactgccccgcacaaaacggaagaataaaacaacaatacaagacccatgccgagcctgcgattgcaacggcatgggtcttgctttttctattttttattgttcagcatcgggcacggcggctttggcggcctcagcgcgcaaggcttcctcctggcggtcaaaacgctcgaggaaggaatgctccacaccctcggtcttataaccgggcatggtgtccagtgcgacggaatgaatgctgcggaagatgctgttctcgatgttggggttttcccgcatcaggcggcgcagcaggaccttgacctcctgccgtttggagccgccgccaccgttatcgcagatggtgcaggcctcggtaaagcggcaggcgcactggatgaattccaagtcgttgtagcgccgccaggcgatgatgtcatcctcgcggatgcagtacatcgggcggatcagcgtcatgcccgggaagttggtgctgtgtagcttcggcggcatagcctgcatctgggagccgtagaacatgctcataacggtggtctcgataacatcattgaagtgatggcccagcgcaattttgttgcagcccagctcctgcgctttcttgtacaggtggccgcggcgcatgcgggcgcagaggtagcagggcgacttctcgctgttgttggcaacatcaaaaatgttggtttcaaacacggtgatgggcaggtgcagcagcgcggcgttgctctcgatcttctgacggttgatctcgttgtagccgggatccatcaccagatagaccagctcaaagggcacctcgctgtggcgctgcaattcctgcagcagctttgccatcagcatggaatccttgccgccggagatgcagacggcaatcttgtcccctgcctggatcagctcgtaccgtttgacggccacgataaacggcgtccacagctgtttgcggaactttttgataatgctgcgctcgattttctgataagtttccagttgacgttccaaaatcaattctccttctgtaacagctggtggtagcaggtatcaaaggcagccaggaagccgtcaatttcttcgtcggtggtaaggtggctcaggctgatgcgccacgaggacagcgcgttgcggcggtcacggctgacggcaaacacggccttggaaggcatgccgtccgacgagcaggccgatttgaccgagacgcagacgccctgctcactgagggcctgctgaaaacgggtagcctttatgccgttgacactgacattgaggatatgcggcaccgcacccgccgggctgttgaagcgcacctcggggtacgcctgcaatgcggctgcaaggcggttatgcaggtgttgtacgtgggcgatgcgctggggctgttcgaccagggctttcgtcagcgaagcttccagcgcggcggccaggcccagcgtgggtgtaccgctgcggtaaatggttgtgctggcaccgccggagatctgcggctcaataaccagcccccggcgcttgtacagtgcgccgatgccgttggggccgtagaatttgtgggcggtaaagctcatggtgtccacgccgtcaaaccagaggtccgttttacccacagcctgggtggcatccacatgcaggcggcaatccgggtactgcttgacgatctcggcaatctctttgacaggctgcacggtgccgatctcgctgtccacggcacagacggcgacaagaatcgtatccttgcgcagcagttcccgcagttgggcaaggtctgctttgccgtcgcggttcacgttcagcaggtcgatctcgtacccctgctgctgcaaaacggagagtgacgcccccaccgaggagtgttccagctgggtggagatgatatgcttgccgatgtgccgtgatgcctgggcgatgcccttgagggccaggttgttggcctcgctggcgccggaggtgtagatgatctcggcgggctgcacgcccagctggctggcgatggactcggtcacgcgggccatttcggcccgggcggcctgcccggcgcagtgggtggagttggggttggcgatatacgccagctcggtcttgcagtaaatatccagcacggccgggtcgaccggtgtgttggcggaataatctaagtagatcatggatgtcagcttgcctcatttcatggcggcggggcacttccccgggaaaaagtatataccaaattattatagcacaaacacctattgcgtcaataggttaaaaagtgggccgggccgtcttgacaaaataaaaaaactgtggtatcatgcaaaaacctaaaacaggtgtggatttttacagtagtctatactatttttcgccacacaatggttcggctgaaatgtcgacccattgtgtggctttttgctgtgtctgggaggtacactatgaatgatacgtttatgaaggagaaaccgatctttcccctgctggtcagcatggcgctgcccatggtcatctcgatgctggtcaacgcgctgtacaacatcgtggacagcctgttcgtggcccagatcagtgaggatgccatgacggcgctgtcgctggtctacccggtgcagaatcttatcaacgccattgccatcggctttggcgtgggcatcaatgcgcagattgccctgcacctgggcgcgggtgagcataaaaaggcgaatatggctgccacccatggcctgatgctctcgctgctgcacggtgtggtcatcacggtggtcagcatcctgatcatgccgaccttcctgcggatgttcaccagcgacgaaacggtcatccggatgggcgtgacctactcgcgcatcgcgttcctgttctccacggtcatcatggccaccctggcatttgagaagatcttccaggcggtgggccgcatgcgcgttacgatggtgggcctgatggcaggctctgtctgcaatatcatcctggacccgatgctgatcttcggcatcggcccgttcccgaaaatgggcattgccggtgcggcactggccaccggcatcggccaggttttgacgctgaccatctatttgttcgtgtacaatactacggagatcagtgtgcgggtgcgccgcgactgcatgacgccgaaccgcaaaatggatgtgagcctgtatgccatcggcatcccggccattctcaatctggcgctcccctcgctgctggtgtcgttcctcaactccattctggcggcttattcgcaggtctacgtggtggtgctgggcatctattataaattgcagaccttcctgtatctgcctgccaatggaattgtgcagggtatgcgccccatcatcggctacaactacggcgcgggcgaggatgcccgcgtaaagagaatttacaacctgaccctggccatgacgggaaccatcatggcgggcggcacggtgctatgcctggtgtttgccggcccgctgatgaacgtgttcagctccaacccggaaacgatcgccgcgggccagaccgcactgcgcattatctgcgcgggctttatcgtatcttcccttaccgtgaccggctccggcgcactggagggtctgggtaagggcaccgagtcgctcatcatctcgctggtgcgctatatcatcgccatgatgcccattgcctgggtgctgtgccgcctgcttggccccacgggcgtctggcatgcgtt

SEQ ID NO: 7843 - DNA, 24691 bp, Unknown
  gut microbiota DNA sequence
acatacgttctgacgtcaaattatatggtgcggctaacaggacttgaacctgcacgtcttggacactggaccctaaaaccagcgcgtctgccaattccgccatagccgcgtagcgactattagtgtagcaagtttggcagggtttgtcaatggggcgtttagcctgcggtagaaacagaattgcttgctgccgcactgctgacgttggtcgcgccagtatccacatccgctaccacgccgtattcatccgtttctacagggtcggcgtagacggcgtagcgctgggtggtgtgggtcaggatgccgaaaggatagcaggtgtacaggatgcagctgggctcctcggcgccccagcgcaccttgtcgatatctgtctccaaaatcacctgcatatcggtgatcttataggcaaaatcgccccaggtggtctccaggtgaatgatcgcgccgatctcgcaggagccgaggtcggagaagtaggtgccggtgtgggcaccgataaagacggtgccgttctcgccgggcagcacacaatcgtcctcggcatggcagccggcaccgcggctgaactgtgtctcgctgtcgcccaggtagaggtcacaatccacattggtgccctccacccagatgcggccaagtttgtcgccataacgtgtgttttcgtgagcttcactggcggcggcgacctggttggcgcgcttctgcttggcctcttcctcggcacgggcagcggcttcggcagcctcccgcgcggcggcctcgctggcagctttggcggcggcttcactctcggcagccgcctgggcagcgctggcagcagcttcgctttcggcctgcagccgggcgcgcttggcgttggcagagaccaccagcaggatggctgcggccaccgagacgaccagcgccagcccgcagagcagcagacggcgtttcaggcgggtttgttgtgctttgctcatgggcgctccccctcccccgttcaggtcaggctggccaggtaagcggcgggaccgctttggtacaggtcgcccccgtgggtatccagcagcacggtcagcgggaagtccttgactaccagtttacgcacggcctcgcagcccaggtccggccaggcgatgatttcgcagctctgcacgctgtttgccatcagggcaccggccccgccgatagccgccaggtagacggccccatttttaacgaccgactgtttgacggcctcgctgcgcttgcctttgccaatcatacaggccagccccaggtccagcaggcgcggggtgtaggcgtccatgcggccgctggtggtggggccagcggcaccaatagcacagcctgggcgctccggcgtagggccgacgtagtaaacggcagcaccctcaatcgggaacggcagctcctcgcccttgtccagcaactccatcatgcgggcatgggcggcatcgcgggcggtatacaccacgccggaaagcagcacggtgtctcctgctttcagcggtgcaaggtctgatttttgcagtggtgtctgtaaaacatattgcatgcggttcgcccccttacagtgtgcagctggcgcggcgggtgacgtggcagctgatgttgacggccaccggcaggcaggctacgtgggtgggcctttgctcaatggcaacgcccaggcaggtggtggcaccgccaaagccctgggggccaaaaccggtagcgttgatggcatccagcagttctttttccagcgcggcgtagtacgggtccgggttgggcacatccagcgggcgcagcagcgcctgtttggccagtgcggcgcagtggtcgaagctgccgccgatgccgatgcccagcacgatgggtgggcaggggttggccccggcctgtttgacggtgtccagcacaaaatccttcacgccctgcacgccgtcggcgggcttgagcatggtaaggcggctcatgttctcgctgcccgcgcccttgggggccacggtgatctggcagccgtcgccgggcaccagatgcacggtgaggaacgccggggtgttgtcccccgtattcacccgctgcagcgggtcagcggtgatggacttgcgcaggtaggctttctcgtagccgcggcgcacgccctcgttgacagcggtggtcaggtcgccgtcgatatgcacgtcatgccccagctccacaaacacgcaggccatgccggtgtcctggcagatgggcaggtctttttctttcgctgtgcagaggtttttctgcaaaaggcccagcgtttctttcgccagcggccacggttcggcggcctcggccttgtccagcgcggccttcacatcggcgggcagctgggtgttggcttcaatgcacagccgctccaccgcatcggtgatggcggcggcggacagttcacggatgatgctcatacgcgggccacgccgctttctcttgcggcctgggccacggcggcagccacagcgtcggccacgcgggggtcaaacgccttgggcaggatgttctcctcgttcagctcgtcgtcggggatgaggcccgcgatagcctgggcagcggccatcttcatggcggggttgatgtcccgggcgcggacggacagtgcgcccttgaagatgccggggaacgccagcacgttattgacctggttcgggaagtccgaacggccggtgccgatgacgcggatgccggcggccttggccaggtcgggcatgatctctggcgtggggttggccatggcaaagacgatggcgtccggggccatggtggcagccagctcaggggtcagcgcacctgcaatggacgtaccaatgaacagatcggcgcccttaatggcctcggccaggctgccgctgatcttctcggggttggtctcctcggccagtttagccttgtggccctccagcccagcggggcggcccgggaccaggatgccgtgctcgtcgacggcgatgatgtgcttggcaccggccacctgcagcatgtggatgatggccgtaccggccgcgccggggccgttctgcacaattttaatatcctcgatgcgtttgcccactactttcagggcgttgagcacaccggccagcacgatgatggcggtaccgtgctggtcatcgtggaagacggggatgtccaggtcacgctccagctcagcttcgatctcgaagcactcggggctgcggatgtcctccaggttgatgccgccgaaggtcggggcaatagccttgacagccgcaatgacttcctctttggttttggtgttcaggcagatggggaacgcgtccacgccgccgaactccttgaacagcacgcacttgccttccatgaccggcaggccagcctcggggccgatgttgccaaggcccagcacagcggtgccgttggtcacgacggccacggtgcggcctttcatcgtgtaggtgtagacgtcatcggggttggccttgatcttgcggcagggctcggccacaccgggggtgtaggcggtggacagggcgtctcgatttttgcagggggcaaggctctgcacggcaatcttgccgggatatttgctgtggagtgctagggcagctttgttgtaatccatgatgatacctcgttcctgtgttgtttttatttggtttcgtgtatcccggcggaatagtcgggttccagtttgatgatgcagaaatggtcgggccatttccgctcgacagcagcgcgcagggcggcggccagtttggcgccgcggcgctgcttttcagtgatgtattcggcggggacggcgcagtcgaagatgacgttggtatgcgtcggcccgggcacgatgcgcagatcgtggatgttggcgcgagtgtccaggctggcgacctcctgctgcaggaagctgcgcagttcggccacatggctgtcgctggcgatgacagggtcaaagtggatggtggctaccaggtcgtcttggttcagcaggtcacgctcaatgcggtcgatgacgtcgtggctgtacatgacgtcggcattggcgtccatctccacgtggaagctgaccagccggttgccggggccgtagtcgtggatcatcagatcatgcacgcccagcacgccggggtagctgagggccttgtcctcaatgtggcgtacaagttccgggtcgggggccgaacccagcagcgggtcgatggtatctttgacgagcatcgcgccgctgtacaaaataaacagcgatacagcaatgcccatcagcccgtccagtcgggcaaagccggtcacttgggtcagcacggcggcgattaaaaccacgttggtggtgataacgtcattgcgggcatcggcggcggtggccagcagtgtgtcggaatcaatgcgtcggccgatggtgcggttgaggtggctcatccacagcttgacgaggatggacgcgaccagcacgactaccgtcagccagccgaaactgaccggcgtggggtccagcgttttggcgaagctttccttgaacagctccacgccgatgactagaatcatcaccgagaccgccagcccggccagatactcgtaccgggcatggccgtaaggatgctcagaatccgcggggcgggaacccagcttgaagccaattaaactgacgatgttggagctggcgtccgacaggttgttcaaaccgtctgctgtgatggatacgctgccaaacagcgtaccaacggctattttacccgcaaacagcagcaggttgcacaccacgctgaccaggcacgccaggttgccgtaggctgtgcgcacggtgcggctggtggtattgtctgcatcccggataaaggtgcgaatcagcagttggatcataggaactcactttccgtatttcacaaaaaggcagaccgttgggtctgcctttggtggattgtttggtttagaatgtggtgggaattgtaggggccgatgctcgcattgcggggtcgcgcagcgattgatgccccagcggggcattaaaccgcacgagcgggccagctgggctggctagcgggcattgttttgcccgccaagcggtcccgcgggcggatgcaagcatccgtccttacagaagcgaggctactcccttgcttactcccgcacaatgcaggcgtcgcgctcggggccaacggaaatgtacttgatcttgcagccgaccagctcttccaggcgcttgacgtagttctgggcatctaccggcaggtcctcaaacttgcggacgccggtgatgtcgcagtgccagccggggactttctccacgacgggctgggcatcgtccagggtcttgcccatggggaaccgggtggtggtgctgccatcggtcaggcggtaagcggtgacgatgggcacttcctccatgtagtccagcacatccagcagggtcagggccagctcatcgcagccctggcactgtacgccgtagcggctggcaacggcgtcaaacgggccaacgcggcggggacggccggtggcggcgccgtactcgtggccgtgctcacgcaggacgtccttctcttcctcggtcatggccagctcggtggtgaagggaccctcgccgacacaggaagaataggccttcatgatgccgatggagaggttcagcttgtggcccgggatgccggcgccgatgggggcgtaggcagacacggtgttggaggaggaggtgtaggggtagatgccgaagtcgatgtcacgcagagcacccagctgagcctcgaacatgatcttcttgccagcctcgtctgcctcggccaggtactggccgacatcgcagatgtagggggcaaacagcttggagtacttctcgcaccaggcccacatttcctcaacgctgacgggctgctggccgtagatggaaaccatggtcaggttcttggaatcgacaatggtctcgaggcgcttcttgacgcttgcgtccatgtggaccaggtcgcccatgcgcagggtcttcttcatgtatttatcgccgtagctgtaggcgatgccgcgcttagtagagccaaactgggcgccggtcttggacaggcgctcctcctccaggccatcctgtgccacatggaagggcatagtgatggtggcgcggtcggagatcttcaggttcttcgggctgatctcaacgcccttttcggtcagtgcggcgatctctttctcgagatgctccgggtcgatgaccatgccgccgcccatgacgcagacaacgtccgggcgcaggatgccggaggggatcaggttcaggacgaacttgccgcgctcgttcttaacggtgtggccggcgttgtcgccgccctgatagcgggcaacaatgtcataatcctggctgagcaggtcgaccatgcggcctttgccctcgtcgccccagttgataccggtgatggaagtaagcatacgtttttacctctttcgtaaaaattcgtaatctaggcaataccgaggtatcgccatcaggcatttcagccttctccgggaacatccgggatccgctgccgttcttttattatagcatactgccttgcagatttccatagtgatttttggtgcaattgtgcaaggctgccttaacttttcggggtatttgcgctcccctgcccggcatgctcagcctggatgtcattggcggcctctttggcggtgcgggcgtactcggcataagggatcttcgcgccgtcagcggtctgcacgtaggtggaatccagctgcgccttgaacgaggcacgcatctcggccaggtattccttgcgcagggcatcgcgctcggcggtttcgcgctcattcaggccaacggtcttggccttttttgccagcgcattgatgcgggcaattttggttttatccatggtggtctccttttttatatagatgctgtatttaccgtaggggcggattcactatccgcccgcggaaaaacctccctctgggagggagagagcctcgccaggacccgaagcttcggacgaaaccaatgctctctcccccacccgcttcgcgggaccgcttacgcggccagacccctctgtcgcttcgcgacatctccccacactgtggggagtcaccctcccagagggggccaatgtgggttgcagccttgcaaatattataccacgcttttgcaatattcgcacgcagtcattcgtatttcaaatgtcacccactgcggcgggcgctgcaaatttacaggagcgtgaaatacaatgaatcgtgataccatcaaaatgcttgccattgtgacgatgctggtaaaccacatcgccaatgtgtttatgcccgccggggcaccgctgacgaatctttgcctgtacatcggctattttactgccgtgaccatgtgctatttcctcgtggaaggctacggctacacccactccaaaacccaatacgccgggcggctttttgggtttgcggtgctggcgcagctgccctaccagctggtcttccccgagcacggcatggcgggcatgcttcggtttaacatgctgtttacgctgctgctctgctttctggtgctggccgcgcaggaaaagattcacagcggctttttgcgtgtgttttgcattgtactgttgatttttgcgtccatcttctgtgattgggcactgctggccccggtgtttacgctgctgtttgcctgggccgaaaactcccgcctgcgcaaacacgttgcctttggcgtggcggcggtgctgtacggcggcatggcatggctgagcagcatgcgcaccttgggtgcggtgggcgccctgccggataccttgggctgcgcgatgccaattctggtctccggctttttcatcctgtatctgtataacggccagcgggcggcgcagcatcgcggtttttacaagtggttcttttacgccttttacccgggccatttactggtgctgggcctgctgcgggtggcgcttttgggctgaatttggccgggtcttggccatatttcacacctttttcatcgtttatactgtacttttgccaaaatgcgtgtataataaaaaggtatgcaattttaagaaacaggagaatcccatgaaactttctaccatgaaccgtgtcctggccgctgtgctggccctgggcatgactgctgccctggcaggctgcggaagcactgcttccagcgaggctactgccgaatccgctgctaccgaggaaaccgctgcgtcctccgccaccgaggagaccgcagaggcggacgagtccgcttacgactacctggctgatttcagcttctcccaggcttacgacgacaaaggctacctgaaggacgtcaccgctctggattacgtcactctgcccgatgactacgctgacatcaccatcgacgccgacctgggccaggtcaccgacgaggacatcagcaactacatcgaccagaccgtcctgtccaactacgccaccgacgagaaagtcactgaccgcgccgctgctgacggagacactgtcaacatcgactacgttggttccgtcgacggcgtggagtttaacggcggcaatacccagggcaacggcgctgacctgaccctgggcagccacagctacattgacgacttcgaggatcagatcgtcggccacatgcccggcgagagctttgacgtcaccgtcaccttccccgaggattacggcaacgaggatctgaacggcaaggaagctgtcttcaagaccaccctgaactatatcaaggagtccaagaaccccgacctgaccgacgactgggtcgccagcaacctgggtgaaacgatgaacctgaataccatcgatgagctgaacgacttcgtcaagaacacgatgctctacgaccagcaggccagcaccgtctacagcgccctgcacgataaggtcagctttgccaaggagctgccccagagcgtgctggactactaccgcgatgttgtgctgtaccgcgtgtacagctatgccaagaactacggcacaacgatgaccactctgctgcagagcggcatgctcggcaccagctatgacagcatcgacgcttacctcgaggatatccagggcagcctgaacaccatcaccgagcaggccctgctgatgcaggccatcgctgagaagcagggtttggtctgcgatactgccctgatgaaccaggacttcggtaagttctacggcaccaccgaccccagcgcctacatctcctcctacggcgagaactacatcaagatgaacgtgctgcagagcgaagttatgcagggcctcatcgataacgttaagtacaaataaacctgcctgttaaagcagttttgcccctggcacccgtttgggatgccgggggcattttttgcctctcccctattgacaaggaggaatgggcgtggtattatacagatagatagttagacaaacatctaaatatctaataagtgaaaggagaccccttagatatgggtgacgcattcaaggcgctggcagaccccacccggcggcgcattttagagctgctggcccagggcgagctgacagccggggagatcgcggcgcagtttgatatgaccaaaccttccgtcagccaccatttgaacattttaaaggcggcggatctggtcagtgacgagcgcagcggccaaaatattgtctacagcctgaacctgacggtgtttcaggaattgctgaagtggttttatgattgtggtttcgttaaaggaggaaccgatgatgaaaaataataaattgggctctctgttctggatactgctggttgtttgtattctgaatatcgtcggccatctggcggtctaccctgccctgccggataccgtgcccacccactggggcgctagcggcgaggtaaacggctggagcagcaagcagagcaacctgatcttctgcgtgctgccactggcgatgctggtttttatggaggtcgtgcgccgcatcgatcccaagcaccagaattttgagcggttcggcaaggtgtggaacatttttatcacgctgatggtactgcttaccgcgggcatgacttggctgactgagttgaccgtgtttaacatgctgccgcaaagcagcaatatcatcagtttgctggtgtgcggcggcgtcggtgtgatgttcatcatcctgggcaactttatgcccaacatcaagcagaactacaccttcggctgccgcacgccctgggcgctgaacgatgagcataactggcagcgcacccagcgcatgggcggcatcacctttgttgtgatgggcattacgctgatcgcggtggcctttttggccggcctgctgggcgatactgtcacgctgatcctgctgctgtgcgccgtgtgtggcggctcggcgtggatctatctgtattcctatcttgtgtatgttggcaagatgaagtaaaaacagcaccttgcataccagccgcaaggccgagaaaaacaaaaagccccatgtctgcaccatgaaggtgctggacatggggcttttgctgcgtgttacttcatgatgccgtctccgcccatctgcgccgtcatctcacggatgcggtcaagggggaacggcggctcgcaaagaggtttcatggcaatggacatactccttttgtttcaaagcattgcagagccggacgccctgctctggcattgactatagcatggcaaaaaaatgtttgtcaagaaagatctgccaaaagccaaccggtctgcatcctgtgccgtacaggatgcagaccggttaagctgtgcattttaaaattttatctgatttctaggtgcatcttttgtaaaaaagccaatctctttattcgtcttattcgtcgcccagttctgccgcaatgaactgtggcacggcgttaggctcgatgcccagaatgtacgcgaactcgctgtgcagcaggttctgcgcctcgtgcaaagcgcggtcgtcaaaggccgaaagccccttgccctgggccttgcgggcctggtgctgggcgtggatgtcccgcaccatccgcagcagccgatggcggtcgccgctttgcagggcctgacggtactgctccttgcgggcatcggcgtccgcctcgtgggcgggggcaggctcgtggagcattgccagcagttcctctttggtgggcagcgggcgcatgcggtccagcagcacctggctggtgcaggggacgcagatggtcatgctttggtcgtagaccggctttaagatcaggcagtcgcagggctgccccgccagccgaacacgcttctgctcggtgatctcgcacacgccatttgtgccgtaactgacaatatctcccggatgaaacataattgacctccttgtaaagtttcgatactatgtattttcatatatagtataacacaatttcccgggaaatgttatagactttttacacaaaaaatcacccgcccaccccctgtgcggtttgcacaaagggggatgacagcaaaaaggctcccctcaagggaagccttttaatgttccttacttatacagatccaccagattcagcaggatctcggtgcactggtccatcttctcggcggtgatgcactcacacgggccgtggaagttgaagccgccggtacccaggttcgggcagggcaggcccatatagctcagggtcgcgccgtcggtgccaccgcgtaccggcgtctcgataggctccagcccggcagcacggatggccttgcgggcattctccaccaggtggaagtggggctggatcttctccagcatattgtggtagctgtcgtggatgtccagctcgacagtgccctcgccgtagcgctcgttcaggcaggcggcgatatgttccacctgggccttgcgggcggcgaacttggcggcatcgtggtcacgcacgatgtagcccagcttggcggtggtcacatcacctaccatgctggtcaggtggaagaagccctcgcggccctcggtgtgctcgggacgggagaaaacgggcagagcggcatggaactccatggccacattctgggcgttgatcatggtattcttggcgctgccggggtggacgctgaaaccgtgaacggtcacaacagccgcggcggcgttgaagttctcatagctgatctcgccggcgtcctcgccgtcgacggtgtaggcgtaggcggcgccgaagccctcgacatcaaacaggctggcaccctcgccgatctcctcgtcgggggtaaagccgatgcacagcttgccgtgggggcgcttctcggaaataacgcgctccagcatcgtcatgatctcggacacaccggccttgtcgtcggcgcccagcagggtcgagccgtcggtggtgatgagagtctgacccttcatctcggtcaggaacgggaactgggcggggtccagcacagtgccggtggcaggcagtacaaccttgccgccgtcgtagttggggtggatctgcgggttgacgttttcgccgctggcgtcatcggcggtgtccatatgggcgatgaagcccaggggcttggcgctctcctgtcccggagtggcgggcagcgtggcgtagacgtagcagtgctcgtccacatgggcatcggtcaggcccaggtccttcaactcctgcaccagctggtgggccaggtcaaactgacgcatcgtgctgggatgggtgccgctctcgggatccgaggtcgtccagaccttgacatacttcaaaagacgttcatatgcgcgcatgataggtgtcctttcttaccttataataatagtaaaaggtgtaaatgttctgtagttagtataacacaaataccaaatcctgcaagaggggcggttccctcttttcaaatggggcattttatggtagaataataaagattataaaggatacctgcgcccggcggcgcttaacgtataaggaggccatcatggcagacacgatttttaaagacaagacccttttgatcaccggcggcacgggaagcttcggcaatactgtgctgaagcacttcctcaccaccgacatcggtgagatccgcatcttctcccgcgatgagaagaagcaggacgatatgcgccacgagctgcaggccaagtatcccgcctacgccgagaaggtcaagttctacattggtgatgtgcgcaacccgcagtctctccgcgatgtcatgcccggcgtcaacttcattttccacgctgctgcgctgaaacaagtcccctcctgcgagttcttccccatggaggccgtgcgcaccaacattgaaggtaccgacaacatgctgcacgccgccatcgaggccggcgtcgagcgcgtcgtctgcctgtccaccgataaggctgcctaccccatcaacgccatgggcatctccaaggccatgatggagcatgtcatcaccgccaacgcccgtgtgtccgcccagcgcggcggcccggtcatctgctgcacccgctacggcaacgtcatgtgcagccgcggcagcgtcatcccgctgtttgtcgagcagatcaagtccggcaaccctatcaccattaccgaccccaacatgacccgcttcctgatgaacctggacgaagccgtggatctggttatgttcgcctttgagcatgccaaccccggcgacctgttcatccagaagtcggacgcttccaccattggcgacctggccaaggctgtgcagactctgtttggcgacaccggcacgaatatcatcggcacccgccacggcgagaagctgtacgagaccctgatgaccaaggaagagcggatgcgcagcgaggatatgggcaattattatcgtgttgctgccgataaccgcgacctgaactacgataagttcttcgtcaagggtcaggtgcgcacccaggccgacgaggactacaccagccacaacacccgccgcctgaacgtggaggagaccatcgccaagatcaagaccaccgagtacatccaggagatgctgaaagaggaaagcaaggcatgaaaattcttgtcaccggcgccaaaggctttgtagggcgcaacctgtgcgagaacctgaaaaacctgcgggacggcaaaaaccgtacccgccccgccctgaccgtggacgagatctacgaatacgacatagataccgacccggtcctgctggaggaatactgcgccaaggcgaactttgtctttaacctggcgggcgtcaaccggcccaaaaatgaggctgagttcatgcagggcaactttggctttgcctctaccctgctggacatgctgaaacgccacggcaacacctgcccggtcatgctgtccagcagcatccaggcaacgctcatcggccgctacggccagagcgattacggcaaaagcaaactggcgggcgaggaattgttctttacttacgcccaggagaccggcgcgccggtgctggtctaccgcttcccgaacctgttcggcaaatggtgccgcccgaattataacagcgctgtagcgacattttgttacaacactgcccacgatctgcccatcacggtgaacgaccgcgccaccgagctggaactgctgtacatcgatgatctggtggaggaaatgctggacgcgctggaaatgcacccccaccgctgcgattatgacggcctgacgccggttttcggcgcccatggccgctactgtgccgcgcccgtgacccataaagtgacgctgggagaaattgtggacctgctgaaaaaattccacgaccagtcgcgtacgttggtagtgcctgccatcccggcgggcagttttgccaaaaagctgtactccacctacctttcctatctgccgaaagaaaaggttgccttcccgttaaaaatgaatgtggatgcccgcggcagttttaccgagctgctcaagaccgagaactgcggtcagttcagcgtgaatgtctcgaaacccggcatcaccaagggccagcactggcacaacaccaagtgggagtttttcattgtggtggcgggccgtgccctgatccaggagcgccgtgtggacagcgatgaggtgctggaatttaccgtgagcggcgacgcccccacggccgtgcagatgctaccgggatatacccataatatcatcaacctgagcgacaccgagaacctgatcaccctgatgtgggccaacgagccatttgacccggcccacccggatacgtttgggctgaaagtgtgatgcggcttttatgcctccctctgcgagggaggtgccccgaaagggcagagggagagagccgtgccgaggcccgaaacttcggacatttattagtttctctcccccacccgcttacgcgggacgacttcgtagccggacccctctgtcgctggcgcgacatctccccgcaccgtggggagtcaccctcccagagggggcttcaaaagagaggtgcaatatgaacaaactcaaactcatgaccatcatcggtacccgaccggaaattatccggctgtcggccgttatcaaaaagtgcgatgtctactttgaccagatcctggtccacaccggccagaactacgattataacctgaaccaggtcttttttgaggacctgggcctgcgtgcgcccaacttctacctggacgccgtcggaaaagacctgggcgagaccatcggcaacattattgcaaaatcctacgctctgatggtggagcaaaagcctgacgccctgctgatcctgggcgacaccaacagctgcctgtctgccattgcggccaagcgcctgcatattcccatcttccatatggaggccggaaaccgctgctttgacgagtgcctgcccgaggagaccaaccgccgcattgtggaccatatttctgacgtgaatatgtgctattccgagcatgcccgccgttacctgaacgccgagggcaccgccaaggagcgtactttcgtcaccggttccccgatggccgaagtgctgcacgccaacctcgccaagatcgaggccagcgatgtgctggagcgcctgggcctgaagccgcggaagtacatgctgctctccgcccaccgcgaggaaaacatcgatacagagcagaattttatcgacctgtttacctccatcaaccatctggccgagacctacgacatgccgattttgtacagctgccacccccgcagcaaaaagcggctggatgctatgggcttcaagctggacgagcgcgtcaagctgcacgagcctctcggcttccacgattacaaccacctgcagatgaacgcctttgcggtcatctcggattccggcacgctgccggaggaatccagcttctttaccagcgtggggcatcccttcccggcggtctgcatccgcacctccaccgagcgccccgaagcgctggacaagggctgctttgtgctggccggcatccgcgccggcggcgtggagcaggccgttgagaccgccgtggccatgaacgccaacggcgattacggcatccctgtgccttactacaccgaggatgtctccaccaaggtggtcaagatcatccagagctacactggcgtggtcaacaagatggtgtggcggaagaattaagattggaacaacaaacctatgcgaattttggtcgtgacccagcatttttggccggaaaatttccggatcaatgatattgtcgagggctttgcgcaggatggactggacgtggacgtgctctgcggcctgcccaactaccccaagggcgagtggttccccggctacagcgcggacggcccctttgaggaaacctacaaaggggcgcacattttccgtgcacgggagattccccgcaagggaaacaccggcaagacgatctttttgaactacgtcagctggccgctctacgcggcgggggcgctgaaccgcctgcccggcgggtacgatgcagtgttctgcttcaacaccagcccggtgctgatgtgctggccggccattaaatatgccaaaaagcataaaattccctttaccaactatgtgctggacctctggccggagaacctgtacagcgtacttccggtcaaaaacagctttatgcgctgggtggcccagacggtcagcgacagcctgtataagcgcgccgaccgcctgatcgccatgagtgtaccgctgcaaaagcggctgatcgcccgcaccggcaagccggaaaaagacgtggccgtaatttcacagtactgcgaggatttttacgctgtcccctgccatgacccagagctggaagcccgcttttccggacgattcaacctggtgttcaccggcacgtttaccccggcacaaagcctgaatatggtgctgcgcgccgtgctggatgcccgcgctgccggggccgaaaacctgcatctgctgctggtgggcgacggcatgagccgcgagagcttgcaagccctggctgaagaactccacgccggggatgtggtgaccttttatggcagtgtacccgcagaaaaggtgccgagttttacaaccctggccgatgccctgctgatctccctgtctgattccccagacttaggcctgacagtgcccggcaagctggccagctatatggccgcgggtaagccggtggtggccagtatgaacggcgccgggtacgaggcggtcaaggaaagcggcggcggccttgtcagccctgcctgcgaccaggccgcgctggcggccaacctgctggcgctgtaccgcatggctcccgagggtcgcgccgccctgggcgccaaagccaaagcctactacgaagcccactaccgccgcactgaactgctgcgccgcctggaaagctttaccctgcggggagaataagaaaacacgaggtacccccttttggataaaaaaattttggtgttgatcccctgttataacgaggaagaaaacatcgtggcaacggtggaacatctgcagtccacctgcccgcaggtggatttccttgtcatcaacgattgctctaccgaccatagtgccgacatcctgcgcgcccaccattacccgtttttggacctgccggtcaatctgggcattggcggcggcgtgcagtgcggctaccagtacgctgtgcacaacggctacgacgtgaccgtgcagatggacggtgacggccagcacgaccccgcctacctgatggaagtggtgcagcccgtgctggacggcacctacgatatgtgcatcggcagccgctttattaaaaaggagggtttccagaccagcttcatgcgccgggtgggcatccgttttttaagctggctgatccacctgctgtgcggcaagcgcgtgctggatgttaccagcggtttccgcgcctgcaacgcccggatgaccgcctattttgcacgtcactacgccattgattacccggagccggaggctatcctcgccgccagcctggcgggtttctcggtgggcgaggcccccgttatcatgaaagaacgccagggtggtgtgtccagcatccacagctttaaaagcgcctactacatgatcaaagtgtcgctggcgctcatcatcgaccgcttctccatccataaggtaaaaggaggcaaggcatgaccccacaattgcagctgtttatggtgctgggtgcgctgatgctgctgtgcatcatttttaccctgctcaagcgcgggctgatgagtgtaaagtacagcctgctgtggcttttgctggcggtggcgctggtcattgcggcggcgttcccctacgtaatttacgtattgcgggacgttttgtccattgaaatgccggtcaacctggtatttttgctgatgttctgctttgtgctggtggtgctgctttcgttgagcatcgctatcacccagttggccgaaaagtgcaagcggctgacccaggctaacgccattttggaaaagcgtgtgcgcgacctggaagaaaagaaccgataatacgttataaaaagacgttacaaaagcggaagagagagtatccactatgacgatcacttgggagcagatcctcgcgttcctgtgcgaggatcagtcaatggcggtcacatcgctgttgtttatcgctttttttgtggcagtggcgctggtgcattatctgttgccgcgggtgctgcgcccctactttctgctggcggccagttatggatttttctgctatgaccccgtcaaccgcccgctggtaggtgtgctgctgggggccacggcggtcagctggctgtgcggcctcatcatcggcaaagtcaaggtcaaacctgtgcgggtgttggcgctgctggtgacggtgctgggcggcgttggcatcctggtttactacaaatactggaacatgctggccgataccctcggcggcagcatcctcagtcaccgggacaatctgctggcacccttggggttaagctacttcacctttgcggcgatgagctacaccatcgatgtgtataaacgacgctgcaaggtcgaaacaaacccgctgcactatgcgctgttcgtcagcttcttccccacgctcatcaccggccccattgagcgctacccccagatgcgcccgcaaattcaaaaaagccgccgcttcagctacaaccgctgcgcgggcggcgcgttccgcatgttgtggggctacaccaaaaagatggtcatcgccgataacctgagccagtacgtttccttcgtctacggtaatatgtcggagatgagcggccctaacctgtttgccgccaccgtgctgtttgctgtgcagctgtatatggacttttcgggctgctgcgacatcgtgctgggcgcggcgcgcatcctgggctatgacctgattgagaacttcaactccccctttgaggctcgcagcttcaacgatttctggcgccgctggcatatctcgatgaccggctggttccgagattacgtctacttctcgctgggcggcagccgctgcgcgccctggcggcactacttaaacatcgtcattgtgtttttgtgcagcggcctgtggcacggggccgattggcggtacctggcctggggccttgcctgcggcctgtgcgctgcctttggcgccatgaccgccaaggcccgcaagaagcttgaaaaattcaatccgctgtaccgccaggcctggctgaaggccgtctgccaggtgaccatcaccgatttgctgttctgcgggaccctcgtgttcttcgcggcggcgctgtacaacgctgacccgttcgccatctacagcagcatgctgcagggctggaacggcctggccggcagctggcaccaggtgcagcagatgctgctggattgcggcatcgatggtcgtttgccggtggtgctgctgtttggcacctttgtggtgctggccgtggagcacggcgggcgcagtgtgacccgctggatccgtgagcaggtttggccgctgcgctggaccctctactacgccgcggcggccgcgatcttgttcttcgcggcgttcggccagtcggcgttcatctaccagcaatattaacgaaaggcggtgcattatggctaaatctcctaccccgatccccgcgccgccggttaaaattcagcgcgataccaacggcgcggccccggccgccccagcggcaaagccgaaaaaggcggcccccaaaaagcgccgcaagcgccgccgcaatcccttgctgtggtttttgcacggcctgatccgccgcatctactttggcctgaaaaccgccagccgcctggtgctgctggtacccatccttgtgttcatggtggcgttcagctataacgtggaccgtagcggcctgttccagggcgcactggcaccccgccgcatcgtggacctgatgctgcaggggtacgatgtgaccaacttcgagcagatggacgagcgccaggtggtacaattgtttgcgcaggatgtggagcaggcccccgaggccattggcattggctccagccgcgtgctgcagttcaaccgggaaaacaccggcgtggataccttctttaatatgggcgttaccggcgcggacgtgcgcgacaatatgaccagctactacaagatggtcagctacggcaaaacgcccaaggtgctgctgtggagtatcgacccctgggtcttttacggcagcgaggacgcctttgactcccgcgccgacgctgacctgtacaacgagtttttgaccaaggtgctgaacgtccccaccgattatgaggagccggacaaggtggaactgtggaaggcgctagccgacccggcctacttccagggcaacgtggactactacataaagaaccgcggccagaccaccgtcaccgatgacgacggcaataccatcgagttcaaccctgtgcagggcgacccctacgaccagacaacgacgatcaagcggtcggacggcagcgttttgtacgatgtggcgttccgtacccagacggcggatcagatccgcaccctggccgccgaagcctgcatgagctttaacagcgtgcacatggagggcttcgacgagatgagcgccacccagatccaggcgtttgagtcctttatggactacgccagggagcagggcactaccgtgattctggtgctgtcgccctggcacccgtacctctatggttacctgatcaccgagccggaactgcacaaggggttcttccaggtggagaactggctgcgcgaatactgcgcccaaaataacgtgccgctgtatggcagctacgaccccgagtgcatcgacggcttagaggaaacagacttttttgatggcctgcactgcgccgggactggcattgcacggttcttccccggcataccgcgggcattgcagcagttggagacgggcaccctgcccgacccgctggccgtgcacccgcgcaccagcctggaaagcgcggacccggatgttgtggagaccctgaacggtgagactgccgaaacagcacaggagggataagtatggcattcatttctatcagcatcaccaaaaatcacccactgatcctgggcaagggcggctttggccgccagctggcggattggctctcggccgaaggctggggtgaggcggaattcctcgatgatagcgcccccggctgcgtgggcggcctgcgtgactacgccgaccctaagctgctgaaaccgggccgcccggcctttgtggccctgggcgacaacgccctgcgcgtggagctgctgcaaaagctggcagcggccgggtatgacacgccggtgtttatcagtgatatggcggccgtcagccccagtgctgtgttggagccgggctgtgtgatcctgccccaggcttatgtgggtgccgatgcgcatctgggcgtgggctgcatcatcaacggcggggccatcgtggaccacgacgcggtcctgggccgcggcgtgcatgttgcccccggcggcatcgtaaaggccggtgccgaggtggaagccctaaccaaggtggattctggggaaatcattaaaaagtgatgcgaccttaaaagcttctctctgtgagggaggtgccccgaaggggcggagggagagacaaataaatgagcggctgctaaattttaggctctctcccccactgcctatcagcggagtccttcggacccggtcccctctgacgctttgcgacatctccccgcactgcggggagtcacccacccagagggggccttttgctatcccaaggaggttctatgtcaaacaacaaaactgcacgccgcgattatattgatattatgaaaggcctgggcatcctgctggtggtgctggggcattttatggagcagttccgcttcggcttcaagcccatcggggcgacgtttatctgcatctacctgttccatatggcgttgttctgcatttgcagcgggctggtggcgcatttcagcttgtggaagcttatcacccagcaggtgtggctgtatgccgtgggccaggcaatcatgctggcgttccgcgccgtaattttgcgggaggattttgctgcctccggcgggctgctgctggcgtttttgctgccctggcggcacatgtggtatctgtacgcgctgatcttctggcatctgaccctgccgctgttgacccgtctgcgagataagggcctgccttttgccctgctgggcctggcaggtgccgtggcgctgggcctgtgggccggcaatgtggattggccgttcacactggtgcgcgtgtttgcttactacccgttttatgcgttcggtgtgctgttccgcccgcagatcgaccggctggatgacctggccgcgaccagccctgtgatgcggctggccccggcgggggcgctggtggtatgctacgggctgtatttccgcagcctgatgctgcaggaaggtcagctacgggaaagtgccaagatttttaacgatgtcgcctacggcgatgggtatgccatgcccgaccgggcacggttctacgccatcggtattgtgaccagcctggcgctgatcgccgccctgggcggatgcaaggcctttgcaggcctaggcaaaaagacgctggcggtttatcttttccatatgccgatttttgcgttttacagcgaactgggctttttccggctcgcccacgaaaagccgctgccggtcacggtagtatttgtgctgctggaggccttgggctgcgtctgcctgctggccagcgcaccggtgagcaagacatttgatgctgtggcaaatgtctggtataggctgcgtaaaaagtgatttcgtcctttggggcgccgggagactggcgctcttttcttttgcacaacacctattgacaacgctgctactatgtattacaatgtactcaaacaacaccatggtaatacaaggtagcggaaggagggcatgctttgttcgaccaagcacagttacgcaagggtacgctggaaggctgcattttaaagatcattgaccgggaaccgacctacggctatgccattgccaccaccttgcgggacagcggctttgccgacctgaccgagggcaccctctatcccctgctgctgcggctggagcgcaaggggctgattggcgccgagtaccgcgcgggttccggcgggccgagccgcaaatattaccagctcacgccagacggagagacctatctgcaggaattcacggctgcctggcgtgccgccagcgccgccgtcaaccatattttacagggcgaggaggactgaacatgaagttccgcaacgagtacaaacaactgaaacaggaaaacaacctcatcttttccacgctggccgagtgcgaccgcgacaccatcaccgacatcctgaacaccatcagcaatagccgcggcatcaattacgatgtggagctggtgcgcaaggacctgatcgccatggcggccagcgccgaggcagacggccaatacctgcccgccgtcatcggtgacgtggagacttttaagctggacctgctggccagcattccccaccccaaactaatagactacatgctggacagcctggtatggatgtgcatttacgggctggcgatgtcaacgacctatctgctgctgcgtggtgcctgggacagccattttgacgctgccatgctagggatttgcatcgtggtgatgatgcccagcgcttggctgatgcagcgcatcgttcccgcgtcctggctttcctacggcaaggggctgcgctatggcagtgcgcagacggtgctgctggcgttgtggcttgtggagtttgggctgatttacaactgggtctaccccaatctgcccaacattggcatccccaacgtggtggccgccgcgctgtttgcggtgcttaccctggccttgcgcgcttggcgcacccaccgctgcaatcagttggccgatgcccgcccctggcgtgacgtggtcgacagcaaaaaacaataaaaacagccctcgctggtttgaactgcaccccatttgttagacagtat

SEQ ID NO: 7844 - DNA, 5630 bp, Unknown
  gut microbiota DNA sequence
ctttggccggggccagccccagtgccagcgcgacaacagccgtaaggacaacggttagaacaagcattcgcaagggttcctttccagagtgggaatcaggttgcagtttttactgctgtgcgtactttttgatctcttccagccagaaggcagcggttttgtcccagctgtatttggccaggactttgtccggcggggcgacgggccgggcggccaaagcgtccaggtcgacctcgtagtcgtaggggtcgaagtagcgggctgtatcgccgtaaagttccggcaggcagctggctttggccagggcgatgggcgcgccgagggccagagcctccagcggcggaatgccgaagccctcgaacaccgccgggtgcaggaagagacggcagtgcttcatcagggcagcgttttcggcgtcggagacatagccggggtagaacacattgtgggtgtccttggcctcggtgtcatcgccaaaggcgcgcaggtccttgccgcctgccaccacgaaggtcttatccgggttgcggcgggcgacctcgcgtatccacttaaagttcttgtggccggccaggctgcccagagcgtagaaatactcaccctttttgacggcggacatcctctcaaagatgctttcgtccggctggactttcgccatatgctcccagccgttgtaggtcacgccaatcttatccagcgggatgcccagcttatcatggataagctggcgctggtcatagctgacggtgaacactcgctgtgcaaaccatttggtggacaggcagtgcacccagaacttgaagcggaaaaagccgcggtcggtatccatgaccagggggcggatgtcgtgcagcacaacaacgctgcggcgggtcatgagcatatcactggcaaggccgacaaagaacgcatgctcgcgccgcagataggcaggcagcaccgccatgttataaaaatatttgaccgccttgagcggtaccagcttgatatttttcagttccggcagatgaatctcgcggccatcgtcgcggtaggcgatgcgcacgtccaggccggtgccctcgatgagcttgtccagccgcactactgtctcgtagacatagcgggggatgccggtgatattatcgcacaggacagtgccgttgatgacaatggggttcaaatctgttcctccttctcccagtgggagcagtccagcagttcctgctgccaatccgccatgcggcgggtacagtattccttgatctcccgctcaaaccgttcctcgctgaaagcgcggctgtgttcgcggatttcctctttactataggcgacgccatctttttcaaagcgctggatgcaggcggccaggctgtcggcggtctgctcctcgaaccagtaaccagtcttgccgggcagcacggtctcgcaggcgccgccgcggccgtaggccagcaccggcgtaccggcgctctgggcttccacgggggtgatgccgaagtcctcctcgccggggaacaaaaacgccttggcgcgcaggtagtaaccgcgcacttcctcgtcggtcaggccgccgcccttgaactcaatggtggggccagccatggccttgagcttgtccatctctccaccgctgccgatgaccaccagccgcttgcccagtttggtgcaggcctgcacggccaggtcgacccgcttgtaccaggtcaggcggccgacggtgaggtagaagtcctccttttccacaaaaggactttcgttgatatggcagcaggggtagatgacgtcgctgtcgcggcggtaatattttttgatgcgctgggcgatgtagtgggagttggcgatgaagtaatctacgcggtccgcagcgcacttatcccacacgcgaattttgtgcatctggcgctgcatgaccttacgcaccagccagttggcgttgtcgcggtaggtgtagtaaaagtcccacacatagcggatgggcgtatggcaatagcagatgtgcacagcatccgggcgggtgataacccccttggagcaggaggaggaagatgacagcacgaggtcgtactcggataggtccagttcctcaaaggcacggggcatcaggggcaagagccctttgtacagcttggtagcaaacgggatcttctgcacccaggtggtgcggatgtcgtagtctttaaaccacgcaggcatgttatctttatcatacaccagcgtgtagatgacggcgttggggaacgcatggtgcatgcagtcgaccacgcggtccgcccctgcataggtcaccagccagtcatgtacgatggctactttgggttcctttttcctcattttccgtctcccatcaagcccgccggggcaggcttactgcaatttttcgtcgttgaccatcttaccgccgaataccgtgcggaagatgatcttgatgtccagcgccacggtccagttttcgatgtaccagatgtcatagcggatgcgctcggcaatgtctgtatcgccgcgcaagccgtggatctgtgcccagccggtacagccggggcgcacctgctggcggaccagatagcggggaatttcctctttaaaatgctccacatggaaaggcacctcaggccgggggcctacaagggacatatcccctttaagcacgttgaagaactggggcagctcgtccaggctgaacttgcggataaagctgccgaagtgggtcttacgggggtcgtagtccttagaccagccggtctcctgctgtacattgacccgcatggagcggaacttgtacatcatgaagggctttttgttgaggccgatgcgctcctgcttgaagatgatcggcccggggctggacagtttcacaccaatggccgtgaccagcatgaccgggctggtgagtacgatcagcaccaggctgccgataatatccagcccgcgcttgatggcggcgttgaggatgttgtcaaagggcgtctggcgcacattgatgagcttgcactcgtccagcacatcgatggtaggccgagcaggcaggtagtcgctgtaaaacggcaccatcgtaatgcgggtgccgtgcttatcgcagatggcgaaggtgtggggcagctgatcgatctcgttggcttccagcgcgaccacgacctcatccagggcggtgctttccagggcttcgtccagcttatcgtagccgcccagatagggcacgcccagacccggctcctcggtggcagccaggtagccgtccaccacaaaaccgtagtaggggttatgctccagcgcgcgcaggtagagggccgccgatttgccgccgcccaccagcaggatgtgccgcaggcccaggcctttgcggcggcgggcacggtccacccagcggcggatcatccgcttggcgaccatggccacagtggcaaagccgtagaacaggcccagcactacgcgggaatagtcgtccaggtgcatcaggtagaggaagaatacgaacaccatgatgcccgcggcgttgatcatggccatgatggtgcagcgccgggccagcccccgcaaacgcgaggagctgtacacaccggctacccagtaggccagcaccagcaagacagaggtgcctgccccggcaataaagttgcgcgggtcaccggccacctgcagcgcagggccggcgccgccgggctcaaaaaaaactacataattaaaacgcacatagttggccagcagaaagctgacgaacagcagcaccacatccagcagaccgctgagcatacttttggtacgttgatttttttccagcaacgagggtgtcctcccttggacagaaattcatatctaattagcatagcacattttcgtgctttttgcaatcagcggtaaagatcctgcaggcggtccagcgtctttttcatctcggcgcgcacctcgggcgggcctgccaccaccacaccggtgccaaagccagccacccagccaaagaactgggggctgacctgcacctcggccatcatggtaaaatgctcaccgtcatcgcaggggactaaagtcggcccggtgccgaaacggtcgatcatggccccggcaaagcggttctcacactggagcgtcacctttttcagcgggccgttgaacatgccgaacatctgctgcatgtaggcgttcacgtcaaagttggcgtactcgccggcgccttcgcgggtggtaccgggcagctggtgcacagcctgcatcttatccacacggtagtgcttcaggcggccctcggtgtaggcgataaggtaatagttcgcattctcccacaccagcacccaggggctgacgcggtacagctggccatcgtgacggggggtcatctttttttgcaggttccagtcgcagtatttgaactgcacctgctcccctgccgtgatagcggcatgcaaggcatcgacggtatacaaaatcttctcgtcggtgcttttcaggcggccgctgactaagactttacggttcagctcctcctgccggtagcaggaagtgaactggcccagcttatcgatcagtaccttggatttgcgggcggtaatgaacttgctggcgtacacagcgtccaccagcagtttcagctcagccagctcaaagggggcgtcggtcatgtaatagccgccgccccggccccgtttttgcatgatctcataggggaagtccggcatctcgttcagggtgttcaggtcgtcatagacgctcttgcgttcggcttcgatccccttttctttcaatttttctacgatctgcggtacacttaacggatgacgttcgtcggtctcccgcgccaaaatctgcagcagtaccagcagtttccgtttctggccttctttacgcggcatagcacttgctccttttacagaaggggacccgcacgatgcccggccttatcggcgcaggctgctcagatcatgcggtatagccccagaatatccagaacatacagtcccattatacaccctataggccgtgcaggcaataggaaagggcgagaaagagtcgttttgcagtagtttatcgctccagctccgcaaagatcgcacccaggtctgcaaaaatatcatggggcagcatggcggccatgcctaagcgtttggcgcagcggtcccctgccgcgccgtgcagccagacggcagcgatggcggcgtcctccgcggtgcggccctgtttcagcccggcggccagcagacccgacagcaagcctgcgaggatgtccccgctgccgcccttggccaggcccgcgctgccggtgggattgtggtagacttcgccgccgggggtggcgatgagggtgcctctgcctttcagcaccgcgatgcagtgatacatcccggccaggcggcgggtggcggcttcgcggtcagcctgcacttcccccactgtacaatccagcagacgggcggcttcgccggggtggggcgtgatgaccgtctggtccggcaaagggcctttgattttgcccgcagccagcgcgttgagggcatcggcgtccagcacagcggcggaccagggggcttttttgcccagcagggcgttgcagaccggggcggcgctttcacccaggccgggccctgccagcagaacggtgtttttgccgtcgaaccagctgcgcagcgccccggcgtcctgagggtggatgccgccgttag

SEQ ID NO: 7845 - DNA, 6110 bp, Unknown
  gut microbiota DNA sequence
agcattccggcgtacgggtcagcaccatctgcaccaccggctccacgctggccaggtagacaaggcccgcccctgcgcggagagcgccctcggtgcagagagccgccgcgccccggtaggccatactgccagccgccgccagcacactgccaaagctacccttgttggcatctgcctcccgccggggcaggcggtcctttgccatttcctgtgtgatctcgcgctgcatcttgcatcctccctgaaaaaagctataataataggtacattataaaacacttcagcaaaaagcgaaaggggaactttgtatggtaccggcattggaagaaattttgcgggatacccgcagccttgtatttttcggcggggcgggcgtttcaaccgagagcggcatcccggattttcgctcggtggatgggctgtaccaccagaaattcaagtatccgcccgagacgatgctctcccatacgttttacaagacccacacggccgaattttacgatttttaccgccagaagctcatcgtccacggggccaagcctaatgccgcccatctgcggttggccaaattggagcgcgagggcaagtgcaaggccgtggtgacccagaacatcgacggtctgcaccaggcggcgggcagcaaggtggtgtacgagctgcacggctctaccctgcgcaattattgtacgcgctgcggtaagttttaccccgtcagctttattgaggaagccgccgggcagggcgacggcgtgccccgctgcaccgagtgcggcggcatcgtaaagccggacgtggtgctgtacgaggaagggctggacgaggccacgatggagaacgctatcaaggcaatttccgtggcagatacgttgatcgtgggcggcaccagtttggcggtgtacccggcggcggggctgctgcggtacttccgcggggaaacgctggtggtcatcaacaaacagcccaccccggcggacggcatggccaatttgattttaaacatgccaatcggccaggcattggatgaaaacgccccggtatcgttgtaagattttggacaaaagttgcttttttactaaaaaagcattgccaaacgccctgctgttttgctatgatagataggtacatttacggcttatgagtactggaagggggacgggaatcatggcaaacgttttaactgattttacaaagaagcgtgaatttctggtttgcatggattcggacggctgcgttatggacacggtcagcatcaagcacaccattgtaatgtgcccggagctgatccgcgtttttgcgctggacgatcatgcagactttgtcgcctcggcgtgggaggagatcaacctgcgcaacatcacacggggcctttcccgctttgagagcgtggtgctggtgtttgaccggctgaaaaaccgcggcatcgaggtgccgggcagcgaggacattgccgcctgggtcaacacctcggccgagctttccaccgccagcctgcagcacgaactgctgcgcaccggcagcctggccctgcgcaaactgcaggagtggaacaatgcctgcaaccgccgcatccaggccttggagccgacctttgagcctttccccggtgtggaggaaagcttgcgccagctgcacgccgtggctgacctggctgtggtgagcgccgccaatgagagcgccattgccagcgagtggaagcactacgggctggcccgccatgccgatgtcatcttcggccaggaggtgggcagcaaggccaactccatcgccaccatgctggcctgcgggtacgagagccgcaaggtgctgatggtgggcgattcgatgggcgatgcccaggccgccgccgcgaatggcgtcgcctttgtgccgatcctgcccggccgcgaggccgacagctggcgccgcttgcaggaggaagccctgccgaagctactgcacggcaccttcagcccggaataccaggccgaactgctggccgccctgcgcagtgccctgcacgggtaatttttacttatactactttttcacgccgtcacccttgtgacggcgttttttttatgctatactaactgtatatatttgcatttctgcccttttgcggcaggatgtcccgaaaaattcaggaaaaggagcatcgggtatggatcttttgcagcaagcccgtgccgagatcgatgccgtcgacgccgaaatggccgctttgtttgagcggcgcatgcaggctgttgccgacgtagtacgttacaaagccgagaccggcaagccggtatttgatgccgcgcgggaggcggatgtgatcacccgcaacacggcccggctgcaaaacgaggaactgcgcccctattacaaggcgtttttgcaggaggccatggccgtttcccgcgcctaccagcgggccactctgggccgcgacaccgccgcttatcagggcgtggagggcgcatggagccacattgccctgcggcggatgtttccctttgcccgggccactgcctttgccacctggcccgaggtgtttgacgctgtgcagaacggcgacgcccagtttggtgtgctgccctttgaaaactccaacgcgggggatgtttccgccgtgctggacctgctgtacacccacccggacatcattgtgacccacatgcaggacatgcccatccagcaggacctgctgggcgtgaagggtgcgaaactcagcaatgtgcgcaccgtcatcagccatccgcaggcgttggcccaaagcagcgtatttttgcagcagcatggctttgccacccaaagctggatcaacactgccgatgccgccaagcacattgccgagctgaacgaccccaccgtggccgccattgccagcgccgagactgccgaactgtatgggctggatattctggccgagggcgtgaacgctgacggcgacaacaccacgcggttcattgtgatcgagcgggccgcccagccgccggtgatgaccggcgaggggcagcggctttccctgctgtttaccgcccgccacaagcccggccagctggccgtggtgctggaccagatcggtgcccgcggctttaacatggagtgcatcaaaagccgccccctgccccatgtaccttttgagtattatttttatgtacagcttgtctgtcccgcaggctgcgatgccgccgcctgcaacagtctgctggaaaccctgaccggggcgtgcagcaccctgcgcctgctgggtgcctttacgctggacggcatcgaccaacaataatataacaaagtaaggacgtgcgaagtatgaagctgaccatgcaactgaaaagccgcagctatgatattatcctgaaagccggctgccttgccaacctgcatcagtttaccaatgtggagaaccgccgcgtctttgtgctgacggactccggcgtgcccaaacagtatgccgagaccgtagccgcccagtgccccagggccaccatttacaccatcccccagggcgagggcagcaagtgcctgaaagtctacggccaggtattacaggccatgctggaattcggcatggaccgcaaggatctgctggtggccgtgggcggcggtgttgtgggcgatctgggcgggttctgcgccgccagctatatgcgcggcattgatttcgtcaactgtcccaccaccacgctggcccaggtggattcttccatcggcggcaagaccgccattgatctgggcgagacgaagaacatcgtgggcgctttctggcagcccaaggtggtgctggtggactttgacacgctggctaccctgccccgccgccaggtggtgaacggcctggccgaggcgctgaagaccggcttgatcggcgacccgcagctgtttgcactgtttgagaccgaggacccggaagcctatattgaacagatcgtctaccgcagcctgaaattcaagaaaaagattgtcgagcaggacgagcgcgagggcagcgtgcgtgcctgcctgaacttcggccacaccatcggccacggcattgaggctgtgcgtggtgtgcgcggccgccgcaccaccggcctgtaccacggcgaatgtgtcgccctgggcatgctgccgatgatcgaggacccggcgctggtcaagcgggtgcgtgctgtctaccgcacgctgggcctgcctacccgcgccggtgccaacagggaaaaggtgctggcttacatgaagcacgataaaaaagccagcggcagcagcattactgtcatcaagtgcccgggcctgggctgctggcgggctgacaagctgcccatgaccgaactgccggccctgctgggcatcgaggagtaacgatgaaaaacacctttggcaatgctatttcgatgaccattttcggagagagccacggccctgccatcggcgcggtactggacggtctggccgcaggcctgcccgtgaacgaggccgccatcgccgccgcaatggaccgccgccgcgcccggggcgatgggctttccaccgcccgcaccgaggccgacgttgtggagtttctctccggcgtgtaccagggccacaccaccggtaccgccgtgacgatggtcatccgcaaccagaacactcgcagcggcgactatgccaaaactgcagacctgctgcgccccggccacgccgactacacggcctatgccaagtacgagggctatcaggacgcccggggcggcggacatttctccggccgcatcaccgctgccagcgtggcggcgggtgcgctgtgcgaaagcgtgctgaacagcctgggcatccgtgtctacacccatattgccgagtgcgcaggcataaaggacgcaccgctgtccagctccgccgggctgttactgcccgaaccggagcccggccattttgccctgctggattcgagcaaggaggcccccatgcaggaggccatccgcgccgccggcagtgaaggcgacagcgtgggcggcgtgctggagaccatcgtcaccggcctgcccgcaggcatcggcgagccgtggtttgacagcgtggaaagcgaattggctcacctgatgtttgccgtcccggcctgcaagggcctggaattcggcgcaggctttgcctttgccgccatgcgtggcagcgaggccaacgacccctttgcgatgcgtaacggccaggttgccactgccaccaacaaaaacggcggcatcaacggcggcattaccaacggcatgccgctggtgttccgcactgtgttaaagcccacgcccagcatttataaacagcagcataccgtggattatattgccaggcaggacgccgatctgcagatcaagggccgccacgacccctgcatcgtgccccgcgccgcggtggtacaaaacaccctggctgcctttggcctgctggacctgctgaccgtgcgctacggcacgctggcccaaaagcacggcctgccccaggagtaaacgcccgaaacacaaggagcattttggtatggaacagacaagatacggcctgatcggctcgaagcttgggcacagctattccaagatcatccacgagcagatcgctgattatacctacgagctgatgccgctgcccaccgaggacgaggcccgtgcttttatggagcggcgggactttgcggccatcaacgtgacgattccctacaagcagctggtcatcccctactgcgatgtggtcgaccccaaagcggcggccatcggcgcggtgaataccatcgtcaaccgggatggcaggctgtacggttataacaccgactatgccgggttttcctacctggcccgtgcccacggcgtggactttgcgggcaagaccgtactgattctcggcaccggcggcacccattctaccgtgacagccgtttgcaaagacggcggcgcggcggagattctgaccgccagccgcaccggcaagggcgatgccctgacctacgaggaagccatgcgccgcaaggatgtgcaggtcatcgtgaacacgaccccctgcggcatgtaccccaatgtggggcagtgcctcatcgacccggcggctttcccggcactggaggccgtgctggatgtggtgtacaaccccttccgcaccgagctgcttctgcgggctgaggagcaccacatccccgccgctagcggctt

SEQ ID NO: 7846 - DNA, 605 bp, Unknown
  gut microbiota DNA sequence
cagaaggcgatgtttaccggctgatcgttcacagcaagctgccatcggcagaacgatttgaacactgggtgtttgatgaagttctcccttctatccgcaagcatggagtgtatatgagcgattccattttggatcaggtgattcagcatccggaggtcatctacaccctggcgcaggaccttgtaaccgagagggagcagcttgagggtatccgcaaacagctggatgcggcacagccaaaggcagactacttcgatacctttgtaaattcagaggattgcacctgcatccggaatttctgtaaggaaatcggaatcccggagaagacggcggtggctctcttactggatcaccgctatctgtaccgcagtccgagtggctggctgatgccttttgcagacaaatctgcaaggggctattttattgtccgggattgctatggaagaagcggaaaactggtgcagcagacgagagtgacctgcaagggaaagaatcatctcttcaagttgtttaagaaatggggtgtgatcgaatgacgctttttacagagggacgacttcaggcgtttgagcgcatgatgcaggataccggcaaataccatcgcc

SEQ ID NO: 7847 - DNA, 2688 bp, Unknown
  gut microbiota DNA sequence
acaaaaaaggtaggcttaccggccagaagccaataaaaaagggcgttgccgcatggtggcaacgcccgtaaggcagctattaaaatcaaaaaatcaaatcgaccgaaaccctttacccacgatctcgctgctgttcacgatcgtaataaacgcatgttcatccagcgaatgtacgaacagccgtaatttttgcgcctgtccgcgggtcagcacagtaaccagcacccacttttcctcgtgggtgtaggcaccctgggcctgctccatggtggccgaacgatgcagctggttcacgataaaatcccgcaccggttccggccgtgaggtcacgacggtacaaaccttccgcaggttaataccttcaatcgcgctgtccgccacggtgcttttcaagatcatgcccaaaatgcagtacagcccggtggccggcccgtacaggtaagcccccgccagcacgatccctaagtcgctgaccatcagggcgcggcccaccggcatggaggtgtacttgttcaaaatcatcgctacaatgtcggttccgccggtggatgcgccaatgttgaacacgatggccgcgcccacggccgacaggatcaccgcgtagcaaagctccagaaaaacatcgttggtcaacggcgcacgtaaaggtacagcccattcaaaagcggacacataaaaagaaagtgcaaacgatgagtaaatcgtccatcccatggaacgtatgccaaggaagatgaaccccaaaaccaccagcacggcgttgaccacccacatgaacgcacctacgttaaatcgcgggaacagcgtcgccagcacgatggacaggcccgacgtgccgccaaacgcaaaatggttgggcgttttaaacagggcgatgcctgcggcagtggccacaagccccaggttcagcagaaagaagaactctgcatccgcccggatttgtttcggtgtaaggtgcttttttacctcagtcagcacaaggcatcccccttagaacgtcaggttgccgaactcggacagcttcaggtcggggttatgctgctcggcccagttgatgctccacgggctgccaaacagcagcagcgggttgcccttcatatcctcgatggcgcgggtgtcgctggtcaggtccaggtgctttatgtccagctcgtccgggtcattcagcacccagcgcaggtgctcgtagggcagggtctgcatgcgaatatccacgttgtactcgtttttcaggcggtactccagcacttccagctgcagcacgcccaccacgccgacaacgacctcctccataccggagccaaggtcgcggaagatctggatagcgccctcctgggcgatctgctccatgcccttcacaaactgcttgcgcttcatggtgtccacctgggtcacgcgggcaaagtgctcgggcgcaaaggtggggatgccggcgaactgcacatgctttttgccggtgcacaaagtgtcgccgatagagaacacgcccgggtcaaacaggccgataatgtcgcccgcgtaggcctcgctgacgatggcgcggtcgtcggccatcaggctggtgccggtggcgagcttgatatttttgccctcctggacgtggaaagcctccatgccgcgctcaaatttgccggagcaaatgcgcaaaaacgcgatgcggtcgcggtggtttttgttcatgttggcctggattttgaacacaaagccgctgaattgttcactgcacgggtcgaccagctcgccggtcacgctgtccttgcggggcagcggggtgggggtcaggcgcaaaaactccttcaaaaacggctccacgccaaagttggtcagtgccgagccgaagaacacggggctcagctcaccgtgctgcacagcgttcaggtcaaattcttctgctgcaccgtccaaaagttcaatatcctccgccagcttggcgtggttggcagcgccgatcagctcgtccaggcgggggtcgcccagctcagcctcgatctcgtccaccatcttcacgccgttggcgcggccgtcgctctcaaacgccagcacgcggcgcgcggtgcggtcgtacacgcccttaaaatccttgccgcagctgatgggccagttcatcgggtaggtcttgatgcccaaaatttcctcgatgttctccatcagttcaaacgggtcgcgggcttcgcggtccatcttgttgacgaaggtaaagatggggatgtggcgcagggtgcaaactttgaacagtttgatggtttgtgcctcaacgcccttggccgcgtcgatgaccatgacggcgcagtcggcggccatcagggtgcggtaggtatcctcggagaagtcctggtggccgggggtgtccaggatgttgatgcacttaccctggtagttgaactgcaaaacagacgatgtaacgctgattccgcgctgtttctcaatgtccatccagtccgagacagcgtgtttggcgctctgcttgcccttcacggagccggcggtctggatggccccaccgtagagcaggagtttttcggtcagtgtagttttaccggcgtcggggtgcgagatgatcgcaaacgtgcgccgggattcaatttcttcgcgcaatgatgccattggttgctcctttttggtttggctgcgccagcggctggcggccctatataataaggtagatggtttctggttgttcgcaagcag

SEQ ID NO: 7848 - DNA, 215 bp, Unknown
  gut microbiota DNA sequence
cggagcatccgttgatactgtttatgttggtactgccagccctgatcagaatggagaatgaggtttgttccgtctggaatttttgcaaatgcctcgttcagcatggttgtcaccatgctgagcacagggcgatccgatatggtatagctgaccagatcgctgctgcacagatcaaggatgggagagagatagagcttctctccaaacaaactgaa

SEQ ID NO: 7849 - DNA, 1548 bp, Unknown
  gut microbiota DNA sequence
cggcacttagaattgtgcggtattgccttaaattttgccgttataggcgctctgccgggcaggcagggcgcttttcttaataaaattcgctttttatgtagctttgtggtatactggaaaaagtgtatttataggaaaagaggaacccactcccatgcaaaagcgacttacccaggggcctgttatgcccacgatgctgcggtttgcggtgcccatgattttaggcgacctgctgcagcaatgctataatatcgctgatacgttggttgtcgggcggttcatcggcaccaacgcgctggcggcggtcggctcggcctttacgctgatgacctttctcacgtccattttgctggggctggccatgggcagcggcacggtgttttccatcaagtttggccaaaaggacgacaccggcctgcgggagggcgttttggccgcctttgtgctgctggccatcgtgaccgccgtgctgaccggcgcggtgtacctgggttttgagggcattatctggttcctgcgcctgcccgccgagatcgcgccactgatgcgcacttacttaaagatcgtgtttgccgggctggcggcgattttcctgtacaactactttgcctctctgctgcgggcgctgggcaactcgatggtaccgctgctgtttctggcgctgtccgccgggctgaacatcgcgctggacctgtggttcgtctgcggactggggcgcggtgtgggcggcgcggccgaggcgacggtcattgcgcagtatgtctccggcgtgggcatttccgtgtacacctgggtgcagttcccgctggtgcggcaggctgcccacagcaagttcaaggccaaccgcatgaaggagatcgccgggttctcggcgctgacctgtatccagcaatccatcatgaacttagggatcttggccgtgcaggggttagtcaacagctttggcacggtggtcatggcggcgtttgcagcggcggtcaaaatcgacgcctttgcctatctgccggtgcaggatttcggcaatgcgttctccatctttattgcccagaactacggcgcgcaaaagactgaccgcatccacaaggggatacggggcgcgtttgcggcggccatcgggttcagcatcgcggtcagcgcactggtgtttgtgtttgccgcgctgctgatgcgcatttttatcgacggctcggagaccgccgtcatcaccgagggcgtgcgctacctgcgcattgagggcgcgttctatgcgggcatcggctgtctgttcctgttctacgggctgtaccgcgctgtggggcggcccggtatgtcggtggtgctgacggtggtatccctgggcacccgcgtggtgctggcctatgcgctgtccgccatcccggcgatcggggtgacaggcatctggcggagcgtgcccatcggctggtttttggccgacgccgtgggcggggtgtattactggatgaagaagaaagcgctgtttgagatgaaatgatgacataaagattcgctctgaaggcacaatcttacaatccactacaaactccatat

SEQ ID NO: 7850 - DNA, 4059 bp, Unknown
  gut microbiota DNA sequence
cgatttctcggcgggcattgttcatgcgatcaattactgagcggccttgttagcgcgcttagccagacggctgaccttacgggcagcggtgttcttatggatgacacccttgctcttggcagagtcgatagcagagacagcggctttcataacagcgtccttatcagcggcgttgctgacgatggcagcgtctgccttcttgatcactgttttcaggttggacttgacgaccttgttggccatggcctccttctgagactggacaacacgatccttctgagacttaatgttaggcattcgttccacctccttggttccccataacagtacaagttatcctaccacatttttttcggtcttgcaagtgtttttcaaaaaaaacttcatgaaaatcggatttttcgcataaattggttgggaaagggggtgcccgcatggattttatgcaccgtgccgccgcctggctggcgggcggggtggtgtttgccgcgtcctgcgcctcggtgctggcggcagcggcctgcctgccggagcgggctattttgcagcatgccttgctggccatgcagtccccggcggccgcagtggcctgcgccctgccgcgccccgggccgcagcctatccccacaacggcaccggtacagcctacgtctgcgccggccccggcgccaacgcccacagcttcgcctacgccggaaccaagccctacgccgcatcccagcaccgcaccgcaaatcgaggacgccgggcttatccgggccgagcagttccgccacagcaggggagagggcagcatctcactttcggcgggcagcatccgcaacagcaccgcctgcgccgacgccgacctgcgggcggcggtgaccaccgccaacctgccttttgccgtggaactaaacagcgatgagccgcaggttttgatcctgcacacccacgccaccgagacctaccagacctggcccgatttactatacgaccgcagtgctgccgcccgtacccgcaacaccgcgctgaacatgtgcgccgtgggtgcccgcatggccgaggtgctgaacgcggcgggcatccacacgctgcacgacgaaacgctgcacgattcccccagctacaccgagagttacgaccgcagccgcgccacggcccaggagtatctgaggcagtatccgtcgatcaaagtggtgctggacgtccaccgggatgccatcgaggatgccgacggcacgctggtcaagccggtgtgcaccatcgacggcgcaagcaccgcccaggtgatgatcattgccgggtgcgacaacggcagcaccatcagcctgcccaactggcggctgaacctgcgctttgccgccgcctgggaggaagccatggagagccgctttcccggcctgacgcggccggtgttgtgcggctaccggttttacaaccaggatttgaccaccggcagtttgctgatcgagatcggcggccacggaaatacgctggaggaggccctccgggccggggaattcgctgcgctggcgttggcggagctgctgggcgggcagcagccgtaaaaatcagttctttacttttcctgcaacactagttataataaatataattattgttatagaggagaggaatttccatgcagagaacggaacttgcatcgctgtacaccgctacccctgccgatggtaccaaggtcactgtctgcggctgggccaaaactgtgcgcgattctaaaaatatcggctttatctcgctgtccgacggcagctgctataagccagtccagattgttttccaggctgacaaactggccaactatgccgagatcgccaagtgcggcctgtacaccagctttgaggtcaccggcaccctggtgctgacccccaacgccaagcagccctttgagatcaacgccgacaccatcaccgtgctgggtccctgcggccccgagtacccgctgcagaaaaagaagatgagcatggactacctgcgcaccatgacccatctgcgcccccgcaccaacaccttcaacgcggcgttccgtgtgcgcggccaggctgcttttgccctgcaccagttcttccatgagcacggcttcacctacgtacacacccccatcttcaccggctctgactgcgaaggtgccggcgagatgttccaggtgaccaccctcgacctcaacgacatcccccgcaacgaagaaggcggcgtggactacaccaaggacttcttcaagcgtcccgtcaacctgaccgtttccggccagctggaggccgaggccatggccatggccctgggcaacgtctacaccttcggccccaccttccgcgccgagaagagctacgacacccgccatgcggccgagttctggatgatcgagccggagatggcttttgccgacctgaacacctacctggagaccgccgaggccatgacccgctacgtcatccgctacctgctggacaactgccccgatgagctggctttcttcaaccagttctttgacaagggcctgatcgagcgcctggagctggtcgccggttctgactttgctcgcgtcacctacaccgacgccatcgaactgctgaagaagaacaacgacaacttccagtataaagtcgagtggggcaccgacctgcagaccgagcacgagcgctatctgaccgagcagatcttcaagaagccggtctttgtcaccgactacccgaaggagatcaaggccttctacatgcgccagaacgaggacggcaagaccgtggccgccgctgatatgctggtgcccggcatcggcgagctgatcggcggctcccagcgtgaggagcgcctcgacgtgctgaccgcccgcatcaaagagctgggcatggaccccgctgactacgattggtacctcgacctgcgccgcttcggcagtgtgaagcatgccggctacggcctgggctttgagcgtctgctgatgtatgtcaccggcatccccaacatccgcgatgtcatcccgttcccccgtacctgcggtggtttttaatgcagcccattgctgcaccgctgctgcaatggtttcaggctaacaaaaggctcctgccgtttcgacaggagccttctgcctaccatatctgggtcagcgagatcatgctccaacagacccgcgtagctgcggccatcccgtattataaccgctttattgcggcactgcccacccccgccgacctggccgtctgtgagccggacgccctgcgcaagctgtggcaggggcttgggtactacaaccgcgtcaacaacatgcaaaaggccgcccgcatcatctgcgagcagtacggcggcgacctgcccgccgattacgacgccctgcgcagcctgcccggcatcggggattacaccgccggggccattgccagcattgcttttggcatcccggcacccgccgtggacggcaacgtgctgcgggtgtttgcccggctgtacaacgatgacgccgacgtgatgacccccgccaccaagcggctgtttacccggcgtgtgctggaccaaatgcccaaggccacgcccggcccttacaacgaagcgctgatggagctgggggcgctggtgtgcatccccggcacgccccactgcgaagcctgcccgctggccgaccgctgtttagggtgcgccgccggcagggcaggggagctgccggtaaagcccgcccccaaggccaaaaccacggtgcctgttacggtagcattggtggagagcgatgccgggctgcttttgcagcgccgccccgccaaggggctgctggccggtttgtggcagcccgccgcctgggaaaaggcgctgaccaaggacgagctgaccgccgcgctggcgaagctgggcgtacaggccacgttgaccgaaccgctgccgcccgcgaagcatgtgttcacccaccgggtgtggcagctttccggctggcgcggacgagccgatgtctgcgcactgcccgacggtttcgtctgggccgcccccgaacaattggccgaggtataccccgtgcccaacgcgtttggggcatatgtaaaacggtaataaaacaggaaggctccctgaact

SEQ ID NO: 7851 - DNA, 965 bp, Unknown
  gut microbiota DNA sequence
actcctctattataaaaagtagatacggtttttccaaaagcaaaacagccgccggggtgtcgctcaactcgttgcgacgccctggcggctgttgtctcactgcgttggaaagtgaagcaagtataccgcaaatgtacgtgccgtgtaataccctttttcaggattctgcgttttgtacaaaagttatcgccgtctgtggacaagcggttgggcagttccctgccttccgtttattttttggtacagcttgtgtattttgttttttgcggctttacactgcgcggccgccgcgctataatgggcagcgtacctgttgtatatataaaagggtaagaggagttatccatggcacacaaagtattgcatcaccacgggcagatgagcgaagctttccgcaccgtgatgtttctttccgcatccggcggcttacaggatgcctacacctatatcgggcgcggcaaagtgtttgccaacgcccagaccggcaacatcgtgctgatgagccaggctgcctttgacggggacctggcgcgggtgctgcactatctggtgccgctgctctcctttgcgctgggcgtagcagtggccgaggccatccatatccgctaccgcgaggccaagcgcctgcactggcggcagctggtgctggtggtggaaattctgctgctgttctgggtagggttcctgcccaacacgctggatctggccgccaacgcgctggtttcgtttgcctgtgccatgcaggtacaggccttccgcaaggtacacagctacccgtttgccagcaccatgtgcatcggcaatatgcgcagcggcatggaatcgctggtggtgtacttccacctgcacgaccgcaagatcctgtacaaggcactgcactacttcggcgtgattctgctgtttgccgtcggggccgggctgggtgcccaggccgtagcggtgttcggcaaccggaccatctggtt

SEQ ID NO: 7852 - DNA, 19535 bp, Unknown
  gut microbiota DNA sequence
aacaaccatacggcactcagaaacaatcttctccttattggccttatcgatgtaaccagtcaaggcggggatcagcagggcagccaggatggccaggatgaccagaaccacgatcaactcgaccagggtaaaacctttgcggtccttgagtttacgaattttttcgaacataatttggactcctcctaaatttaattggggacgcacttcatcccctgtttgtatataatattgtaacatataaatttcgattttcaactgccacactcgaatttcgcaagaaatgcacggtagatgtcgaattataagctattttgtcacttttgggccgtttttctcttcctattaatcttttttgcgcatgatattgccgacgggaaagatgatgtccgttagaaaaccgttagaactgcataacactgcaccaaggaaaatataaataaaaaacgccaaaccctttcggatttgacgttctttcgctgaagtacagccaactgtttggtccgagtggcgagagtcgaactcacggcctcttgaaccccattcaagcgcgctaccaaactgcgctacacccggtcgaactgggctgtctcgaatcagcttgttcattatagctgactataggagaaatgtcaacactttttttgaaaaaaattcaaaaaaagtgaacttttcaaaaaaacatcgccgccaggtcgttttctggcggcggtattttggctgtattaggatagattctgccgcgaggccacactgctacgcaccagggcgcgcttcaggcgggcttcggccagttccaattcgcgggtatccacgtttttctgggcaaggatcgcctcggcgcgggctttgctgcgctcggcacgctctttatcgatggcatcggcccattcaaaggtggtggccagcaggcggcattcgccgccaatcatgctgagcatgccgcccatacaggcggcccggcggatggtgccgtcctccagcgtaatgtgggcctcccccatgccgagggccgtgcagtaatcgatatgctttgccaacagctggatctgcccgttgatggtgcggcaggaaacggccgagacgctgccgtcaaaggcaacgccgtccggtgtaaggatcttcagcgggaaaactgccatctgcccgcccccttactgctgtttggcctttgccagaacatcatcgatggtgccggcaaacaggaagcagctttcgggaatggaatcacattcgccgttcagaatcatcttaaagccgcgcagggtctctttcagcggcacgtactggccgggcatgccggtgaactgctccgcaacatggaaagactgggacaggaagcgctgtactttacgggcgcggctgaccgtgatcttatcctcttccgacagttcgtccatacccatgatggcgatgatgtcctgcaggtccttgtagcgctgcaaaacctgctgtacggcgcgggcaacctcgtagtgctcctggccgacaacttccggcgacaggatacgggaggtggaatccagcgggtcgacagcgggatagatgccctgggaggcgatgtcacggctcagaaccgtggtggcatccaggtgggtgaaggtcgtggcaggggccgggtcggtcaggtcgtctgcaggcacgtagacagcctgtacggaggtgatagagcccttgcgggtggaagtgatacgctcctgtaaagcgcccatctcggtggccagcgtgggctggtagccgacggcagagggcatacggcccagcagagccgagacctcagaaccggcctgggtgaaacggaagatgttatcaatgaagagcagcacgtcctgatgcttgacgtcacggaaatactccgccatcgtcaggccggacagggctacacgcatacgggctcctggcggctcgttcatctggccgtagaccagcgctgttttgctgagaacgccgctctcgcgcatttcgccgtacaagtcgttgccctcacgggtacgctcaccaacgccggtaaagacagagtagccgttgtgggcagtagcaatgttgtagatcaactcctggatcagaacagttttgccgacaccggcaccgccgaacagaccgatcttgccacccttggcataggggcagatcaggtcaacgaccttgatgccggtctccagaatttcggtggaggattcctgttcgtcaaaggcaggggcggcgcggtggataggccaatgctctacgttttcgggcgcgggctgctcatcaacaggctcacccagcagattgaacacgcggcccaggcaggcatcgcctaccggtacgttgatggggccgccggtgtcgacggcgtcgacaccgcggaccaggccgtccgtggcggccatggcgatgcagcgggctacgttatcaccgatatgctgcgccacttcgacgaccagctttttgccgtgattgtcaagttctaccgcattcagcagggcgggcaactcgccgtccttgaagcggatgtccaggaccgggccggtgatctgcaccacctttccgatgtgtttttctggcatagcacacactcctttgtgggcttcttaagattctgcgtcggcaccggctacgatctcggtgatctcctgggtaatggcagcctggcgggcgcggttatagtacaggttcagatgttcgatcatctcaccggcattcttggtggcggcatccatcgaggtacggcgggcaccctgctcactggcaacactctcgcacaaggcaccgtagacgacaccggccagatattccgggatgatggcgtcaaacacagcagtgctgtccggctcataaagcatcaggctttcacgctcctgccccggcttggggcgcggtgcatcgaaaggcaggaccggcaggatggaagctgtctgggtcagcatggagacaaactgggtgaacgcgatgcgaatctcatcaaactcccctgacaagaatttctggcagacaaggcgcgagatctcgaagcaatcgctgacagaaatgtcccccgccaccgcaaacgaggtggttaagatcgaggcattatggcgctcgaaatattcgaccgcctttttaccgatgggcaatacgcaataaccctgctccggggcatcggcggcatctgcctccaccgctttaaggatgttggcgttgtagccgccagccaggccgcggtcgccggcaattacgatatacaggcggcggtgagtctcgcgcttggcaagatacgggctgctgaattcagaatccgcagcggcaatatcaaacagggtggcgtacagcgtctcaaagtaggggcggctatgttctacccgctccttcgcgcggcgcagcttgctggaagcaaccagctccatcgccttggtaatttgcatggtgctttcgacacttttaatgcgaagcttgatctctttcatcgagccagccatcggcagcaccccctttgcagtttatttttctttagtaaattgttcggtataagcggcgagcacctgtttcagcgctccctcggtatcgggcttcaggtcgccggtggtacggatggtctccatcacgtcgttggcggcggcattgtcgtccaaataccggtacaagccctgctcgtaggcaccaatgtcggccacggcaatatccttcaaatagccgtggatggtggcgtacaggatggcaacctgcttctccacaggtacggggctgttgcggtcctgcttgaggatccccacaatgcgctcgccctgggccagacgggccttggtatcggcgtccaggtcagagccgaactgggcaaagccttgcagctcacgatactgggagtagatcagtttcagcgtaccggcaactttcttcatcgccttgatctgagcgttgccgccgacacgggaaaccgaaatgccggggttgacggcaggacggataccggcgtggaacagctcagtctccaggaagatctggccgtcggtgatggagataacgttggtcgggatataggccgaaacatcacctgcctgggtctcgatgatgggcagcgcggtcagagaaccgccgcctttctcgtcgctcaacttggcggcacgctccagtagacggctgtgcagatagaagacatcgccggggtaagcttcacgtcccggcggacggcggatcagcagcgacagggcacggtaagcaacagcgtgcttggacaggtcatcatagatgatgaggacatgcttgcccttctgcatgaagtactcgcccatggcgcagcctgcgtagggggcgatatactgcagcggagacagctccgaagctgtggcgcaaacaacggtcgtgtaggccatggcgccgttcttctcgagattttccacgagggaagcgacggtggagcgcttttggccgatggcaacatagatgcacagaacgtccttgcccttctggttgatgatggtatctgtggcaatgacggtcttgccggtctggcggtcgccgatgatcagctcacgctggccgcggccgatggggatcatcgagtcgatggccttgatgccggtctgcagcggctgcttgacaggctggcggtccaggatgccgggagccggggattcgatagcacggtaatcggcagcttcgatggggcctttgccgtcgatgggctgacccagggcgttgacaacacgcccaatcatcccttcaccaacagggacagaaacgaccttgccggtgcggtggatgctgctgccttccttgatcccgctgtcatcgcccagcagaacgatggaaacgctgttttcttccaggttttgggccatgccgtaggcgccgctctcaaactggaccagctcaccggccatgcagttgtccaggccggcggcacgggcaataccgtcgccgaccattgtgacagtgccggtctcgctctgctcgatcgcattctggtaatatttgatctgggagcggatgatgcgggagatttgttctggttttagttgcactgttaggttcaccacacaatctgtaaaatgaggtgcttttacatcttaattaaagtacgacgctgccgatgctgtcgcgcagacgttccaggcggcgctgtactgtgccgtccagacgggtgccgttcaggtccaggcgcaggccgcccaaaatcgaaggatcgaccttggcggtcaggcgtaccgttttgccggtcatctcctgcagtttggcaagcagcttctcgcgggaggtgtcgttcagcggtacggcggacacaacggttacttcggtaatgccgtggtcggcattgtagcggtcgcggtaggcgcggacacagccgggcagttctgccagcaggttttcctcgcacagcagctttaaaaaatttaccaggtacgggtgcgcttcggcaaaagccttgtcaagaagcgcgcagcgttctttcttcggtacgccgggggtggaaagaaggcgcaggtaggcaggctcctggttaaagcaatccaaggccacatccagctccgccaacagctgatcagtcagctgctcttctgccgccagatcgtacaggctgccgccgtagcgtttggcaagttcggtcacgaggcatcccccacattccgaataaattcatcgatcagggcctgatgatcggcttcgttgatctcgcgttcgaccaccttaccggcaatctccacggccatgccgccaatctcgttcttcaggtcgttcacagccttcttgcgctcctgcgcaatatcggcctcggctgccgcacggatggacgcggcctcgctgcgggcttcgttgaggatgtcctcttcccgcttctgggcacgcacggtggcatcccgcagcagcgaatcgcgctcggccttgatgctttgcagatgagcctgatactcctgctccagggcagccgccttttgcttggcagcgtccgcgtcggcgtacatcgtatcaatttcctgctggcggtcgtcgatcatctttttgaccggcttgaacaggaaatgcttcagcacggaaaaagtgatgagcatattgcagaaggtgaacagcgcagtccatgggttgacgccgacaaaactttcaaagcctgtcatgggtcgtcccctcctttcgtgtcagaccttcttagaaaatgaacagcagaaccagtgcaacgaccagagagtagataccggtcgactcggtgatggcgcagcccaggatcatgttggtacgcagggtgttggccatttcgggctggcgggccatgccttccagcgctttgccaacggcgttgccctcaccaagtgcggggccgatagcgccgatacccatgcagagacctgcaccgatcgcgcaggcggctttgatgattgctgtttccatagaagtttcctcctgttataaaaatttgttttttggtttatacttcctccggcggcggacaggcatttccgatgtaaaccatcgtcagcaggctgaaaaccaaggcttggacaccaccagagaatacatcaaaataaaggctgaggatgccgggaataccgacttccagatacggcacgccggtcaagcttaaaatgcccagcaggccggtcacggcaaacacgatgccaaaaatctttttgcccatcttttgggttttgatgcccagcaccagcaaaatgatgcccaacaccagcaccacagcaccggcgataaagcttttgcccaccagccccagcaccatggccgagcaggccgccagcgcggagtagagcagacttgtcagcacgccgccgccggcaatgttgccaaagtgacggaacgccatcgagacgggctgtgcgatctcggagataatgttcatcggggtcatgacagcgacgggctcggtaaagcctttcagccagccaaggaagccgttctgcttgatggagcagccccagcagatcacgctggtcatcagcgcccaggtgacagtggtggaaagatccgccgtggccgagcgcaggatgccggtcatgccgatgagtgtaccaaacagcgacgacaggaacagcgcgccgatatagggcgtccagtaagcgttgtgcttgcccatggtgtcctcgaccatgccgtagagcatggaaacacctttctccactaacacctggcagcggccgggccgcttttgcaggttgcgtcccagtacaatgcctgcaatgcaaaggatcagcataaccacaaacgaggatgccgcggtctgcgtgatggggatgccgcctaggatcggagctgtaaagtagatcttagggccattcatggtgcagtatcaccgccttttttatcattccggaaaaattccagtactttgatcgccacctgcgcgaacaaaagcggcagcaaggcggcgacagggtcacaaactttagcacggaaaagtacgatataaatcagcgccagcaccagcgggcgcaccacgctggatgtctggatctccagctgcgctttctgcgggctgccgccgttggcggcacggtccaacgcattggaaacggtaatgctcaaggataaaaagttgcctacggctaagatccagccgaaaacggcccccagcaggaccaggcggtccaaccgacccagcagcgcgtacactgccagcataacagcaatgcagaccagcaaggcgacggccaatccgcccacctgccgcagtacatcgcgatttttctgcatggtagggatcacctcgcaatagtaaatttaatggttattaaaggaaatcggcggtggggtgcggggcgtatcctcttttccctcacggtcgatgctttttaagttgctgcgcaggctgcctaccgagccggccagtcccaacagcagaccgaccagcacgacccagccgcccagtgcaaattcgttcttgagccagacggctcccagcaaaaacaacacgggcggcaacgccacagaaagcccgaactgcgtcagccagacgaggtgtcgggtgatctggtacaggtttttcatagcaaacccccgtcgtatgccttataatgcccttagtatacacccaaaaagtttatttttcaacagttatttttcacttgtatgatgcaaaaatgtacgctttactcattttggccgatttttgtacaaaacatgcaaaaagcgcataacaagttatgcaacctgttatgcgcctgcaatttattgcagtggttcgtcgtttgcctgcggcagatggatgatgcccagttgtaaaaacaccggataaaggtagctggccccgtagcagccgatcttcttggggccggtgattgcctccccggcagcctcccgcgccttgatgcgggccagggcattggcaacggtggaaatggtgatggacttgtttttgcggttcacaaacagctccctgccgtggatcaggtagtggaacggcagacctttggcggtgtaaaaggtctccccttcgtgggcttgcagcatggcccagacttcctgcggcgttggcatggtatcatccccttttatagaaggatagcacagccttcgacacgatgcaacagaaacagacaagaaaaccgccccttatccgcaaagataaaggacggttgctataagattatttcttttcgccgaagcggtactcggtaccgtttttcaggcgttcgatgttggagcgatgcagccagatgaccatggcggccatgatggcgcagcatacggtgctgaacacgatggtaggcaggttcgcaccgcaggcaatcaggttaatgagggtgcctacgggatacaaagcggcaatgatgatgctgcccagggatacgatgcgggtgatggcaacttcgatcaggaagatgaccagcaacatggcacaaaccagcggctcagtagccaaagctgcaccggcaccaaccagcacgcccttgccgcccttgaagccgaagaagatcgggcggctgtggccgatcatgcagaagatggcggccagatacgcaccacagacagggtccagcgggttctgccaggcagcgcctgtgccggaaagcagggcatcgaagatgaagcgtcccaggttgacggcggccacgcttttgccaacgtcgccaatggtggtaaacacagcgggcagtttgccgtaggttcgcagcacgttggtcatgccggcgttaccgctgccatggtcgcgcacgtcgtcattgtacatgaccttggagatcagcacgccgaacaggatgctgcccaagagatacccgcccagtgcggtcagcacgcaggccagaataatatttggcagcataatttacacctttccggccttggcagaaccgtcgccgtgctcacgggtaatcatgcggatgggcgtgccggtcaggccaaaggtctcacggatctgattttccagataacgctggtacgagaaatggaacagcgctttctggttgacgaagcagacgaacgtcggcgggcgggtggagatctgggtgatatagaacaccttcagtcgcttgcccttgtcagacggcggctggaccttggcggtggcacgggccagcatctcgttcaaggcgccggtgggcacgcgggtgccgttctggatgtccacaaaatggatggtctcaaacagcttgtccacgcgctgaccggtcttggcgctgatgaacacgatgggcgcataggacatgaagctgaaatcctcttccagctttttgcgcatggtatccatggtgtagctgtccttctcgacagcatcccacttgttgacggcgatgatgcaggccttgccctgctcgtgggcgtaaccggcgaccttggagtcctgctcggtaaagccgacagtggcgtcgatcatgatgacgcagacgcggctgcgctcaacggcggccaggctgcgcaggacgctgtagcgctcaacgccgctttccaccttgccctttttgcgcaggccggcggtatcggtaaagacgaacttgccgtacttgttctccaccatcgtgtcgatggcgtcgcgggtggtgccggcctcgttggccacgatcaggcggttctcgcccaggatgtggttgatgaggctggatttgcccacattggggcggccgatgacagcaacggtgatgcggtcgtcagcatcctcaggctcttcctcaaagttgaggtgagcgcagacggcgtccagcaggtcaccggtgccgtggccatgcacgccggaaacggggatcagctcgcccaggcccaggctgtagaaatcgtacagctccataggcggctcgccgaccttgtcgcacttgttgacagccagcactacgggcttgccgctgcgcatcagcatgctggcgacgtcctggtcctgcggggtcacaccggcagaaagctcggtgaccatgacgatgcaatctgcggaatcgatggccagctgggcctgctcacgcatgtgggccagcaggccatcgtcgatgcggggctcgataccgccggtatccaccagcaggaacttgtgaccgctccattcgcagtcacagaaaatacggtcgcgggtaacgccgggggtgtcttcgacaatagcgagacgctggccggtcagtttattgaaaattgtggatttgcccacgttggggcggcccacaatggctacgatcggttttgccatatcagctttcctccctcttctctttcttcataagtttcatcttgcgcttgtgtgagcttaaatacgcgcggcagcacccggcaccgtcggtggggatgcatatggcgcggcagcccagtgcttcgcccagctgcggcagtgtaatatcatcgagaaaacgatctttttcatcccgcagcattacttccggcacggcaatcgtatcgctttgcaggttgtctttgcactgcttgatgatgtcggtgccggtaacaaggcccgccacgctgacattgccgccgaagtaatcgttgcggatggcatgcacagcaatcttcacctgtgggtaacgctgcatcagtgtgttggcgcaatcttcgatcagcggggcggccagcgtgccggtaacaacgtccaggctgtggggcagcaccaggccgcggtagttttccagttcctccaaaaaagtatcatggtattgccgccacatgccaacgccgtcctccaactgggcaaattcgtcgtagaattccgctgcggggatctcccgctcggcggtcaggtaccattcgtcgctggggtagatgacgctgcggccgtactcggcgcggcacttcatgctgaactcttccagaatgtccagcgtggcagcggcgctttccttatcataaggcgtaagcttgtacagtttgtcgcggtagtcagtgacgccggcgggcacagcggcgatactgcccacctgggggcgcagcgccagcaggtcggtcaatgtgcggcgcagctcgtcgccatcgttgatgccgcggcagagaaccagctgacaattcagctcgatgccgccggtagccagcttgggcaggtattttaatacctcgccgccgcgtttgttggccagcatccgcacccgcagctccgggttggtggtgtgtaccgagacgaagatcgggctgatgtgcatctggatgatgcggtcaatctcgtggtccgtcaggttggtcagcgtaatatagttgccaaacaggaaggacaggcgctcgtcgtcatccttaaaatacagcggggcgcgcatgccgggcggcagctggtcgatgaagcagaacatgcaatggttggagcagctgtgcttttcatcgcccagataggtcttgaagttgcagcctaagggttcatactcccctttttgcacctggatggtacggtgctgctcgttctcgcatacatccagcgagaatgcggccggggtggtgtagaactgatagtccagcgcatcgttcagggggtggccgtcaacggccagcaaagcacagcctaaggatagccccaacttttgcgcgggtgatccctcgtcgatcttggttacatacaaaggcatgcggcaggccccctttcgttaaaaataacacaacaataaaaaatggggaaggcatcgccctccccacgcaagagacttacgcctctttcttgatgacttcctggcctttgtagtagccacacttgccgcaaaccttatggggaaccttcagttcgccacactgcgggcacttcaccagcgtcggcgcctccagtttccagacattagaacgacgtttgtcgcggcgagcttgagaatgctttctcttaggtacgatagccataatcggacacctccttggtgaaattcaactgagtagttgttttagtatgctaagccgggcatctacgggcgcagcgtcggctgcgggcttgcaggtacaacctgcggccttctttttgccgcaaatggggcatagaccttgacaatcagcactgcacagcagcactgccggaacctcgaagatcagctcttgatagaccagctcatcgaggtcaatgcagccttgttcgttgcagggcagttcaaaatccgggtcttctaaatcccttggcaggatcaggtagtcgcgctcaaagcagtaatcttgagtgagtggttcaagacagcgggcgcactcggcatgaatctgtgcctttacacacaatagcaacgccgcgccatcatcggtgggcgttgcggtaaagtcacattcagccggggcagccagcgtatagccgccaaaatcggactgcgtgaggtctgcctgaaaatgtgcctcgtaaggttttcgggcaccctctagaaaagctcgaagatcaaattgcatagtacacctcaaaaggttgcttaaatagtatacacaagtacaaggggcttgtcaacagctaaaacacaaaaaattgtgattttttgtgttttaccaaaaaatcagggcgggaagacttccccgccctgaaaagttctttagtaagttgcgcccatcagatcacgtacttcttcaggtcttccggcagctcggcagcgtcagcagaaacggtgacgacgacctcgatgttgggggtgatcttatcgatggcttccagcaccttggcggcggcggccatgtcgtggtcgatgatgcgcaggatgccgtcgatgaacagctcggtgatgtcgtagttaccagccaggacgccagccacgaagccgtacagcatgtcagcgccgacaacgccgtactcatctacgtcaaccaagcgggctgcgtggttgatctcggtggtgagcttcatgcacttctcgatgacaacgatattgccggaagtggttttggtagccttgtcgatcatgtcgatcatggttttggtcttgccggagcccttggttccaacgatcagtttcagcataggggttacctccttgtattcgtgagacgccatatcccaggcgtgtattccattagtctttcaggctggcttccagttcggccttgcggtcctcgtaaccgggcttgcccagcagggcgaacatgttcttcttgtagctctcaacgccgggctggtcaaaggggttgacgctcagcagatagccggagacagcgcaggcacgccagaagaagtaaatcagctcaccgacgtcatgggcagacaggctgtccacttcgatcaggcccaggggcacgccgccgtcggtatgggcaaggatggtgccctccatagccttgcggttgacaacgctcatgttctggttggccaggaagttcaggccgtcgaagttgccctccagctcttcaataaagaagtcctcacgggtgtgcttgacgtcgacgtaggtctcgaacatgatacggctgccgtcctgcaggaactgacccatggagtgcaggtcggtggagaagatgcaggaagtgggcatcaagcccttctggtccttgccctcactctcgccgaacagctgcttgtaccactcgttcatcatggtgaagtccggctcaaagcaggccagggtctccacactcttgcccttgcggtacaggatgttgcgggtcatggcgtaacggtaagcgtcgttgtcgatgctgcactggccgaacttcttcaggccgtcagcagcgccctgcatcagctcgtcaatatcaatgccggcgcaggcgatgggcagcaggccaacagcggtcaggacagagtagcggccgccgacgtcatcgggaacgacgaaggtgggccagccctgctcagtagccagctgcttgagggtgcctttggcacggtcggtcgtggcgtagatgcgcttgttggcttcctcaacaccaacggaatcctccagcagcttgcgcaggacgcggaaagccagcgcggtctcggtagtcgtaccggacttggagatgacattgatggagaaacgcttgcccttggtgagcttgatgatgtcgttcagggcggtgggcgagatcgtgttgccgcagaagtagatcttcgggccgtcggaagtctcgttgtggtacaggcccttgacggcctccactacagcacgggcacccagataagaaccgccgataccagcgacgagcagcacatcagaatccgaacggatcttctgtgcggcctctttgatgcgggcgaactcttccttgtcataagtaacaggcaggtcaagccaacccaagaagtcattgccgaaaccagtcttggtctccagctgcttatgggctaactcgacctgcgggtagatcgcctcatattcttcaggacggatgaattttgcaagatgcttgccattaaatgcaacagccatcttttactcctcctttgtttatttttatacacccatgataccgtttcgagtcggtattgtcaagcaaaaactggtgcttttttatgactttttcatttattttgcacaaaatctccctggtaaagcagtaaactgtcgactagtcgtccgaaacaatagcggaagctcaatgcgtccacgccctgtgcggcgctgatggggaaactggccagcacttccccgccgctgctcagctgcacggtgcctaagtgtgtgccctgggccacgggcgcggccagcttctggggcagctcgatggtggaagtcaggggctcagcggcattttttggcatcaaaaagcgcgtcggcgtgctgtagataagctcgactttgtctgcggtgccgtggctgacagagatagcttccggcgcatcgacagacatctgcggggtgacgttctcataattggcaaagccgtagtccagcaaggctgtggcggcggcaaaacgctctttgccggaatctgcccccagcaccacggcaatcagccgcaggccatttcgctcggcactggcggagatgcagacgcccgcccggctggtggtgccggtcttcagccccgtgatgccattgtaggtcttgagcagcttgttggtgttgattaactgggtcgcgccgtcccgcagagagtccatccagatggagcagtagttgcggacctcggcatggtgcagcaaaatttcccggctcatcatagctacatcgcgggcggtggaaaggtgtccctcggcgtccaggccgcaggcgttctcaaagtgggtgctggtcaggcccagctcagcggcgcgggcgttcatctgctgcacaaaggcaggttcgctgccgcccacaaattcggccaccgccacagcggcatcgttggcactggaaatgcagatggctttcagcatgtcgtccagcgtcatctgctcgcccggctccagccagatctggctgccgcccatgtgataggcatgctcactgacaggcacagtgtcgcttaaactgatgcgcccggcggacagcgcttcaaaggtgagcagcagcgtcattacttttgtaatagaggcgatgggccgctgctggtcggcgtttttctcgtacagcacagtgccggaatcctcgtcaatgaggattgccgcagcgcagggcacatccagtgtgtcggtgccggccggggtgatgtgcgggagcgcatcggcggcggccgcatagctgcgcagcatggtaagcagcgccaacagcaggcatagaaccagagtaaaggcaggttttttcatggcagcaacacccccgcggcagttcgtttaccagatgcttatgcggcggcgggcggttttagtattgcgctttagcggcttttcctttataataaaagaatatcacaggaaaacgaggaacacagaaactatgcgggttactttttatactttgggctgcaaggtgaaccagaatgagaccggtgccctggcacagctgtttgaggaaaacggctatacggtcgtctccaacgaggagccggccgacgtgtacgttgtcaacagctgcaccgtgaccaatttcggtgaccagaaaagccgcaaatggctgcgccgtgccaagcgcgagaatcccggtgccgttacggtgctgacgggctgctacccgcaggccttccccgaggaagccgccgagataaaggaagccgacgtggtgaccggctccggcaaccgccatgccattttggccgatgtgacccgcgtgctgaacggcgaggacgagcgggtggtggacatccgcccccaccggaagggcgaaaagtttgaagaactgcccatggataagttcgccgaacacacccgcgcctttgtcaaggtcgaggatggctgcaaccgccagtgcgcctactgcgtcatcccacgtgcccgcggcccggtgcgcagccgcgacgaagaaagcatcctggaggaactgcgccgcctgactgctgccgggtataaagaggtggtgctgacggccatcagcctgcccagctacggcaccgacagcggcaccagcctggtggagctgatcgagaaagccgccgaggtcgaaggcatcgagcgcatccgcctgggcagccttgaccctgatatgctgcacgacgaggtcatcacccgaatggcggcggtgaagaaactttgtccgcagttccatttgagcctgcagagcggctgcgacaagaccctgcgtgctatgcgccgcccctataccaccgcccagtttgccgatattgctgccaagctgcgggcggcgttcggcgcggaaaacgtcagctttaccactgatgtgatcgtgggcttccccggtgagactgaggaggactttgaagccagcatggcctttgtgaccggccagcgctttttaaaggtgcatgttttcccctactcccgccgcgagggtactccggcttacgacttccccggccagctgccggaacacgaaaaagaggaccgcagccgccgcatgactgccgctgtggagaaagtgcgtgccgccgaggtggccgccatgcagggtcgcaccgccagtgtgctgctggaaacgccgctgtccgctaccctgtttaccggctacaccaaacagtatctgccggtgctggtcagcgcgccgggccacaagaccggtgacattgtaaacgtaatgctgggagcctgggacggccgccgctgccgggctgaaattgtgggaaaataaacacggcgcacggattttgcagcgtaatgggattgaatttatgaattttgcgggaaatttggaatttcccgcttttttgttgcctgacctcttgccaaatcggctggtttttggtaaaattttaacaggagcggctgcgcccgctcaagaagggcgtttcccctgtaaccgtgagcagaaaacaggtggaagtcccctttcgctatggagcattgaacggagcaaaaaaggagcaatcaaactatgagaggcatttacacccccgtaacggatatccgtcgcaaggtgttcaccgaagtggcccgtatggcttacaacgccaacgagctgtctgactatgcgcagctgatgcgtgagctgccctttaagatcatccccggcgaggaaaaatcgctgcgtagcagcatcttcctagagagagccatcgtgtccgagcgtatccgtctggccatgggcttctccctgcgcccgctggatgagagcgtgcccgccaccgaaggcctggagcacggcgtcatcgcggacaagtactatgagccgccgctgatcaacgtcatcaagttcgcctgcaatggctgccccgagaaggtcatcaaggtcaccgagatgtgccagggctgccttgcccacccctgccaggaagtctgccccaaacacgccatcagcttccgcaacggcaaaagccacatcgaccagagcctgtgcgtgaagtgcggccgctgcgtcaacagctgcccctacagcgccatcgtcaagaccgagcgtccctgtgctgctgcctgcggtatgggtgccatccactcggatgaacacggtcgtgccgagatcgattacgataagtgcgtatcttgcggcatgtgcctggtcaactgccccttcggcgccatcgtcgataagggccagatcttccagctgatccagtccatcaagcgcggcgacgaagttatcgctatcgtggcccccgctttcatcaaccagttccccggcatgaccccttccaagctgaaggaagccatgcgccagctgggctttgctgatgtggcagaggtcgccatcggtgctgacctgtgcaccatcgatgaggctaaggacttcatggaagaagttcccgccaagatccccttcatgggcacctcctgctgcccggcctggagcgtaatggccaagaagctgttcccccagcaggccgagtgcatcagcatggctatgaccccgatggtcctgaccgcccgcctgctgaagaaggagaagcccgaggcccgtatctgcttcgtcggcccctgcgccgccaagaagctggaggccagccgccgctccgtccgcagtgaggtcgacttcgtgctgaccttcgaggaactgatgggcttgttcgaggctaaggaagtggacttcgcttccctgcctaacaaccccgaggatgccttcaacaacgccagtgccgatgcccgcggctttgctgcttccggcggtgttgcccaggctgttgtcaatgccatcaaaaagatggacccggaccgcgaggtcaaggtaatgagcgcccaaggcttggccgactgcaagaagatgatgatgatggctaaggctggcaagtacaacggctacctgctggaaggcatggcctgccccggcggctgcattgccggtgccggtacgctggctgaccccgccaagagtgccatgatgctgaacaagtacaagaacgaggccgccatgaaggtggctaccgagacgccgtatcaggattctctggacctgctgaagtactaagatgcaataacaaaatccccgcacatgatttgaactgcaccccatttgttagacagtatgatatactatctaacaagtggggtgttttgctacgccaaaaggagtaccaaacaaacgatatacgccggagttcaagaaaatggttgtagaaaccatgaaaaaagaacatctgagtatctatgcagcaatgcaggaatttggaattaacgaccataaaattatagagcgctgggaacgcatttatttggaagaagggccggaaggcttgtcggttgagcgacggggccgcagcagcactggtcggtcaaagaagctgccaaaagaggtagaagaagatctgttggccgaagtgcagcgactgcgtgcggagaatgactacct

SEQ ID NO: 7853 - DNA, 15472 bp, Unknown
  gut microbiota DNA sequence
gttaggcgggaattgtgcggtggtgccttaagcagattttacaacctgttgctcgaaaatctcttgcttgttaccgcaaaatactgtatgataggtactgaattttagttatataaaggggtgttgtcgtgatgaagtgtactgccgcgttggccggtgtgctggccctggcgatgcttctgacgggctgcaagaaacctgtggataccgctgccgctacggcggagacagccgaatccgccgcaacggacgaaaccgctgccacaccaaacccggtggaggcgctgccagcctcggtgacggtgggcacggtgctgcccaagaccgaggctgccgggcgcagttatatcgatgagacgctttttatcggtgactccaacaccgcgcgttacctgatgtacgctgatgagaccggcacggcctttaccacgctggccaacaacatcggcgtggtcagcatgggggccggggccatcaccacgctgaagtgcgagcagttcagcggttcgtccaccatgtacacggtgccggacgccgtggcgatgctgaagcccaaacgcatcatcatctgctatggcaccaacaatctgggcgggtcgtccaccgatgcaacatcgtttatctctacttatttaaagggactgaaagccattgaaacggcctggccctactgcgacatcatcgtcagcgccatcccgccgctggacaagcagcgggaaaacaccaacctgaccatgacccaggtggatgcctacaacgcagcgctgatccagatgtgcgaggaaaacggctacaaattcctgaacagcgccgaggtactgcgggacgatgccaccggctgggccaagacagattataccctttcggacggtgtgcatctttctaagacggctgtgaccgaatatttcacctatgtacgcacccacgcttatgtgacggaggaccgccgcccgcagccgctggggaacattcccaccccggttggcccgccggtaaacctgatttcccaggaccccatcgccgtgcgcggcgccaaggtaccgctggaatttgtggccaccaacggtggaaaaatttccggctcggccagccagctggtcaaaaaaggtgcgacggcttcggctgtgacggctgtgcctgacgacggctttgtatttgcgggatggacttccagcaccggggccagctacagcagcgagaccctcagctttacgatgcccagcgacgccaacgcgggcggtgtggtgctgacggcccactttaccgccgacgaacacgagcacaactacgtggagatcgagggcaccaaagtggccgccacctgcctgactgacggcacctgccagtacaagtgcaccatttgcggtgagatcattgaggaaacgacctacgccctgggtcatgactgggacgagggcactacctacagcgatgccattgtgtacacctgcaagcgctgcggcgagcagaagaaagagcagattgtgcacatgcacaactaccagttggtcagcgagacaatggccacctgcaccagcgagggcaagcgcacctaccagtgcagctgcggcgatgagtacatcgagagcgtgcctgctaccgggcataactggaaagaaacggaacagcatgcacctacgtatgagcaggacggttggattcattatgagtgcaccaatgccggatgcggtgaatggtacgatgaggtattgccgaagctgcagcctacgcctacgccgcccccggattccaattcttcgagttccacagtaaatccaggtgattcttcgggcgaggcatcttccacctcgtatactgaggaatcgaaaacgtttgaataagtgctgcatgataccagcaagccgccctgcggggcggttttgctgttccctggcaaagcaaaagaagaaaagagaaagaggtaaccatgtctaccaagccccacaagaccggcaacggcgcgttgatgcgccggtttctgccctaccttattaagtacaagggtgtactgttttttgatttgttttgcgcggcgctgacaacgctgtgcgatattgccctgcctaccatcatgcgcacgctgaccaacacggtctcggccgccgcgctgacggtggataccgtgctgcggatggcggcactgtactttgtactgcgcatcatcgacggcgcggccagctattttatgtccggcatcgggcatatcatgggtgtgcatatcgagaccgacatgcgccgcgacgcctttgaccatctgctgcggctggaccatacctattataataataccaaagtcggccagatcatgggccgcatcaccaacgacctgtttgacgtgaccgagttcgcccaccactgccccgaggagttctttattgcgggcatcaagatcgtagcatcctttgtgattttgtgccaggccagtattccgctgacgctcatcgtgtttgcctgcgtaccgctgatgggcgttgtgtcggtcaaactcaaccacaaactgcgggaacggttccgccagcagcggttccagatcggagagctgaatgcgacgattgaggacagcctgctgggccagcgcgtggtcaaagcctttgcggccgaggacctggagcgggaaaagttcgagcagggcaaccgtgaatttgaaaagatcaaaacgctgggctattatgccatggcggcgttcaatacttccacccggatgtttgacggcctgatgtactttgtggtgatcctggcgggcggactttcgctggtgtatggggccatcagtgccggcgacctggtggcctatgtgctgtatgtgtccacgttgattgctaccattcgacgcatcgtcgagtttgccgagcagttccagcgcggcatgaccggtatcgagcgctttgcggaaattatggatacgcccattgccattgccgataagcccgatgccaaaccgctggaagtgaagcagggcggcattgagtttaaggatgtcagctttgagtatcccgacgaccacaaccaggtgctgcaccacgtcaacctgactatccgtcctggcgagagtctggcgctggttggccccagcggcggcggtaagaccacgctgtgcaacctgatcccgcgcttttacgatgtgaccggcggcgcagtgctggtggacgggcaggatgtgcgggctgtgcagctgcacagcctgcggcaggccattggtgtggtgcagcaggatgtgtatctgttcagcggcacggtggcggagaatatcgcctacggccgccccggcgcgacccgcgctgaaattgaagaagccgcccgcctggctggggctgacggctttgtgcgtgcgctgaaaaacggctatgacacctatgtgggcgagcgcggtgtgaaactttccggtgggcagaaacagcggttggccattgcgcgggtgttcttgaagaacccgccgatcttactgctggatgaagccaccagcgcactggacaacgaaagtgagatccttgttggccaaagccttgacaagttagccaagggccgcacgacactgaccattgcccaccgcctgacgactattaaaaatgcagaccgtattctggttttgggcaaggatggcattgaggaagaaggcagccacgaggaattgctggcgaagaagggcatttattaccgcctatggaatggattagtcagcggtcagacattataatataagttcaagccgcctcctttttagggggcggtttttgtatgcagtgcagcatgcgggtcaggtttaacgtgaaggtgaacaggttggaggtgatcatgatgccgaggaatgccgccatgccgtagcgcggcagcagcagccagatggcggcgatacggaagatggaatccgccagcgaatagtagaatgtggccagctgttcgcctaaccctttcagcacgccgtccaccatgctttccaaatacatgaacggcgcgacaaagcctaaaatgcgcacatactcccctacctcgacgtcgcgatagataaagccggcaaggggcgcaccgaacagcacgaacccggtccccgccgccagagagaaggcaccggtgaccttgagcatcgtaaacaccagtcggcgggtggcgtcggtatcgcctttggtgtgggcgcgggcgatctccggcatcaacagcccggacaaggccgaaagcaccgagaatgggaagaacagcagcggcagcgccatgcctttcagactgccgtactgggccatggcgtcggcccggctgccggtgtagagcgctaacgtgtagggaatcaggctgctctcgacggcctgcaggccgctggccagcaggcggctgccctccaccggcaggacgatggcgtacagctccttttgggtgtagggctgcagaggctcatcggcacggcgggcaaactccggcgttttggcggcaaaggcgaacatgagggcgcaggagatgccctcgctgaccgtgctgcccagtactacggcggcacagccgtagcctgcaccccattgggccagtacacgcagtgcggcgatggcgattgccatgcggatgatctgttcgatcagctgagcaatgacattcgggtgtacccggcgtgccgccaaaaagcagccgcgcaccgccccggccgccgccataaagggcaggctgggggctaagatctgcaaagccaaaatggcgcgggtatcgtggaggagataccgggcggcaggctcggccagcagcacttgcagcagcatggcgcagcagccaaacagcagggctgtaccgcaaagcccccgcagggtagccgccatgccccgcccccgggccaggctttgtgccgccagccgggccgaggctacattgatgcccgccgtggccagcgagacgaataccatgtacaccgctaaaatcagctggtacaggcccatgccctcgccgcccaggtaggacgacagcaccacccggaaacccatgcccagcacccgcagcaccagcccgcaggcggtgagcagggcggcgttttgcagataggtcttgcgccgtgccatggcatccccctcccaaccgggggcagaagccccctacaccactatgcggcacgggtggccggtatgcaatttgactacttacaaaacagatagtaccttgcgttctgctgtctgatttgttatactgttatgagagcataggcaatgctgcctgttttttcggcctgcgggctggcagatggacggagttgccgaaatttaaaggagcaaaaactactatgagtgaagaatgtacccatgattgcagcagctgcaaggcgaactgcgatcaccgtgcccccgaacatgagccgccgcacccgaaaagccgcatccgcaaggtcatcggcgtcgtttccggcaagggcggtgttggtaaaagcatgaccagcgccatgctggctgtttcgatgcgccgcctgggctataaagccggcgtactggatgctgatattaccggcccctccatcccccgcctgtttggcgtgaagggccctgccaccggagacggcgagagcatcaatcctgtctgcagccgcaccggcgttgagatcatgagcattaacctgctgctggatgaccccgaggcccctgtggtatggcgcggccccgtgattgccggtgctgttaagcagttctggcaggaagtcgtgtgggatgtagacttcctgtttgtggatatgcccccgggaaccggcgatgtgccgctgaccgtgttccagacgctgccggtggacggcatcgttatcgtctccagcccgcaggaactggtgggcatgatcgtaggcaaggccgtgcagatggcccagatgatgaacgtgcccatcctgggactggtcgagaacatgagctatgccctgtgccctgactgcggcaagcatatcaatgtgttcggtgacagccatgtggatgagatcggcgccaagtacaaggtgcccgtgctggccaagatgcccattgaccccgagctggccaaggaggctgacgccggtatgatcgagatgtacgctggcgattatctggacggcgctgcccaggccgtggccaaactgctgaagtaaaccaggtccctgctgcccgggtacaatgatacggaggttttgttatgaaaaagttttgggaagaatttaaagcctttgccctgaagggcaacatgatggacatggccatcggtgttatcatcggcggtgcgttctctacgctggtcacttctctgaccgacaacctcatcagccccatcctgggcattttgggcaaggtcaactttgatgcaatgatgtgggacgttttcggtgatggcaagctggtattcaagtatggtgcctttattaccgccgtcatcaatttcctgatcatggcatttgtgctgttcctgatcgtgaaaggcatgaacaagctgatggacatgggcaagaaggaagaagcgcctgccgaaccggaggcaccggctgcccccacccaggaagagctgctggccagcatcctggaggagctgaagaagcagaacggggagaagtcggcgtaaggctgtgccggtcgcctacatgatgtaggggcggatgcttgcattgcgggttcgcgcagcgatcaatgcccctgcggggcattgaaccgcacgagcgagccagctttgctggctgacagccatcgttttggctgtcaagcggcccgcggttcgatgcgagcatcgaaccctacagaggctcgacaagaccgacgcttaatattcttaagttaatctatctatttttgaaataaatcaagtttgaaacttgattttataagattcttcggattgcaggttgtaaaccgacctgtactatggtatagttgcagcaagaacaaaggcgttcccgccggggctagtgtgccctgccggggatgcctttttgtttactccgttttttgccgcataacctgtgtgcgcagaggcaaaaaacgcaactgggaaggagcgtataaaggaaatggagaactttaccgagcgtaaggccccggccgggttgtatgacccgcgctttgagcatgataactgcggcattggtgcggtcgtagatattaaggggcgcaaaagccacaaaaccattgatgatgcgctgcagatcgtagagcatctggaacaccgcgccggtaaggatgccgagggcaagaccggtgacggtgtcggcatcctgacgcagatcagtgatacatttttccagaaggccgccgctgagctgggcattaccttaggcagcgatcgggaatacggcgtaggcatgttcttctttccgcaggaggaactgcgccgcaaccaggccaaaaaactgtttgagatcgtatgcaaaaaagagggcctgccctttttaggctggcgcgaagtgcccaccgaccccgaggtgctgggccacaaggcccgcgcctgcatgcccagcatctggcaaggctttgtgggaaagccgtcccgtctggaggccggcattgcctttgaccgccgcctgtatgtggtgcgccgcgtgtttgagcagtccagcccggatacctacgtgtgcagcctttccagccgtaccattgtatataagggcatgttcctggtcaaggagctgcgcctgttctatcttgatctgcaggacccggattacaagtccgccatcggcatggtgcacagccgcttctccaccaacacggcccccagctggaatcgtgcccaccccaaccgttttatcctgcataacggcgagatcaataccatccgcggcaacgtggataccatgctggcccgtgaggagaccattggctccaactatctgaaaaatgacatgaccaaggtactgcccatcgtcaaccagggcggttccgactcggcccagctggataacacgctggagttcatggtcatgaacggtatggacctgcccctggccgtaatggtaactatccccgagccgtggagcaacaacaagtccatggacccgaagaagcgggacttctaccagtattatgccacaatgctggagccgtgggacggccccgccagtatcctgttcagcgatggcgacatgatgggcgcggtgctggaccgcaacggtctgcgccccagccgctactatatcaccaaagacggccgtctgatcctttccagtgaggtaggcgtgctggatatcccggccgaggatgttgtccgcaaggaccgcctgcgtcccggcaagatgctgctggtggataccgtcaagggcgaactggtggacgacgataagctgaaagccgactacgccagccgtcagccctacggcgagtggctggaccgcaacctggtcaacctgcgcgatctgaaggtacccaacaagaaggtgcctgaccataccaaagaggaactggtgcagctgcaaaaggccttcggctatcggtacgaggatgtgtcctctatcatcctgccgatggccaaaaacggtggtgagcctgccggtgccatgggcagcgacaccccgctggccgtgctgagccacacccatcccctgctgtttgagtacttcaagcagatgttcgctcaggttaccaaccctcccatcgacgccctgcgcgagaaggtcgtcacctccaccaccgtctatgtcggtgcccagggcaacctgctggaggaagatgccgagaactgcaaggtacttaagattgagaaccccatcctgaccgataccgaccttttgaagatcaaagccatggacgtgcccggcttcaagatcgagactctctccatctgctactacaaaaataccgatctggagaaggccatcgaccgcctgtttgtggatgtcgaccgcgcttaccgcgacggtgccaacatattgattttgtccgaccgcgatattgacgagtaccacgtcgccatccccagcctgctggcggtgggcgctgtcagcaagtatctggtgcgcacctgcaagcgcacctctatggcgctgatcctggaaagcggcgagccgcgcctcgtacacgactttgccaccctgctgggctacggtgcttcggccatcaacccctatctggcgcaggagaccatcggcagcctcatcagtgaggggctgctggacaaggactactacgccgccgtcgaagattacaacaaagccgtgctggcgggcatcataaagattgcctccaaaatgggcatctccaccatccagtcctacgcaggcagccagatctttgaggcgctgggcctgagccaggaagtagtcgacaagtactttaccaatactgtttcccgcgtgggcggcatcaccatccacgatattcagaacgacctggaagcccgccatcaggaagcctttgaccccctgggcctggacatcaaccgtgagctgcccagcctgggcgcccacaagttccgcagcggccccgctgccgagcagcacctgtacaacccgcagaccatccacctgctgcaacaggcctgctggaccggcaattatgacacctttaagcagtacaccgctgccgccgccaacgaaggcggtgacgcgatgcacctgcgcagcctgctggacttcaactaccccgaggtcggcgtgccgctggacgaagtggagagtgtggactccatcgtgaagcgcttcaagaccgctgccatgagctacggcgcgttgtccgaggaagcccacgagtgcatggccattgcaatgaaccgcctgggcggcaagtccaacaccggcgagggtggcgaagccgaggaccgttttggcaccgagcgcaactccgccatcaagcaggtggcctccgcccgcttcggcgtgaccagcaagtatctggtgtccgccagcgaaattcagatcaagatggcccagggcgctaagcctggcgagggcggccagttgcctggcggcaaggtctacccctgggttgccaagacccgcaactccaccaccggcgtgggcctgatttctcccccgccgcaccacgatatttactccatcgaggacttggcccagctgatctatgacctgaaatgcgccaaccgcaaggcggccatcaacgtcaagctggtcagcgaggccggtgtcggcacgattgccgccggtgttgccaaggccggcgccgaagtcatcctgatctccggctttgacggcggcacgggtgcggcgccgcgcaactccatccacaacgcaggcctgccctgggagctgggcattgccgaggcacaccagtgcttaattatgaacggcctgcgcagccgcgtgcgcattgaagcggacagcaagctgatgagcggccgcgacgtggccatcgccgccctgctgggtgccgaggaattcggctttggcaccggcccgctggtggccatgggctgcgtgatgatgcgcgtctgcaacctggacacctgccccatgggcatctgcacccagaaccccgaactgcgcaagcggttcaagggcaagcccgagtacatcatgaactttatgcgctttatggctgaggacctgcgcgagtacatggccaagctgggcgtgcgcaccgttgacgaactggtgggccgcaccgacctgctgaaggtcaagcctgtcccggcaggctcccgcgccagcgagatggacctgacggcgcttttgcagaacccgctgatcgagaacagcagcgtgcactttgaccagaaggctgtctacaacttccagctggaaaagacgcctgacatgaaggtgctgatgaagaagttcaagaaggactttgacacagccgagccaaagcccatgaccgttacgctggatgtgggcaacaccgaccgtgcttttggcacgatttttggcagcgagatcaccgccaagttcggcaacaccctgccggaggataccttccatgtggtatgccacggctatggtggccagagctttggcgcctttatcccccgcggcctgacgctggaactggtgggtgacgccaacgactatctcggcaagggcctgtccggcggcgagatcgtcgtgtatccgcccaaggaagtcacctttgaccgcagcgagaatatcgttatcggcaacgtggcgctgtacggcgctaccggcggcaaggcctttatcaacggcgtggcgggcgagcgcttctgcgtgcgcaactccggcgctgtggccgttgtcgagggtgtgggcgaccacggctgcgagtacatgaccggcggcacggtggtcgtactgggcaagaccggcaagaactttgcagccggtatgagcggcggcatcgcctatgtgctggacgaggattgggacttctaccagcgtgtgaacaaggacatggtcagcctggaacccgtggagcacaagtacgacgtggctttgctgaaagacctgatccgcgagcatgtagaaaagaccggttcgccccgcggcaaggagattttggacaacttcggcgagtatctgcccaagttcaagaaggtactgccgcacgattacgacaagatgctgcgcttgatcgcccagatggaagaaaagggcgaggacagcgagcaggcgcagatcgaagcattttacgcgatgaagagcacgaagtaagggaggcagagtatcatgggtaaaccgacaggctttatggagatcaaacggcagaccagcatggaactgccgcccgaggaacgcatccagaactttaacgaatttcatgtgccgctgcacaccgacgagcagcaggcccaaggtgcccgctgcatggactgcggcgtgcccttctgccagagcggtatgctgctgggcggcatgtacagcggctgcccgctgaataatctgatcccggagtggaacgatctggtgtatcagggcaagtgggatctggccgtacaccggctgatcgctaccaaccgctacccggagtttaccagccgggtctgccccgctttgtgcgaggccgcctgcacctgcggcatggccaccggcgacccggtgaccgtgaaagagaacgaacgcgccatcgtagaatacggctacgagagcggcgctatccacgccgtgccgccgccggcccgcaccggcaagacggttgcggtcattggtgcaggccctgcggggctttcggtggccgacctgctgaacaagcgcggccacaaggtgactatttatgagcgcgaggaccgtccgggcggcctgctgatgtacggcatccccaacatgaagctggaaaagtgggtcatcgaccgccgcgtgaagatcttgcaggatgaaggcattgaatttgtgatgaacgccgatgtgggcggcaacgtcagtgctgaggaattgcaggacaagtatgacgccgtagtgctgtgctgcggtgccaagcaggcccgtgacatcaccgcccccggccgcgatgcacagggcatctacttcgccgtggattacctgaccagcgtgacccgtagtttgctggattccaactttgcggatggtaaggcggtttcggccgcaggcaaaaaggtgctggtcattggcggcggcgacaccggcaacgactgcgtgggcacggccatccgccagggctgcgagagcgtgatgcagctggaaatgatgccctgcccccctgccgagcgtaccgcaaacaacgcctggccggagtggccccgcgtgttgaagaccgactacggccagcaggaagccattgccaagtttggcaatgacccgcgcgtttaccagaccaccgtgaaggagttttacaagaacgaagccgggcaggtctgtggcgcgttgattgccaagctggaaagccgggtagtggatggccgccgccaaatggtacctaccggtgaggagtttgccgtggagtgcgatctggtgctgattgccgctggtttcaccggctgccagccctatgtggccgaagcctttggcgtagacctgaccaagcgcggcaccgtggccgataccaagtatgccaccaacatgcccagggtgttcgcctgcggcgatatgcgccgcggccagagccttgtggtatgggccctgcgtgagggccgcgacacggcagccgtggtggatgagagcctgatggggtacaccaacctgtaacctgctttgcaaagaaagcaggaatgaaattctaatatttcccagaaaataaggggatgcagcggcatggctgcatcccctggtttttgtgcgaaaagtcagacaataaaagaggatgtgactgattcccgtcacatcctcttttttgtgatgctatagtaaaagtttctttgcttactttcttttcaaagaaagtaagttactgcccgcatggcagcgtaaacacgaagcggcaccatttgccttcctcgctttcggcgtggatctggccgccggaaaggttgatgaggatcttgcagatatgcaggcccaggccgctgccgcgggtattcatgccgcgggaacggtcctctttgtagaagcgctcaaacacaaaaggcagggcttcgggggcgatgcctgcgccggtattctcgatgcggacctccaccatgctgccgtgcttttcggcggcaaagctgataacgccgcctgccggggtgaacttgatagcgttgtctacgatgttgtacacgacctgatgcacaaaatccgggtcggcgcagatcatcagcggcgggccgccaaggccctggatgtcgatcttgccatcctcgatgcgctgctcgtccgagaggaccacatcggtcacggtctgccacaggtcgtagttttttgcgtggatgggcacctcgccggcttccagcttggtgatgtccagcatgttctgcaccaggcgggccaggcggccggtctcctgggagacgatggccaggtaacgctggttttcctcgggcgggatggtgccgtccagcatgccgtcgataaagcccttgatggtggtcatgggcgtgcgcagctcgtgggcgatgttgcccatgaactggccgcgggagttatcgatggtctgcaggcgggcagccatgttattgaaggtggtggcaaagtcggccagctccacacagccgtccaccggggcacgggcggtaaagtcgccgctgcccaagcggcgggcagcctcgctgatgtcctcgatggggccggtgatgcgcttggccagcacccagcacagcaggctgcacagcaacaggatgaccgcggccgagatgccgaacatggccagcatatcccccatataactggccagtgccgtcatggggctggcggcaaacaggtagccggtgtaaccgcctacctcaacacggcggcccgcggtatagtatttgccgctgtagacgccgcccagagtgccggttttaaaaatgttgtcgccggcgtccatctcggccagcatgtcggcggggatgggctgctcggtaaaatcttcgctgccggtgtgcagcagaatgtcgccgttttcgtcggtcacgaacagcaccgcgccggaggaagtggtgaacaggtcaaagccgttgcgggcgttttccctggcctgctcattatccagcgggcgggtcagaacagaaccatcctcagcgaatgtctcgcagagtttcgatgcaccgttcaatatatcgttcagggcggtgcaacgctcctgcacgaagtaggcggcggagagtgctgtctggatggcgcacatgacgctcaggcccagcaccagcactacggcaatggtcgagaagaactcccggctgatggtgttgcggcggctcattccttgacctcgaacttatagccgacgccccatacagtcttgaggttccactgctcggaggcgccttccagcttctcgcgcagacgcttgacgtggacgtcgatggtacgggagtcgccgtaatactcaaagccccagacctcatccaacagctggtcacgggtgtaaacgcggttgggatggcccgccaggcaggccagcagctccaactccttgggcggggcctcgacgactttgcccttgactttcagttcgtagcggttcatatccaggtgcaggttgtcgaagtcgtagacgcccttattggtgtcctctttggcggcggtgcggcgcagcacggccttgatgcgggcggtgacttccttggcgtcaaagggcttgacgatgtagtcgtcggcgcccagctccagacccagcaccttatcgtaggtctcgcccttggccgtcagcatgataatgggggtgttgtccttggcgcggatcttgcggcagacttcccatccgtccattaccggcatcataacgtccagcaggaccaggtcgggatgcagtttgtcaaagtcggtcagggctgcttcgccgtcatgggccatcgtgaccgagtagccctccttgaccagataaagacgcagcagttcgcagatatttttatcgtcatcgacaacgaggattttttcgtttgccatagtgattccatcctttcggcgaggttctcatgccaccccagtatattattatagtatagcgcaaaattatggacaaagaaagaacagaatatagtttttgtgcgaatttttccagattttacttaaggcaat

SEQ ID NO: 7854 - DNA, 27423 bp, Unknown
  gut microbiota DNA sequence
tggagcggccgacgaggctcgaactcgctacctccaccttggcaaggtggcgctctaccagatgagctacggccgcataaaaaaatcaccgaagattgttcggtgatttttttgttggctgccccagtccgacttgaacggacgacaccctgattaacagtcaggtgctctaaccaactgagctatggggcaatatttaacttgtcgtgtcaggcgctctcgctgacgactccattattatagcaatcacggtttgctttgtcaacactttttcccaagtttttttgatttttttgctgaatttccggtgccgcttttaggcactctgtatattgttgcaaaacaaaagccaggtacaacctgttgggtcacgcctggcgaatggttcggttttacctttacaaaaagcgtcctgtcacactttcgggtgtggctttgatctgcgccggggtgcctgcggccaccacacggccgcctttttcgccgccgcccgggcccatatccacgatataatccgcactgcggatcacgtcgaggtcgtgctcgatgacgatgaccgtggcgccgttgtcgatcagtgtacggaaaacgcccagcaaggtctgcacatccagcgggtgcaggccgatggtcggctcgtcaaacacaaacactgcgtgggactgggtgcgctccatctcactggccagcttcaggcgctgggcctctccgccggaaaggctgggcgtttcctcgcccagggtcaggtagcccagccctagatcctgcagcacttgcaggcgctggcgcaccagcttcctatccttgcacagatccagcgccgtatgcacgtcgcaatccatcagccggggcagtgtggtagtgcggccgtgcttgtcgatcagcttcacgtcgtcggcctcgcgggcatagcgggaaccgtggcaagcggggcaagggatctccacatccggcaagaactgcacgtccaggctgatgacgccggtgccatcgcacaccgggcaacgcagtttgcccgtgttgtaggagaaatcgcctgccttgtagccgtgggccttggcgtcctgagtgtgggaaaaaatcttgcgcagttcgtcgtggacgttggcataggtagccacagtggaccgcacgttgatgccgatgggcgtggcatcgatgagcttgacctgctcgatgccctcggctgttaccgccttgacatgggacggcagcgaacggcccacggtactggccgcaagggcaggcaccaggctttccagaatcagcgtggtcttgccggagccggacacgccggtgacgacggtcagcctgcccttggggatgtctatctccagcgggtgcaccgtgtgaatggcatcggtggaaaggttgatgcggccctcggcaaagaggtcgctcttccccgccccggcaggcagcgcggcggccgccgggcgcagaaaaggtccgatcatcgacttagggtcctgctcaatttcgggcacagtgccctgagcgatgacgtaaccaccgcccgcaccggcttcggggcccatctcgatgatccaatcggactcggccagcacctgggtgtcgtgatccaccagtaccaccgagttaccgtcctcgaccagatcgtgcatgacgccggtcaggcccacgatgttggccgggtgcaggccgatggacggctcgtccagcacgtagagcacgccggtggtgcggttgcggaccgcgcgtgccagctgcatgcgctggcgctcaccggtggagagggtggacgcggcgcggtccagggagaggtaatccagccctaggtccatcaggcggcgggctgcagtgcggaaggactcgcagatgctctcggccatggggcgcatttccgcgggcaggctggcgggcacgcggtccacccactgggtcagctcggccagcggcatcgtgcaggcatcggccagcgagatgccccgcagacggggtgcgcgggcggcctcggacagacgggtaccgtggcaggccgggcaggtttcctgcttgaggaatttttccacacgcttcatgcccttttcgtccttgaccttggccagcgcgttttccactgtgtagaccgcattataataggtaaagtccagttcaccggcttcgggggtgtttttggccttataaaaaatatgttttttctccgccgggccgtgatagacgatttctttctcggcgtcggtcaactggttgaagggtacatcggtgcgcacgcccatggcacggcagacatcggtcatcaggctccacatcagggaattccagggggcgactgcgccatcgtcgatgctcagcgtcgggtctggtaccagcgtggccaggtccaccgtgcgcacggtgccggtgccatcgcaggtgcggcaggccccctggctgttgaatgccagttcctcggcggagggtgcgcgcaccgtggccccgcaggtggggcaaatcagcggcttttcagccgccacagccaggctgggcggcaggtagtgaccgttggggcagcggtgggacgccaggcgggagaacatcagccgcaggctgttcagcagctcggtgccagtgccgaaggtgctgcgaatgcccggcacgccgggccgctggtgcagcgccagcgccgccgggacgtaaagcacctcatccacgctggccttggcggcctgggtcatgcggcggcgggtgtaggtggacagggcgtccaggtagcggcgcgagccctcggcatacagcacgcccagtgccagtgaggatttgccggagccggacacacccgcgatgccgacgatcttgcccagggggatgtcgacgtcgatatttttcaggttatggacccgcgcgccgcggatcttgattgcttctttggttggcatggtcgttcctctgtatataaataggttacaaaaagcgggcagatgcgagcatccgcccttacagatgggtaattacgtattttcttcgctcttgcccagttccagctggcggaagccttcgccatggacctcgttggattgcagcataatgataaagctggccgggtccatcttctggatggcgtgctcgatctcgtacagctgcttgttggaacaggcgcagagcaccacatccttaggtgcgccgccatagccgccgcgcccctgtaaaatggtggcaccgcgatccgccacgcggtcgatctccttgcaggcggcctcgccgtcgtcggtcacgatcatggccagcatcgaggaggagaagccgaacatcatcttattgatgaccgccgagcagacaaagttgaagataaggccgtagatgatggagtccacgtcgtggaacaccagaccgttggccacaatgacagccagcgccgccgcaaaggtgatgttgccaaagggcaggtgcgggtgcttgaccttaacggccatcgtgataaagtcgataccgccggtgctggagttctgcatgtagattagtgcatcgccaatgccgcagatgacgccgccgcacagggtggccagcaggcggtcgccggtgtagaccggcatcatgggcagcagatagtcggtaaacacggcgaacagcaccatgcagcgcatgctgcgcagcaaaaacgacttgcccagcaccttgtagctgaacaggatgacggggatattgatgagcacgttggacaggcccatggggataccgaacagacggtacaggatggcgcagacgcccgcaacaccggtaacaggcacgcccgatgccacggcaaagctatagatgccggcagccgagacaaagcagcccaacacctccagcagcagatttacgtgtttgttttgggtcatgatgtacctccttacaaaatggggaaagctgaagaaaagggcgggggcatactgtgatgctcccgccctgtgtgttgcacagacgttcttttacttagagacagtctttttgattttggatgcgctgtaagtattgatggccgagctgtccaggttatgttccagtgcggcgccgtcggcgtagagcttatcctggatctcgtcgctcttcatgctggtcagcatatcatacatgctgttcagctggtcaacggtataggtcttgagcgggtcgatgcggcgggccaccagcagggtggtgcccaggtcgatggtcgtccaggtgcccagggggatctcatccagcgggtcggtcaggttgttgtagccgtcgccgccaaaactggagaggtcgtccggggtgtacagcttggaaccggcgtagtagaccgcctgggcagactcgatcgtgctgcccatagcgctcatggcctggggcacgtaattcatggcagcggtgtacagggcgctgttgctggcggtctcggcggtagcctgttcgttcagttcagccaggcactgggccgcgatgtcctcgatctgggacttctggtcatcggtggccagcgagtagctggagtagttcaccagcgggaactgcacggtctcgacgtagtagcaatcgttgttgacgtagtcggtgtactcggcctcggtcacggggctggtgccgtcggcgccgtaggtcaggttcaggatggccttggccttctgggcgttcagcaggtaggtctccaccgtggacttggaaatgccgttggcggtgtacaggtcgccgttggaattccaaaggctgtcggcagagttggcagcctcggcggtggcagcatcagccagcacaccgcccagctcgtcgaactccttttcgacagcagcgtagtactcgatggcgtgggtggtcagctggctgatgtagtcggcaccgtcggtggtgacttcctcgccgttgatggtgccggtgcactgggccttcagcacggtcttgacatcgttggcggtttcgccggtcgccaagtcggccaggccggaggcggtgttgtaagagttgtactgggccagcaggtagacaccggccgggatctcgaccccgccgatggagcccacattggcaggcgtagacatagcacagccgcccaaagccaacagcatggaagcagccatgcccaggctgaacagtttggttttgatggaacgcatgatcggttctcccctttataatacttggcagggcgtataacaccctgaattagtattataccgcgtttaatcgcgtattgcaagccctggccccggtatggtatactggcttcacgagagtttcacatattataataaggagtacgccatgcttctgaccgaacaggctgcccggctgcagggcggcgattgggcgccgttttttgcagccgagtgcgccaagccctactttgctgctctggacgcctttgtgactgaggccgccgcccacaccactgtctacccggctgccgagaatatctttgctgcctttgccgcctgccccgccgcgggcatccgcgcggtgatcctggggcaggacccctaccacgagccggagcaggccatggggctgtctttctcggtgcccgatgcctgcaaggcaccgcccagcctgcgcaatatttttaaggaactggaaagcgagaccggcacccagcgcactcacaacgacctgaccccctgggcgcagcagggcgtgctgctactgaacaccgtgctgacggtggagcagagccgcgcctttgcccacgccaagcagggctgggagactttcaccaaggccgcgctggaatacgccgtgcagcagagcgttgcccccttggccgctgtgctgtggggcaagcccgcccaaaagtacgcgccggtgtttgccgctgtgcaggaccgccgccccgtgctggtgctggaatcggcccaccccagcccgctttcagcgtaccgtgggttctttgggtcggcaccctttggtaagatcaacgcctttttgcagcagcacggagaagcagcgatcgattggctgaaataagccgcgcaagaaagtgaaaaagccccggcaggctgacagaaatgaccgaagagaccaatattgacgttgtggctgtggttgagggccgagagcacaagaaagaataataaaaacggcaggctaccccatgaaggcggcccgccgcttttgtgtccagattggacacagattttatacgacctttttacgacctgttgcctgcttacgaccattttacggcctattttcttacagtattttacacaatcaagcactatcacgcaaacgaaaaaccgcgatacagcaacctttgcggtttgtatcgcggtttttacgttggcggagtaagagagatttgaactctcgcggcggtttcccaccctacgcccttagcaggggcgcctcttcgacctcttgagtattactccacaagtcaaagtgatatattctattcacttgttatacaaaatggcggagaggatgggattcgaacccatggtccgctcgcgcgaatcgctggttttcaagaccagttccataaaccactcggacacctctccatagtggctgccgccagatgcgagtattataataccacaggcccccaaggttgtcaaccccggaggcctgttttttctaaaaaaatctataaaatttttagtcggcagctttaaagcccacgctgtacataaagcggacgaaagcctgctgtccggcggcgtcctgcttaaagacaccggcgttttccagcacgtggctgaacacgatgccgatctccttcttcacgacttcgttggcctcttcggggcgcagggccgtgccatacttggcgatcagcgcatcgatccaatcggcgtgtacggccaggttagagccctccttgcggctggtgttgggctgctggccgctgaggatctcggcgatctgggcgccctgttttttcaggcgggcgggcaggatggccagacccatgacctcgatcaggccgatgttttcttttttaatgttgtgatattccttgtgggggtggaagataccgtcggggtactcctcgctggtgcggttgttgcgcagggccaggtccagaatgtagccgtccgtctcatcgtaatgcaggataggcgttacggtgttgtggggggtatcgccggtgtgggccaggatgcccacgctctcatcgctgtactcgcgccaggcggtcaggatgttgttggccacggtctgcatctgctggctgctgcggcccaccaggcgcacagcggagacgggccagttcaggatgcccgccttgacgccgggatagcgcacgtccttcataggcagggcgatgtcggctttctgcatggggaatacatagcggccaccctggaagtggctgtggctcaggatgctgccgcccacgataggcaggtcggcgttggagccgcaggtgtaatgcgggaactggctgacgaaatcaaatatctcggccagggtctgcttgttcatctccatgggcttatgctgctcgtgcagcatgatgcaatgctcgtggaaataggcgtatggactgtactgcaggtagaactgctcccctgccagctcaatgggcacgatgcggtgggtctggcgggccgggaagttgatacgcccggcatagccgatattctccttgcagagcatgcaggcggggtagccgctcttgggctgcaggcgctccagggcgatggtctttggatccttctcgggcttggtcagattgatggtgatctccagctcgccgtagggggtggcggtgttccactggatgttcttggcaatctgggcagtgcggatatagttcgttactacgcagaaatcatagaaccagtcggtagcagccttggcgccctttttcacatacagcttatggaactttttgcagacttcgctctcgcggggcatcagagcccccatcaggcgggtctcgaagttgatgcggtactggggcacagcaccgtcaaacagttccttgcgggcagccagttccaccatttcgtccagcagggcggcgggggtcgccgggtcctccttcggcggtttggtctcgctgggggcggccagctgcagcagatccagcagcgtgttgcgggccaccagctcatccagttctttgatcagcttatgcttacgcccgaagcgcagcaggcgctccacgtccagtgcaaggcgcgcgtcgcgctgctccggcgtcagggtggtgcagtcaaaatcgttctttgccatgatacaagccctcctgtagcggtgtgttttgtgttccgttgtatttaccataccgctttttcctctcgttttccatggcgctgtgtgccaaggttttgcagtttttgaccaaactgcgatttgcaccgcgcaattttctgtctctattgtcgcattttggcgctgggttgtcaataatttgtttttatgtatgaggctggcacaacggaaaaacccggcactgcaatgccgggtcttttctataagatatagggcaacaccgcacaattcccgctttacagcttaagcaccgctgctgcggctgcgaagcacaatctgcgtcgcaaaaatgctcgataatacatccagtattatctgcgctttttgcttagcagcttgtacttctcgctcgccgcatcggcacttagaattgtgcggtattgccatagttgtagcgtaaaggttccttgaggggagtccctctttactctacaagccggaattgatcgctatattccgctcttgcgttatactcgcttataaataattggttcgtcatatccaaaagttttctttccattaacttccatgctttcagatacttctaggcaactatccgaaaacttttcccagagcttaaatgtcattactggtgagaaccggcttacactgccgccttcccagattccatccttttcatggtagatcgccggagtaaatttttcggattttttcaattcagcataatcaacatttttcatagaactatatgaaaatgtactcttatcttctccttcaggtatttcataagaagacaatacaatttcatcttcttcctctgtaatcaggaaaagatgtggtgaagcatggcgttttccatttgtctcatagtagctttcttcaacaacaaatttaccgttaaaatctttaggaagattcaaaatttttccattgcagattgtattaatgtgttctgcataaggatatatttttccatccttctgcatcttatcaaactgctctttgttattaaagtgtcccgtcatcatatcaacaaaattatcaagtttcaccatgttttttacctccgcaagcatcgatttatccactacacagtatacgcggttttccacgtcttatcaataaaagcagccgcccgggctagccgggtggctgggtggggtatgatttacagcttactttttcaggtcgctgaacaggtctttttcgtacacaccgtcggcgacgagcttggcgaagctgtcaatgacgatttgcttgtcctcagcataggtgacgccaaaccacttatcgtgggtaggcaggaccttaacgctgaccttgtcggcgtgcagcagctcgtcgatgtagatgggcagcagatactcggctttcagcgggttggcgggggcggctttctcgaagaactccacaaagccggcgtccagcaggtcgacgaactcaggcgtcaggccccacatattcatcgagacaaggctctcaacgtcgatggtctttccgccggcagctgcaccctcggcagttttctcaatgccgctggtctccagcacgccggtcaggtaatgctggtcgttcatctggcagataccgcgggtgacagcgccgttatcgctcagggtgtttttcagcacgaaaccggccatgctcagcttgcccggctcggcgggggtgtagccctgcaagaagctgtgcagctgcacaaaagcttccttaccgtagtagtcgtcggcgttgatgacggcgaacggctccttgatgatgcccttgcaggccagcacggcctggccggtgccccagggtttggagcgaccctcgggcacactgtaaccctcgggcacattttccagtgcctgaaacgcatagtcgatctcgacacccaggtcggcgcagatcttctcgatgcggtctccgatggcctctttaaaggcttcctcgatatcgtggcggatgataaagacgatcttgtcaaagccagcttcgatggcgtcgtggatcgagtaatccatgatgatctcgccgttggggccgactgcggccagctgtttgatgccgccgccgaaacgggagcctataccggccgccataataaccagagctgttttcatgagtttcctcctaaattatcgctggggtgcgtacccggcgttgtaaccttttatcttccttacttttcaacatcctgcgggcagtttatgcacccgccatggtcataagatactgaatcgcgctggggcctgccatgtagaggatggccacctgcagcaggcacatgatgccaaagtagagcagcgccgccagcaaattggtgccaccgcgctggaccagcagctcggtgcggccgtcgccctcggggcatgccatgtagatctcctcgatctgcgccttgctactgtcgtggtaccaggacacggcaaacatgcccaaaatcaccttgaacgcccagatgccgatctcgccgatggtgtaggcggcgggcagccagccaagcggcaggctgccgaagaaggtggggttgaaggtggcaatgatcgacataaagccggggatgctcagcacgaccatgaccagcgtggccagcaggccctgcttccacattttgcggtagaacaggtaggccgggccaaacagaaacgccgagagcgaaagggtgactttctgctttgtctcgctcatgcggaaaaactgcatcaggtagtacatcgggctgcggcccacaaaggcggcccagtccttggccttgatgccctcgatggggtcctcggggccgatctcccgccgctggatgccgtccgggcctgcggagtaggtgtcgatgtgggggccgggggcagcgcggtcattgcggggggcaccgccagggtttacatcgccggggttgcgggcgtagatgggaccctgatcctgcggtttttgcggagccgcgccgggggcttcctcgcctgctttgggcagcgggcagccgcaatggctacaccgcaccgcgccgggggtgttgtgggtgccacagttggggcaggtcgccgcatgagcggcttcggccgcacccgcgccaacttcgggtttccattcaaacccggccgcatgctcggactggtgcatgcaggcgccgaccttctgccagcaggcccggtggtagggggtgccgcaatcggggcagacgacaatatcgtcattatccgtaaattcctgttcacaaacaggacagtggttgccagtgtaacgtgccatgaaattttatcctcccagtaacataaagacattataccgcaccaataagataaatgcaaagaactttttatgaagtttagcagttttggggcggatattgctaatagttatggctaactgcactgcgtaatgtctccctctgcgagggtggtgcctcgaaggggcggagggagagacaatctctttaccgtttctttatttcaggctctctcccccacccgctccgcgggagcctcctctcagagagggccttttataccatcctgcccaacctccgaaatccctctttacaacgccccttatttggtttatactattattatgtagttttatgccaacctgacaaaaccgaggggtaacgatatgatcaccattgacgaattaaaagcaaaactcggggggatgaaaacctctgtagatgacctgcgcgatgcactttctatcgaagccagcgagaagcgtctggccgagctggagcatcagatgactctgcccggcttttacgatgaccaggcccgcagccagaagatcatcagcgagatgggcgaagtgaaaaacaaactggagcgcttcggcaagctgaagacccagtacgaggaagccgagaccctgctggagatgatcgaggaagagaatgatccggccctggccgctgagggcgaggaagccgtggagggtgtggaaaaatccatcgacgagctgcagctgatgacgatgctgaacggcgagtacgaccacagcaacgccatcctgaccttccacgccggcaccggcggcaccgaggcccaggactgggccgaaatgctgatgcgcatgtacacccgctgggccgaagcccacggttacagcgtggaggtgctggacgtgctggacggcgacgaagccggcatcaagtccgcctcgatgatggtcaagggcgccaacgcctacggcatgctcaagagtgagcacggcgtccaccgcctggtgcgcgtcagcccgttcgactctcaggcccgccgccagaccagcttctccagcctggaagttatgcccgagctggacaacaacatcaacatcgagatcaacccggccgacattgagatgcaggtctaccgctcctccggtgccggcggccagcacatcaacaagacttcctccgccgtccgtctgatccacaagcccaccggcatcgtgaccagctgccagacccagcgcagccagctgcagaaccgcgagtacgctatggaaatgatgaaggccaagctgtaccagatcgcgctgcagcagcataaggacaagatcgacgacatcaagggcgtgcagaacgagattgcctggggccaccagatccgcagctacgtctttatgccctacacgctggtcaaggatcaccgcaccaactttgaaagtggcaacgtgcaggctgtcatggacggcgacctggacgggttcatctacgcctacctgaaagccagctcccgcggggaactggaagaggtgtaattctcttttccgcaaactcaaaacggtacacactttgcggtgtgtaccgttttttgtgttttgccatgctttattcacaatcagcgggtatactaaaccaataacgttgcgatcatatccccgtacccgcgccggcgcggcttggcctgcatccgcaacggtatttgtattaaggcaacaccgcacaattcccgctttacagcttaagcaccgctactacggctgcgaagcacaatctgcgttgcaaaaatgctcgataatacacaaagtattatctgtgctttttgcttagcagcttgtacttctcgctcgccgcatcggcacttagaattgtgcggtattgccttaaaaattcttttggttccctttcttataagtaagaaaaggaacaaggaggtcattcgtatgcccattcacggcctgacggcggcggaggtggaaagccgccgcgcagcagggctgaccaactgcccgccccgctcccccaccaaaaccaccggggagatcgtgcgggacaatatctgtacctatttcaacctcgtgtttctggtgctggcgctcatgctactgtccgttggttcctggctgaacatggggtttctgggtatcgtgttctggaacaccctcatcggcattatccaacagctgcgcgccaaaaagaccatcgacgagctgacccttgtctccgcccacaaggtgcgctgcctgcgggacggacagtgggtggagctgctctcagacgaattggtgcaggacgatgtggtggagatccgcgcgggcgagcagattgccgccgatgctgtggtactggacggcaccgcccaggccaacgaaagtctgctgaccggtgaagcacgtcccatcgccaaaaatcccggggacgggctgcgttccggcagctttttggccgccgggcactgcgtggcgcggctgaccaaagtgggtgccgaaagctacgccgccaaactagctaccgaggccaaggccgacggccacaaggtggtcaagggcgagatgatgcgcagcctggacaagctgatccgggccatcggcatcgcgctggtacccatcggcgcggcgcttctgtacaagcagcactggcagctgggcgtggccatgcgcggcagcgtggagaccaccgtggcggcgctgatcggtatgatccccgagggcctgtacctgctgaccagcgtggccttggccgtgggcatgatgcggctggcccgccgccgggtgctgactcaggacatgaactgcattgaaacgctggcccgggtggatgtgctgtgcgtagacaagaccggcaccatcaccgagagcacaatgcaggcggacgagccggttttgcttaatgaaaacgcgcctgtcaccgacattttaaccgccttttacagcggtgaggagccagacaacgacaccgcccgtgccctgtgcgagaaattcggccagggtggcagctcttggtttgccgccctcagcatcccctttaacacggcctacaaatacagcgccaaaagctttggggcgcagggcagttatgtcgtaggtgcaccagatattttggccggtgcccgtctggcagagctgcgccccgtactggacccgctgctggcccaggggcggcgcgtgctgctgctggcccgctgtaagggcgaactgccagacccgcctgcccggctggacccggacacgctggagtttttggcattgctgccgctgcaaaaccgcatccgggagagcgcaccggagacctttgcctactttgcgcgtcagggcgtggacgtgaaagtgatttccggcgacgacccgcgggccgtcagccatgtagccgcccaggcgggcatccgcggggctgaccagtgggtagacgcggcagccctgaaaaacgaccgcgagttggaaaaagccgccgcccactgcacggtattcggccgtgtaacgccggagcaaaagcgcaagctggtacacgccctgcaaaagcagggacatacagtggccatgaccggcgatggcgtaaacgacgttctggcgctgaaagatgccgactgcggcattgccatggcatcgggtgcgcaggccgccagccaggtggcacagctggtgctgctggattcggacttcggtgcgctaccccatgtagtggccgaaggacgccgggtcatcaacaacatccagcggtcggcgtcgctgtttttggtcaaaaacatcttctcggtgctgctcagcgtcgtatcgctggtgctgccgctgacttatccgtttttgccgctgcagctgtcgctgctcggcgccgcaaccatcggtacgccagcgttttttctggcgctggagccgaaccacgagcgggtgcgcgggcggtttatctccaacgtgctgcaggcggcgctgcccggcggcataacggattttttactggtatttttggcgcaggggttctgctttgcctttgacctgtccagcgattacctgggcaccatcagtacgattgtggtgctgacagtgggcctgatggtactgtggggcgtctgccgcccgttcaacacctggcactgggtactttggggagcgatggcagtcatcggctacggcggcgcgttgctgctggccccctggctggggctggtcaagctggatctgggcggcacgctggtgctggtggccctgcttggcctggccgggccgacgctgtttggcgtaagcatgctgaatacccgcatccacggcgccgtaggcgaggtacaggataaagtgcggcgaaggagagaatcataacgtcaactaaaagcctccctcacaggggatggcatctgcgcgtaagcgcaggcggagggagagagccttccatccaaagctctccccacccgcttcgcgggagccccctcccagaggggtcaaaaacaccgtcctcccgccatacaacataaaacccgcgctttccggcaatgccgagagcgcgggttttcctatttacaatatttaggtaataccgcataattctaagtgccgatacggcgagcgaggtgcggcagctgctaagccaaaagcgcagataatactttgtgtattatcgagcattttggcaacgcaggtgccgtgccgcagccgccggagcggtgcttaagccgttaggcgggaattgtgcggtgttgcctttattccgtttcttccccggcggcggcccaggtacaggccaggccgcacaggccaaacacacccatggccaggccggtcagcagatcaggcatggtcagcataccattgaaagcctcaaacagcgtttgcggcagctcgatgcaggtgcacagcagaaaacacccggccccggcggcaaacaacgtgtgaccgcagggcaggcccggcgtcaaaaacactttaagcagcaccaccgcaaacagcagcgccgccacagcactgagtacccgcagcgtgcaggggatgcgccccagcgaggcaggcacaaactggaaccgccacaccagccgccataaaaaagccagcggcagcaccaggcccggcagtgcgccgcccaatttctggcggcgcacgccaaagccggtcagggcgcgccagccgtacaccagcagccatgcacctgccagcactggcgtgatgacgtccgcccaggcggtccaggccggggtggtggcgtacagttccgggtaggcggagatcgtttgggccgaggacaccgacagcagaccgctgcccagcagcagcgcgcctgtcatcaacatgcaacagcccaggggcaggttggtgtcggttagctctgtgggctgggcagccacccgccgggcaggcaggtagggcagcgccagcgccgccagccagggcagataccgcgcccacaccgaggcttgcagcgcaaagccggtggaagcatccatccactgcagcaggtccgctacatgcagcgccgccagcacgatgccgacagccagcacaagaaccgcatagaatcgtttattttgcatgggtcttcccccgttgtttcataagatggcaggcttgtttcatagaatgtacaagcgctggatacaaaacattgtaccgccacgcgccccaaattgcaagcatggagtgcccatctatgaaaaaatcatcccttgccgttttcgcttttgcccttctggcggcggctgcaccttttgctgcgctgctggtaccgcctgccgcgcccacacccccaacggattctgtccaggcggacgacctctcccccgctgccacgccgcagcctttgcccacgatgccgcccagcaatgctcaaaacggtaccaccgtccctaatgccgcgctggcagcggcggacatcaccctgtatgacgccgacaccggaaccaaccgggtagtgagcgtgcgggactttctcatcggtgccgccgcctgcgagatgccgccgacctggaacgacgacaccctgctggcccagatggtggccagccacagctatgcactggcgctgggggcgccgatgcaggtcaattcagccctctgcgccgggtggacggataccgaggtattgaaagcgcgctggggcgatgatttcactgcctactacagccgctttgccgcgctggcggacggagccgccggggcattgctgtgctatggcggtgcaccggccgccgcctgctaccacagcatcagcaacggcgtgaccgaggccagccagaacgtgtggacctcggccctgccctacctgcagggagtggcctccccctgggacaagacggccgacggctacgagacgaccatcacctacagctgcgagcaggtggatgccattttgcagggcctcggtttggagccggagacactggctgacaccgcccccgccgcctggtttggcgcggcgcagttggacgaagccggatatgtagcttcgatgtccgtctgcggagaagctttttccggcacgcggctgcggcgggcactggccctgcgttcgacctgttttgccgtgcagtacgccgacggcacgttcacctttaccacccgcggctacggccattgcgtgggcctgagccaacacggcgcccaatccatggccgaaggcggcgccgattggcgggaaattttgacctattatttccccgggtgcgaggtagtggagtaaagcaaaagggatgcgccgtggaaagcgcatccctgaaaattcagccgtgcattgtaggggcggatgcttgcatccgcccgcgggtcgatgcaagcatcgcccccctacaaaagcagccgccctcttaccccttcaccggctttttcagtacgcccatgatgagtgccgtcagcaaactgccgcacagcagggcagccaaaaatccgatggggttatcgatcaccgcgatgaggaacaacccgccgtggggggccgggcagcggcagccaaactgcacagccagcgcaccggccaggctgctgcctgccatgcaggcgggcaccacgcgcagcggatcacgcagcgcaaagggcagcgcaccctcggttacaaaggatgcccccatcagcaggttttgcggcgcggtgcgacgctcctccctggtgaagcggtgcgggaacagcaggcaggccagcgccacgccgatgggcggcaccatgccgccgatcatgaccgccgccataatgtccagctgatcgctgaccaacgccagcgtgccagtcagataggcggccttgttgatgggcccgccatagtcggtggccatcagcgcacccagcacagcgcccaccgtcagacggctgccgccgcgcatcgaatccagcgcacggtacagcttttggttaaagcgtcccagcggcgggttgaccgccagcgccatcagcgccgcaatgcccagcaaactgagcagcggcgttaaaaaactgctgcgcacctgctgcaggttttccggtatttttttgcccagcccgttcaaaaaacgcaccagcaggcctgccgcaaaaccggcaatcagcgcaccccagaacccggaggacacccagctgagcttattgcccgccgtggtgcccagctgagccatgtagccgcccatcaggcccggcatgaacgccggggcgtcgccgatgctgaccgcaatggacgccgccagcaccgggtaaatcagcacaaaggcctctttgccgatattattcagcaggtcgcaatatttttgcgccaggcccatctgcgccaaaagcagcgacagggcgatcatgacgccgcccaccaccacaaagggaatcatgtaggagatgccgttcatcaggtggcggtacgtttcgcggcccagctcccgccaatcgctggtgcggaaggcgttgccgccgcggtagacgggcaccttgctgttcagcgccttattcagcacggcgtcagcattgcgcaccgcgtcaccggccgagactgtcaccagacgcttgcctacgaaccgcgccatcgacacgcccttgtcggcggcaatgatgatgcagtctgcggcggcgatctcgtcgctttccagctcgtcgttcacgcccaccgcgccgttggtctccactttgatggtcacgccccgctcctgcgccgctttgcgcagagcctcggccgccaggtaggtgtgggccacgcccatggggcaggccgtaaccgccagcagccggtactgggccgggggcgggggcggcggcgtctcggcggcagggctctcctctgcaggcggcggagcaggttcctcgtgccgggcgatcaggctgcaaaaagccgttggcgtgggggcatccagcatctgccggcagacttcctcatccagcagcagagtggccaggcccgccagcatctgcacatgcaggtcgttggcatctgccggtgcagcgatcaaaaacagcagccgcaccggctcgccgtccggcgtatcgcagggcagcggcgggtccagcgttaaggcggccagctcggcatgggccacccctgcgcttttggcgtgggggatggccagcccgcggcccatgcagatgccgcccattttttcacgttccaggacatcctgttcaaattgtacggtgtcggtcaggcagccgcttttctgcaccaattccaccagttggtggatcgccgcaggcagagaatccgcctgttggcgcagcgccacgcagcagggctgcaggtgatctgtgatgtgcattgggatgtccccctttggaaaatttgtacaatccgaaaaaagcggccccgccagaacggagccgcttttataaagtttacgtggattagttgagcagggtcagctcggtctcgggatcgaacaggtgaatcttgttggtatccatggcaaccacgatcttgtcgccgcggcgagacttggaggtgggagccacacgagccatcaggttctggccctggtaggtcaggtacaggtagatctcagcgcccatcagctcggagacttcgacctcagcggagatgtggctgttgggatgcttctcgaggaattcctcgtcgtccttgatgtcctcaggacggatgccgaccttcagggtcttgccaacgtaagcgtccagcttgccgtcggcggtcttctccttgggcagaggaatgtcgctgccggccagatcaacggtgaactggtcgccggtcttcttcagggtgccgtccaagaagttcatctgcgggctgccgatgaagcctgcgacgaagatgttgcagggatagtcgtacaggttctgcggggtatcgacctgctggatcaggccgtccttcatgacgacgatgcggtcgcccatggtcatggcctcggtctggtcatgggtaacgtagatgaaggtggtagccagcttcttgtgcagcttgatgatctcggtacgcatgctggtacgcagcttagcatccaggttagacagaggctcgtcgagcaggaagacggccgggttacggaccatagcgcggcccagggcaacacgctggcgctgaccaccggacagagccttcggcttacggtcgagcaggtgctcgatctccaggattttagcagcctcacggacgcgcttgtcgatctcgtccttgggcatcttgcgcagctccaggccgaatgccatgttcttgtacacggtcatgtgcgggtacagagcgtagttctggaagaccatggcgatgtcgcggtctttcgggggaacatcgttgatcaggcggtcgccaatgtacatctcaccgccggagatctcctccaggccagcgatcatacgcagggtggtggacttaccgcagccggaaggaccgacgaaaacgataaactccttatcagcgatctcgaggctgaaatcaggaacagcaacaacattgccgggataaactttcttaacgtgacggcagctaatggaagccataatacgtatcctccagttatttacagtggtttgcagcccgggtagagggggctgtctttcttgacaagactataataacaggttacaattggtttgaaaatagcattttattgatatagaggtgttgaaattgatatttgacccggaaatttactgcaccgctgccgagacccgcgaactggacggaaaggatgccgtcacactggctggcgccgggctgtgggcaggggttctttcccgtggggagtgcctgttggaaggtctggcccggccggggcagagcggggatattctgttaggcccctccccactggcgctgacgccgcagaccgattgccacctggtggccgtgcggctgaccggcctgtgtgccgacgcctacctactaagtatgggcacgccctgctgggccgatggcgcagcctgtcccggcgcggcggagctgatcgcccagctgcacggcggcggcagtgcccccctggcctacggcctgctgtgcgccctgggcaaggcggatgagacagcccgccccctgccgccgctggtggccgaggcggtggcggccatccggcagaattacatggcactgtacggcgtggaggaattgagcgaacagctgggcgtgacgaagagccacctggtacggacgttcaagcaggagatcggcgtgtcgccggggaagtacctgaccaatgtgcgcattgaggccgtgaaggcactgcttttgagcgacgagtacaatttggagatgattgccgggatgacggggttttcgggggcgaactatttgtgccgggtgtttaaacgggaggtaggggtatcccctgccgcctggcgggcggcagccgcgcccttgccggcggtgccgaaattgccgccgagaagtgcggagatgtttgtttaatacaaacacaaaagcccgcagaaaatctgcgggcttttgtgcatagaggggtgggaaagtatataaaggtcagtgaatgtcgtaaatttatgcatcgccatattgatgcgtcgcttgattgattacagctattattatagtctttttccttaatttgtcaaacgtcccccttgcaatttgtttttaaaaacattataataaaccagtaaatgcttaattatatttagttgtcgccgaaaaaatcacacttttcctattttgtcaaacctcacaacggcgcttttcttcattttatttttttgtgcgcattatacaaaactttgtaagaggagtcatcccatggacgatctagaccataaaatcgtacaacttttatccgaaaatgcacgtatgcccgtcaaagacattgcacagaaggtcagtttgaccagcccggccgtgtccagccgcatccatcggctggagcaggagggtatcatcggcggctacacagtggtgctgcgcaaccccggcgcccccgcccgtgtggaggcgctcatctctgttttggtagatgccgccacccgcgccagcttcctggcgatgatcgagcaggagtcccaggtcttgcagtgcttccgcgtgacaggcagttacaattttattattaaggtaagctgcaccgacatcgacgcactggagcatctgctgaccaagatgcagaagatgggttccaccaacacccagatcatcctgaacacccagctggaccgtaatctggcattttaacgaaagaggacgttatgtacttttgcaaaaactgcggccgcctggcccatcccggcgaagaccgctgccccaaatgcggtgctgcccacatccagcccgcccccgcagcagcagcccccaccgggcctgccgccccgcagtatcacccggctgaggacgccccggagcaggacgttccggccctgggctttggcagcacgctgggcacgctggtcatctttgccatccctctggtaggctttatcatgatgctggtgtggagcttttccggcggcccggacagtgcccgcaagcgcctggcccgtgcttatctggtccgcacgctcatcatcacggttatctttgcgctgctgtttttgatcggtgcgctgagcctggcggccgtttcccacagcctgtactacgccctgcgctaaggaggccgtatgaaagcaagtgtcattatcccaaacctgaacggtgcaggctggctgcgtgactccatcgagtccatctgggcacagaccgagcaggattttgaactgatcgtcattgacaatggctccacggatgaaagcctggagattgcccgcagctattgcggccgcgaccgctacaccctgattgaaaacgccgagaataccggtttttcccacgccgtcaaccagggcatagccattgccaaaggcgagtacatggctctgttcaacaacgacgcctttgccgagccgacctggctggcggagctgctccgcactgctgaggccgaccccaagatctttgccgtcagcagcctgatgctgcgcttttacgagccggaacttgccgatgatgcgggcgattacgtgactattttggggtttgcctgcaagcgcggcgacggcctgaaggcaagccgatacacaaaaccctgccgcatcttcagtgcatgcggcggcgcggctctgtacagaaaatccattttggataaaatcggcgtttttgacgaattgttttttgcctattatgaggacgtggacctgagctggcgcgcgaacaactttggttacaagaacgtttattgcccaacggcgcggtgccggcacatctgcggtgccacaacgggtgcggtgcggtacaatccgttcaagagcatccagagcggacggaacagcatcctgctgccctacaagaaccagccgttgttgatgatgctgctgaacctgatcccgatggtgctggggtatctgctgaaagtggtgatgttccggttccgtgggtttggcaacgattatgcgaaaggcttccacgaagcctgggtagccctgccgaagctgaacaagccgaagttccattggaaaaacctgcccaattacatctgggtcgagtgcagtttaattgtcggcctgttccgttacctcatttaccgcatccagcgcgcgctgaaggtgacctgatttgtcccttttcttaaaaaaaggaaccaaaaaatctttaaattaaaaatgggagatacggtctgcgaccgtatctcccatttttgtttagagtttcttcggttccttctttgcaaagaaggaacgaatcaggctgaccgccgatgcgcacagggcggggtagaggatgaggcagaaggtttgataccaggtggggacaaggtactgccaccaggcgggcagagtcgaggcggcgttcagggtcagggtcgccggggcaaaggtcagatccaccgtcttgttctcgtccgggctgcaggggtccaggcgcaatgccgcaatgctcgtgcggggcagcgtgtacaagtactggccgttgccaaggttctgcgggaacacacggcgatcctggctgtaatcctcgcccactttcgtggtgtaatacaggcacatctcacgggcgtcgccatcaaacgttaccgtgtagctcagcgtgcgcaccacctggccggagacatcctccaaaatcatctgcgggtcaccgttggtggtggtcagggtcagggccgactccgcggtcgcctgctcctcggcgggttccaggcccaccaactgccagctctgcaccgggatgatctgctcggtcatgcgcccctgggccttggccagggcatcgctgccagcatgggccaggctcagcaccagccagacggccaccgccaaaatgtaacaggccgcaggcaccgcgccgcggcgggcgaagaaagttttcaaccgtttcatgcggcacccccttgcatttccaccggggcatagcccgcatcggtcacgcggtacagcagggtctcccctgcctgggcggcggccaatttatccgtaaacaggtcgctgtaactttgcacaaaaatatcgtccagtttttggatgtacaacaccgtgcagccgttgccgcgcacgatggcatccagttcatctgccgtaaaagcgtgataataggttgcttttacgccctcgtcgggcttgagttccggcagaccaaacgtaccgccaccgccgttcatttcagacataatgccggagtaatccaccagcaccgggtaaaaatcaaacacggcgctgaaccagccctcgccgttatcgccctgactgacgtagaacacacggtcgtcgggctgcaaattctcgcagacgtactcggcctcggcacgagcctgcttgcggtcggcaaattcgctgtccgcaaagcccagtacgctgagctgcggcagcacgatctgattctgccgcaccagcatggcaacagccagcagcaacacaatgccctgcgccgccagcgggcgcttgggggcatagcggctggtggtaaaagcagccgtggggccgttgactttactgaccgtctccagctgtggctgcaaagcaatcatcagacaagccagcgccatcaggaaccaaccaatgtaataactttcgatgtaacggttataatcttccagccgctccgcctggaacggcttaaagataaaaccgtagctgagcgccagttcgaggttataccccaaaaagcagacagcggacagcacacccatgctgccgatgcgcagccgcagacggcgggaaccggccgtggccagtgccaccacaaacacaacggcaatcagcaccacgatgttgcggccctgaccgatcatgcccagtttgccgtcgctggtccagaactggtggcccatatcggccatcgcctggcggaactggggttcgcgctcggcaaaaaagccggtgacgggccgacccagcagaatcttgatgccgttgatgaccactgcccccatcgaggcagtcgtctcaccgacaccgccctcgctggcgttgcgactgacgagccagcctacatagcggacgttccacaaataatacacagccatgggcgcggcaaagcaggccacggcaaagcctgtacggcgggcaaggccctgcttgaatttaccatcacagaacagccaggcgtccacggcgatcagcccggcagctgccagcgacagcacaaagtcattggcttttaagtttgcggccagggccagcaccggcagcacagcccagcgggggccatcctgttggcgcagggccagccacacagccaccgcgctgccgaacaccagcccggccgggatgtcgccgtaggacgacaggtagacggtagtcaggtagatggtgtggttgtacaccgtgaagaaaaacggcgtgacccacagcaccgcagccatgggcacggccacacgccactgcttccacggcaggacgctgagcacggcggcatacacggcaaagaacaatacatcgtaggcgagatagattttccagtctgcatactggccaaagaactggaaaaagtagctgagcagcggcaggcctgggttctgcgtcaccgcccagggcgtgcccagcgtggcggtggagtacaggctgttatccaccttggtgactttgacggcggtggcccagagggagaattcatcggacaccgtggccatgggctggcgcacgaagaagtacacggcaaaagccagtgccagcgcccagaaggtcacgctgccgggcgttgccaattgcgcgtagtagcgctttttagcctctttcggcggcagcagcgcccacacgccgcctgccgcacacagggcgtacacagcccaggcggcggggtacagcaccccggccataccggccagcgtaagcaccgccacgatgcaggacagcgttaccagcggagccagcccggccgggatccgcgccttgagcgtgagcgccgcgctgcccaaaaacagcgccgccagcgctgccattacccagagaagttccattgtttatccttgtctgttccttttcttatcagaaaaggaaccaaaagaattttaatataaaataccgttttatggttgggggtaagttgcgatgacgcggggaaaacgaggcagggaatggttgtaggggcgaacattgttcgcccgcgggtgtttgcactgccgcgaggttggcgggcgcacagtgtgcgcccctacagatgccgcttatccctatttttgctttattatgttgaaagtttcttcggttccttcttttcaaagaaggaacaaaccatccccgccgcaaacgccggtgcaaacaacagcaccagcaactgac

SEQ ID NO: 7855 - DNA, 8231 bp, Unknown
  gut microbiota DNA sequence
gtgtccgggttcagcgtcacaccggtgaaaagcgtcggcacgccgcctacgctgtctgggtcgatacgcaggcccgtgacccactggccgcccagatcgaacgtgtacacgccgggggcggtgactttggcgtagactttctgcgcctcggtgtagtcggtctggccgggcttgagatagtacagcgccacgccacccgggggcagacggtgcgcagcatccagctccactgtttcaatataaccctgcccttgccagtaaatgtgggggtcgctgtcggtggaaagataccagttggggtcgtcatccggggcggtccaccactcgttgctggaataggcagcaaaactctcggtggtaagctcgtccggtgccagcgtgacctggggcattttgccctgcattttgtagttcagcatcacggcactgcccgccaggcagcgcaccagccacagcaccaccgccagcaggtaagccagcaccagcgtttggcgcgggttgaagagcgtttttttctgcattattccaccccgctttctgccaccgcggccagcgtaaagggcacggcggcgtctgcgccctcaaagtggtagagggtcgcgggcatgtcggcggtcaggccgccctcaaaataggggctgaactcccgctgcaggtagtcgtcggcgcggtcaatgagcagataatcgcagtctttctcctgcatataggccaccagcgtggcgggcacgcagacggctttataatcgtacagcgtccaattttcgctttcgaccaggttcataaagtcgctgtcccagcgatcctgggtctcgcccaggcggccgtaaaagccgccgaagccgttgaccacctgggccgtcagctcgtagcggtagtagtaccagcgggtggcgtcgtcaccctggctcagcaccagcacacggtcgggccaatccagcaccgtattcatcgtgtcagcgcggtcttgcacgtcagcacgcagggtgtacaggctgtcagcatccgaccagaagcctgccgccgggatgccccgccagcagaagatacccaccacagcggcggccgcacaggccagcacacagcagctccaccgggcggcggcactgcgggccagcagacagagcatagccagcatccacgcctggtagtaggggcttaaatagcggtcgtagtccttgagggccaggccctccacgtccgagaaattgtagtaatacaaaatgaggtggaacgcatacagcgcggcgaagcagaacgcgaacgccagatgcgccatcagtacacggcggcgggccgggcctttttcggcggcaaaaaacgccgctgccgcgaccatggtaataaccgccaccgccatgatgccgccgcccagcaggcagatgcgccgggtgaagaaggcatcgcccatggcggccataatttgcgcaaacttgtcatcgcggccaatgcccagcagctgcttgacgccgcccgtcagcaccgcgccgtagcttaagcccgcgctgcccacgctggcgccggtgtccaccgtgggggtcacggcggcggtgtagcggctccaacttgcaaaggcggccaccacgcagacggccaggccaccagcgcgcagaaacgcacgcgggaacgattgtttgattggtttatcggcggtgaccaactggtcaaggccgatcaaaaaggcagcgatcagcccgtaggcaaagcaaatatctttcgtcagggtcagcagcatcagcggcaggcccgtcagccagaatgcccgcctgcgatgccctacagaataatacaggcagagtgccccgccaaacagcatcgccagcggcaggtccgccatggcgttggcatactgcggcgcatagctgcccgccggattattggagaagaagaacggcagcacaaacccggtcccgaacacaaggatgccccccgcccactgcgggcgaggcagagccgaagctgccgccacacaggccagagccagggtgtccagcgcggccaggcaggcccactcagcccacgaaccaaagggctggaacaagaacgtcaccaggctggtggccgggtaggtaaagctggctttcaggttgacgggatcggccacataaaacgcggcgcgctccaccaccattttgggcgcaaggccccaggcggtgaactcgtcccactgggtaaacatgggccggtgcagggcaaacaggcaccagataaacgcagcaccacccaaaaacagtgcaaagccggggcgggtcagggcggttttcaccgccgttcccacacctgccgggcgcaggcggacaacgcccacaaccaccgcagcacccaacagcagcacagctgccgccgcgccaatgcgcagattgcccagcatgccaaacgggtacagcaccagcgcggcggcgctgagcagcggcagcggcagtaaagcggcgtcacaatccaaaagggcggccagcaccgcaccggcacccgccagcagaaccagcaggaacagcccccaggccaaggtcagcacagtacaagtcaccccctgtagttattgataaatgacgtagacaggtccaacaaagtaatgttgaaagagcagcaccgcccccgcaaaggcgtaccagccgcacagcggcagggccagggcctctcccctttcggcggtcagggccggttttaacgcgcggcggatcagcgccgccacgcccacagccagcagcagccagacgggcaggaagtaccgcgtttgcagacccacgatgcgcaccatgcccaccggcgtgtaggtgatgtacatggcggtcatggcgcccacagcgtagacggcggcgaacacgctcagccagccgttgcggcggcggcccaaggcgttcgtcttcggggcgcagagcagcgcggcggccagcagcaccattgggccggtcaggttgaggaacgcgacgggcatatccttccagccgaaaagccccagctggcccaggaaaacatcattctcatagagtgtacccaacaaaaccgcgatataacgcagcggatttttcagcacaaacaaaagctgtgccccgccgttgacggtactgccgccctgccgggcgatggtgccgtaattatgacgcagcagcgtgccatattgctccacaatttgggtcagcagcagtgcgcccgccagcgtgcccacggtgtaccacgcgcggttgagtctggctttccactcgttcttgcgcacgaccaccagcggcagcaccacccacagcaggttgatgtagggcttggtgccgttggcaaacacgcaggcggccgtgtaaacagcggcggtgcggctgtcccattccgggcaggtcagcagcgccagcatcagataatagcacgccaacaacgcagcatcgtaacttaacgaagcccccatgtacagcgacatgggcagcagcatcacggccaagaacgccgggcggcactttttggcgctgcgcagcgccgcgtaacacagcagcgtgtagaccagcaggttcatcagccgcccgccgtacaggcagcccagcgcgccaaacccaaacagccgtgccaacgccatgcccagtgccccgggcaggaacggcaaaatcagaaagctgatgggttcggtgacggaatctgccgcagaatcgcgcttttcccagttgatgtactgggtaaagctatcccagatgctctccacccggccgtctttgccatactgttttaaggcgtagcctgcggtgttgtagggctgctcggcgttcgtgtcagggtcagtgcccaggcccgctgaggtgtgggcattgacccacgcgccggggaaggcgtccatcagctcgttgacatcctcggggtagcttcgcttggcgtcaaagtcaaagcggcccatagagatagcgtaggtccgcagataatggtcggtttcatcgggcgtttgcaggggcggattggcaaaggcgaacagcgctccgcacagcaaaatgcagcaagccccccgcttggcgaagtccttacaatgccgcagcagcagcgccgccgcacccgccgccatggccagcaccacgcaaaggccggtgatctgcagcggcggcacaccccgggcatccagcccgtaaaagacacgccagtagtagctgacgatgacgcccgccacggcgcacagccccaacacgaaagcccaccgtgcggcggggtgccatacggtgggtgaaaatttgcgtttgtttgacgaattttccatagattacaggatatactggccgaccttgtactggtccaggttgccgcgcaggaactcgatggtagcggcaagcccctgctcaaaggtgtactggggcgcccagccggtcaggttgcgcagcttggtggagtcgcccagcaggcggttgacttcgctcttttcggggcgcaggcgctcggcctcgcagacgatcttggcgttggggttgatctgggcgatcagctcgttggccaggtcaccgatggagtgctccacaccggtggcaatgttcagctcctgaccgatggcggcatcgcagtccgcgatggtcataaagccgttggcggtgtctttgacatagttgaagtcgcgggtcggggtcaggctgccgagtttgatctcggtctggcccgccagcagctgggtgatgatggtggggatgatagcgcggccgctctggcgcgggccataggtgttgaaggggcgcacgatcgtgacgggcagatcgaagctgcggtagaagctttcggccaggcggtcagcaccgattttagtagccgagtaggggctttgaccctggaaggggtgcttttcgtcgatgggcacatactgggctgtgccgtagacctcgctggtggatgtgaccagcacgcgctgggtgtccagctcgcgggcggcgttcaggacgttgagggtgcccttgatgttggtgtccacgtagctgtccgggctgtggtaggagaacggaattgcgatgagggcagccaggtggaagacacgctcctgcccgcgcatggcggtgcgcacgccgttggggtcgcgcacgtcgcccatgaagatgtcgatctcgttgcggatctccggcggcagggtgtcgatccagcccagcgagccgaaagagttatacaggcagaaggcgcgaactttttcgccgcgcttgacaagttcttcggtgaggtggctgccaataaagccgtctgcaccggtaaccattacggtatgtgccattgtttgctccttactctataaagggtcatccagaaggtggattcccccacaatttcaattattacaaaatagtataaccgatttcggcaaagatttcaactataaagtaaaagcccgccggggcggggcgttgtcccctaccaggcgggcatgattttgtggtaacttttccaaaggcctcttggctgcgcggcagcgcagcctgggggattgaagcgtttggatggtagaccgcgttgtaacgcagacggggcaatccctcagtcagcctatcggctgacagctccctttacacaagggagcctttataccgtgcaacccgttcgtgggtctattatattaaaagttcttttggctacttttctttcaagaaaagtagcaattaaacaattagataatctccactttctccatcacgaccggcgtgcggggtttgtcgttccagtcggtggaaacggcggcgatttcgtcgacgacgtccatgccggagaccacgtggccgaaggcagcgtagccgccgtccaggtggggtgcatcctggtgcatgatgaagaactggctgccggcggagttcgggtccatagcgcgggccatgctgatgacgccgcgggtatgcttaatggggttgacgacgccgttctgcaggaactcacccttgatgtgccagcccgggccgcccatgccggtgccctcggggcagccgccctgaatcataaagccggggatgacgcggtggaaggtcaggccgttgtaaaagccctgcttgaccagcttctcaaagttttcacaggtgatgggagctgccttggggtccagctcaatgtcgatggtcttgccgttctgcatcgtgatacggatcatgttgttgtctccttttcgttggcggggtcgctggcggatgtcacgcaaccctcggtataactcatactgccgattttctcagcaaattcggcttcggtgtacttgtctagccaaagcagcagggctgcgcccataaactcctcgctgcggcgctcggccttgggcagcagggcaaacacgccgccggtatgctcggtgccggtaaaggggtcggtccaggcgtccggcatgtcgggggccagcttgcggggcgagatatgccccgttatgaacccgcgcccgccgaagagcggctccaccagccagaagaacccgcgcttcagcggattttttgtggggaacagcccgcgcagcaccttggtgtggtagaacgcatcggccaggtactccaccgagacatccacaccgtagacttccagcaggcatgtgtgcagcagcgccgtgatgtcggccagttcctcaccgatgggcagggggctgacatcgttgacgggcaccagcgcactgccggtgtcctcctcgtgcagggtggagtccagcgcgatctccaggtagccgtgcccgccggggcccgcgtagggctggccgggctggcacatggcgtacacgaagggatgcaccaccgtgtcggcggcgtagtggcttaaaaagcccagggcatactccacctgggggcggctttttacgtggcggcacaggctgcgcagaaattcgccggtcttttcctcgtgcatgcggttgcccagggtgggcaggtcaaagtggcgcttggcgcgctttttccacacctcatagcaaaagaaactgtccggcccgttggcgcccgccgcaaaggcagcggggcactgcaccttataatggatggccgtcgcggccttttgcgccgtgcgcacatgggtatagccttccggcatgatggttcacttcctgttgttcagcatgcaaactattgtaagctttcaggcgcgctttgtcaaatcttgcgctggtcgcctttcagggtgcggggcagcacggcaaagtagagcaccgcacccgcgatgatgatgaggatgaccgacaaaatgccataggggctggcagccttgttgatggtgtctacctgctcagccgtggcggtcacggcagtcaagccctgggcggccatcattttgctggcagcaaaggcgctgacggcacccaccagcgtggggccgaggatggaggaaaacttaccgaaaatatcaaagaaaccgaagaactcgccgctgcgggccttgtccgggatgagcttgccgaacatcgagcgggaaagcgcctggatgccgccctggctggtggcgcaaagcacggccagcatccagaactgccacaagctgttcataaagtaagcaaagatgcagataaacatgtacacgcagatgcccacacccaccatggtgcgcgcgccgaacctggcggccagcttcatgtacagcaggcagaagggcaggcccaacacctgcaccagcagcagagccagcagcataccggcggaatccaaccccaggttggtgccgtagcttgtggacatgctgatgatggtatgcacgccgtcgatgtagaaaaagtacgacagtatgtacaccagcatgggcttatccgcgccgatctccttcatggtggtgaacacgtttttgatgctggcgccgatgtcgcccttctcgtagggtttgccggtggtctgctcgcagtttttcagaagcggcaggctgaacaccagccaccatacggcggtgatggcaaagatgatggccaaacttgtcagcatcggcacgccgacagcgttcatgatgaggaagatcagcagcgggatggtggagccgccgatgtagcccaggccgtagccaagcgtggagacggaatccatgcggtcctcggtggtgacatcagtcaaaaaggcgtcgtaataaatgcaggaggcgtcaaagccgatggtgcttaaaatgtacagcaccagcaccagcatggccaccttaccggcgacagcggtggaggaggtaaagtccatcagcggcgtaaaggccaggcctgccaccgagacaacgcccagcagtaaaaaggcagtaaacagctttttgcgcatgccgcggatgtcgccaaacacgcccaaaaacggcgcggccagggcgacgatggccat

SEQ ID NO: 7856 - DNA, 3187 bp, Unknown
  gut microbiota DNA sequence
aataaaggtaggcctggtggaagtatcctactaaaacgagtgaagcgccgcagaacggaagctgtaactttatcgtaaagaaaggaaagaaaaatgcaaaacctgacgatcgataccggcatgcaggaatatctcatcaataaccgcgcggtgctgcgcttcaaccccagcgaccccaacctgtatcacaggttcttcgctgcggccccgaagctggacgccctggatgccgagctgaccgaacagctcaaggccctgccggcaaagccggacgatgcccgcgcggaacggggcctggccctgctgactgactacgaccaccgcatcaaggcgctgctgaccgagatcttcggcggcgagaacgactttgacaaggtgctggagggcgtcaacctggcgggcaccggcgccaacggaaagcgcgttgtgcagaaccttttggacgcactcacgccgattttgcaggacggcgcggcccaacacctgcaaactgccgccgccaacgcccgggcggaagccgacgccgcccgcgcggcgcgggagcaggcatgaccccgaacctgtggacgctgcccgagaccgtacactttgctgacacggattggcgggtgcataccgacttccgggatgtgctggagatcctgcgctggctggacggttctgccgaccctgcactgaccgacagcgagcgttggtacgtagcgctggcgctgttctaccgggatttttcgctcatgccgccagtgcaataccgagaagcctgtgaagcaatggcaacatttgtgcaggcggggcgccccgacggcggaccctgtgcgccccggctgatggactggcagcaggatgcggcgctcatcgcggcgggcacggcgcgggcagccgggcaagacctgcgtgcgctgccccacctgcactggtggagctttttgggctggttcgacagcatcgccgacgggccgtttgccaccgtggtggccctgcgggacaagctgcgccgcggcaaaaaactggagccgtgggaacgtgaattttaccgcgcccaccgtgccgaggtggacctgcaccgccccgccagccccgaagcagacgcagaaaagcaacgtctgctcgcacttttaaaggaggacgaaaggagaggaaggtaacgtgaaaacgatttcttttgatgagatgtcgaccctggacgtgcccagcgccgcgctgcgcagcagcctggacaagatcgcgtcggcgctgcaaaaggtgggcgcggcgggcaccgacgccagcgccgccgtggacgagctgcgcaccagcctgcgggcggccgccgcccaaagcgtgaaaagcgcccgcagcctggccaagtttgacgagatcaaccggctgagcgcccccgccgccgagaaagcggatgccgagaaaacaaccgctgcagcgaagaaaacgggcggctccacccgcaaaagcggcagccggtccggcagcagggccaaggccgaagcggacggggaggtgagcatctggcaggcggcactgcaaaccttgcgggatgccttggatggattttggttgtatctgcaaacctattatggcccggccattgcggcgtggcaggccgcgtgggagcagatcaaacagacagcgctggctgtgtgggagccggtgcgcgcggcagcgctggacctttggaatggcgcactgcagcccttggccgactacctgctgacggtgtttctgcccggcgtggccaacagcttttcccaggcgttcgcgccgatcctgggtgggaccatcagtgcggccatgacaattttgggcaacctgtttgtctggctttgcgggctgatcggggagctggtcaacaccgtggtgcagcccgcgctggccctgctgctggagatctggcagggggtgatggacggcatcacggccgcgtggcaggcctacgggcagccgatcctggacgggctggtgcaggcgtttcagggcttgaccgacctgctgaccgccctgtggcaaagtgtgctgcagcccgttttaacggacttgatttcgctgatcggcaccctgtggagcgagcatttgcagcccctgtggcagcagctgaccatggcgctgggcgctgtgatgaacctggtgctgaccgtgtggaacaccgtgctgatgccgctggctgcctggctggtcagcacgctgggcccggtagtggcgcaagtatttaacggtatagcgtctgctgttggcgttgccatcggtctggtggcggatgccgtcaacattggcctgaccatcttgcagggattggcggactttttgacggccgtattgcaggggcggtggtccactgcctggaacgccatggccgctaccgttaccaccgtttggagcaagatcacttcgacgattcaaagcgcggtcagcggcattttgtcggtggtgcggggcatggtcagcggcatccaaagcgctgtcaacggcctgctgtcgtccatcagttcggtgcgcagcgcagcgggcagcgccatcggttccgtgatgggccacagcctgccggtggggctgcccgtcgtggccgggctggaagatctgccggtcccggcgctggcggcgggcgcggtcatcccgccaaatcgcaagtttcttgcgctgctgggcgatcagggtgcgggcaccaatgtggaggctccgctggccacgatccggcaggcgatggccgaagttttggccggctggaatggcgcaaacgacggccagcccatcaacgtgtacatcggtgaggagctgctggacagcgttatcgccaacagcgagcggcgccgcagcctgcgcagcggcgggaggtgaaggatatggatattttgaccatcggcggcgtgacgctgcccgcccccaacgagtacaaggtgcagctgaacgatctggacagcagcgacaccggccgcaccgaggacggcgtgatgatgcgcaaccgcgtgcgggagggcattgccaagatctctgccagctgggcggcggtctccaccgcggattgcgccaaaattttgaatgccgtaaagccggacagcttcgatgtggcgtacttttttggcgaaatgcggacggcaaggatgtatgcgggggaccgcagcgcggatttgatcgcagcccgggaagggaaaggcgtttgggatgtgtcgcttaacttgatcgagttttgaacggcggc

SEQ ID NO: 7857 - DNA, 3553 bp, Unknown
  gut microbiota DNA sequence
aggaacagcgccaacggtgcgcagccaatttctccgaaattattgaagggtttgggatggtctcgcctgccggctcggtcaagcgcttcaaaatgcattgcattttgaggtcgccactggcgacccgcgccccaacaagtttttgcacgagtgggtaccgccgtgcattgcttgctaactccatttatggggttagcaagtaaactggattttgcaaaaatcgcagagtgtagctacacctgctgtgcttgctattctgcaagttcagcaggaccgtttgttcgtccgcatttatgaggacaatgtcgccggaaagctggatgatggacgcttcgccatgatgagcaaaaactacaccgaggaacagaaaaacctcaagactgaggtcaagggtctgcaacagcgaatccatgaacaggagcagcaggcagagaatatcgagcagtttgttcagcgggtaaagaaaaacggcaccctcacggagctgacaccctatgccctcagagagcttgtcaaggcggtctatgtagaagcacctaacaagtccagcggcaaacgcagacagaaggtatatatcgaatatgatctcgtaggctacatccccgtagacgagcttctaaaagcggaacaggcatgacccgaaatcatgcctgttccaagaaatttgaattttactgtcttaccagcaggccgcgtggtggcccctcttgcaaggtggaaatataaaagttattcatcagaaacctgataattgcgggtgttcagcatgcgggtggcgttgaggacggccaggaccatgacgccgacgtcggcaaagacgccccaccacatgttggtgatgccaagggccgtcaggaccaggcaggcggccttgaccgccagggcgaaaacgatgttctcgtaggcgatgcgcatgcacttgcgggagatgcgcatggccaggctgatcttggccgggtcgtcgtccatcagcacgatgtcggcggcctcgatggcggcgtcgctgcccagggcgcccatggcgatgccgatgtcggcacgcatcaggacgggggcgtcgttgatgccgtcgcccacgaaggccagctcggtcctgggcctctttgcagccagcaatttttcgacccattccactttatccgcaggcagcaggccgccgtggacctcctgcacgcccagctccttggccacgtactcgcccacgcggggggagtcgccggtcagcatgacggtgtgcacgccctgcacgatcagctggatgatggcctgcttggaggtgggcttgacctcgtcggagatgaccagaaggccgcggaatttgccgtccaccgcgatgtagaccactgtgccgaacttgccgtcgccctcgccgttctggtacatgttgacgttttcagcgtccatcagctttttgttgccggccagcacccagtggccgtcgaccttggccttgacgccctggcccgcgatctctttcgcttcggtcacgcggcgggggtccaggtcggggcaggcccgctggatgcttttggcgatgggatggttggagacgctctcggccagggcggcgtactccatcatctgcaggtcgtaggccttgccgttgatggggatgacctgggtgaccttgaaaacgcccttggtcagggtgccggtcttatcaaacacagctatgctggttttggacagggcctcgaggtagttgccgcccttgaccaggatgccgcacttagacgcgccgccgatgccgccgaagaaggtgagggggatggagatgaccagcgcgcaggggcagctgatgaccaggaaggtcagggcgcgcatgatccagtccagccagttgcccaggaacagcggcggcacaaaggccagcaccagcgcgccgatgcagacggccggggtgtagtagcgggcaaacttggtgatgaagttctcgatgggagccttcttcaggctggaattttccaccagatcgaggatttttgccacggtggagtcgtcgtagagggtggtggtctcgatgcggaggataccttcctcattgacgcagccgctgatgacgtcgtcgccggggcgcacggtgcgggggcggctctcgccggtcagggcggcggtgttcagcgtggattcgccggagacgaccttgccgtccagggggatcttctcgccgggtttgatcacgatgatggagccgatctccacatcgtcagggtcgaccacgctgacgttgccctcggcgtcctccaggttggcgctctcggggcggatgtccatcagggcggtgatgctgctgcggctcttgcccacggcgtaggactggaacagctcgccgatctggtagaacagcataacggccacgccctcgctgtactcgccgcaggcgaccgcgccgaccgtggcgatggccatgaggaagttttcgtcgaagacttcgccgtttttgatgcccaggaaggctttgcgcaggacatcatggccgatgacgaggtagggcaccagccacaggatgagctggacgaaccacggcagggcaacaaagtggaagagcagcgccagggccaccgtgaggatggcagcaatgatgatgcgctgcagcgtctttttttgctttttgttcatggtgtgggacctccgtttggggtatagaaaagcctcccctttgaggggaggtggccacgtaagcggccggaggggtggctgctttagctgagtatttttagggggatgcaattgctctacaagggagccacccctcacccgctgcgcgggagctcccctcggaggggagcctttaagcggagtttacagctcgatctcaaagtctggttcgactttcttggcgaccttgacggcttcctgcaggacggcatcgaacttgtcgtcgtcggcttccagcatcattttctgggccataaagctgatgctggcgttggtgacgccgggcagctccttaacggcggtctcgatcttagcggcgcagttggcacagtcgacttcgatagcaaacttctttttcatggcggtggactcctttataataaaatttaagttaaaggggaaacggggttggggctaaggggagccgatcactcctcgacgtggtccatgccgagggagatcatgctgcggacgtggtcgtcgtccagcgagtagtagatggctttgccgtcccgccggaacttgaccagcttgctggttttgagcacccgcagctggtggctgaccgcgctttgcgagatgcccacgacctgggcaatatcgttgacgcagagctcactctcgaataaagcatacagaattttgatgcgggtggaatccccgaacacccggaacaactcggccaggtcgtagaggatctcatcgtcggggagatcgttttgcagcctggcgatggcggcatcgtccataggctgggtggattggggattttcgatgggggcgatgtctggcatggggtgattcatcctttcatatgtttatctgttcatatgttagcatgataacgaggcgttgtcaataggatttgatatttttttggcgggcggctgcgggc

SEQ ID NO: 7858 - DNA, 2585 bp, Unknown
  gut microbiota DNA sequence
ttaacaggcggctttcggtgtccgccaccctgcggcacttcacttgttttgacggtataccgatttttttgtgtctcttttgggtctccgaaaggaacacagaaaggcagtatgccgtaataaaaagggccaccgcaaggtggcggccctgggcgggcacgcgctttgcggtggctttcaaataatttggcttacgcctgcacaggcgggataaagcccggttcgccggggagaatgacattgctgttggcaagcatccggcggaactcttcttcggggaagtcgaagtagacctccttgaacatggtggtatcgttgaccaaaatcttccagggggcaccgtccggctgctgcaggaacatgatgccggtcacaccttccaactcacggatggcttcgtcgttccagaaattgggggacggcgtgacgaaatagtggtccaccatgcggccgttgtggaaatcatgctcgatggtggccgggagttcgccctcggcctgggtggagagatactgcaggtgcaggttggtgaaatcttcggcagtcatgggaaacctccttataaaagaaaagctccccgcagaagggagcctttctcagaagaacatgggaaatcagacgcgcaggctggcgctttcgggctcgttgctgccctcgtcgaactggtagtcgttgccgggcaggagtgcgttgagcaggatgcccgcgatggcggcaatggccaggccggacaggttgatgctgacgccggcgatggcgaaggtgatgccgcccaccgagttgaagcccagggcgcagaccaggatgacggcggcgatgattaggttgcggctgttggagaagtcgacgcggttctcgaccacgttgcgcacgccgatagcggagatcatgccgtagagcacgaagctgatgccgcctacgatgccggaggggatggtgttgatgatggcctcaaacttggggcagaagctcaggatcatggcaaagacagcggcgatgcggatgaccaggggatcgtagatcttggtcagggccaggacgccggtgttctcgccgtaggtggtgttggcggggccgcccagcaggccggccatggcagtggccaggccgtcgcccagcagggtcttgttcaagcccggatcgcggatgtagtttttgccggtggtggcgctgatggcggcgatgtcaccgatatgctccatcatggtggccagggcaatgggcacgatggtgaacaccgcgctgatgaaggtctcgctgccgtccatggcaaacagacccatgctgtccttatggatggggatgccgaaccaggcggcggcaccgatggcctggtagtccaccgcgccggtgacgagggccaccgcgtaggcaaccagcacgccgatgaggatgggcaggatcttgaccatgcccttgccccagatgttgcagacgatgaccgttgccagggccacaaaggccagcagccagttggactggcagttggaaatggcgctgggggccaggatcaggccgatggcgatgatgatggggccggtgaccaccggcgggaagaagcgcatcattttacggatgccgaaggcggagatcagcgcgctgaacagcacgtagaccaggccggacagggcgaccgcagcgcaggcgtagggcagattctcggggttggcaccgccgttggtgacgatggtgaagccgcccaggtaggcaaagctggaacccaggaacgcgggcaccttgcccttgcacagaaagtggaacagcagcgtgcccagacctgcgcaaagcagcgtggtgctgacgctcaggcccgtcagcagcgggaccagcaccgttgcgccaaacatggcaaacatgtgctgggtgcccaaaatcagcagcttgggcgtgcccagggatttggcatcgtaaatgcctttggagtaatcgatcttttcgctcatgacatcctcctgtcagttggcggcgctgcgggtcctgccgcagggcggacgcagcgcacaaaggccgcaaaaaaagggaacagctgtgtgtttaacaactgctccctcgctttcctatatagtatagcgggttctgcggggaattgcaagatggaagaggaaatttggtgaaatttggtgcggacggcccgccggggcgattgtggcgggccgggggatgtggtataataaggcggaaatttttgggccgcgggaatacagggggcgatgcctgcatcgctccgccatcaggcaggcggccggcgggccgatgacgagcatcggcccctacatgtgtgatgtggcttgcttataggaggataccatgatacaagttggatgcaaagggcatgcggcgctgcgggtgaccaccgagaacaccgcccgggcgatgggcagcggcgagctgccggtgctggcgacccccgccgtggcggcgctggtggaaaagacctgctggcaggccatcgcgcccgaactggagctgggcatgaccaccgtaggcaccagtttgcagctggcccacaccgcgccgacgcccatcgggatggtggtgcagtgcgattgcgaggttttggaagtgaccgaccgccgggtgcgttt

SEQ ID NO: 7859 - DNA, 154 bp, Unknown
  gut microbiota DNA sequence
cagggggaaaaggagcaatccgctttgagatggcctcgcgtccgattagctggttggtgaggtaacggcccaccaaggcaacgatcggtagccggactgagaggttgaacggccacattgggactgagacacggcccagactcctacgggaggc

SEQ ID NO: 7860 - DNA, 5941 bp, Unknown
  gut microbiota DNA sequence
atcgtgacctgaccgtgggagagttccaccaaaaccttgttttccaagcggcgcaggctcaaataggtttcggtcaaaaagtttccgctgccgcacgcggggtctaagaatgtgagcgatgccagcttgcgttggaacacccgcagttttgccgttctggttcgttccacgggattggcgcaaatttcgtcaagctcgccctttagttcgtccaaaaacagcgggtcaataaccttgtggatattttcaatgctggtatagtgcataccgccgctgcggcgggtttcggggttcagggtgctttcaaacaccgcgccgaaaatcgtggggctgatttccgaccagttgaaatcctcgctggctttgttcagcagcaaattgcggatttcatcggtaaagggcggtatctctatattttcatcactgaacaagccgccgttgacataagggaacgcggccaactccgggttatcgtcctgcagataggggtcgcggtcttgcggcttggtgtccagcacgcggaacaaatctaccagccctttgcgcagtccgcgcgtgtcaaaacccttgaggtagtcgtggaacataccgtgatgcccaaaaatcccggcatcctcggcatacaggcaaaataccaagcgaacgcacagtttgttcaggcttttcagcgaatgttcggattccgggtttgcgtactgcttgtaaaaggcatcatacagcaagccgacaatttcacctgccgctatggaaacttccatctcccgtttgaggtgttcgtttccggcatcgacaaggaattgcagccgatagtattctttttccagatttgcaagttcgatgatttcaggctcgccgtgggggcgctccatatcgtacacatagaaggtactgaaattgcacgttaccacccagcgcggatgctgcgatacaggcagttccagaatataccgctttgcctgctcgaaaggtgtcagcagtgccccatcggattgtttaatgggcttgttcagatccttgcccatgcctttttgttcgatcagaacatgggtggcgggaatggtgccatcaataaagctggtgtgatcgaggtggacctgctcctcaaactggataaactgctcagggtgttcgaccccgtacacatcccgaagaagcgacagccaaaaaggttggctctcgcctttttcgtagcctttgcctttccagtaggcggcaaaattctttgcggcttgttgttgctgcgcagcggtcatagcggtcacctcatagcacgaaagttatctttatcataacataaagcctagtttacggcaattatgtttaatagaaaagtgggccgcaaaatgttccacatggaacattttagcgtgtgcttttttataattagcaacaggaacttcgatacttacagttttagtaaatactcatatataaaaaagggagatgcaccgggtgtggtgcagcccctttttatcaatattattccccgttctccaccgtgacgtcgcaatacccttccgggtagtcgctcagggtggaggtcgcccggatgtaggtgtatccggggccgaccgcggttaccaggccgttttcgtctacggtggcaacgctccgggtgtcggtggtccagcgcagggccgtgtacaggtccgcgtcggccggctcaaactccgccgaaagctggacggtctcccctggcttcagccgaatctccttaatgtttagatgaatctcctccgggatgcgcaccacagtgaccgtggcggtggccgtcttgccactgcatgtggcggtcagggtcgtggtcccgtaggccaccggcaccagccactgcccgtccagtttggcgatgctttcatccgcgatttggtaggtcaccggctcgcggccggtggcatcctccggcacaaagcggcagaggatgctggcatggctggacggataatgggagattcgctcggtgccgtcataatccaaaacgatctcggtgcgctcgtcaaggtacagcacaatgtcgtttagaataagctcccgcagcgggttggtcacctgcacggtgcagctggcggtcaggccgccgctggcgtccgtcagggtcagggtggtctcaccgccgtgcagcccagtgacgacgccctggctgttcacggtggcaatgttctcgtccccggtctgccaggtccagtggttggcatccaccgcagtttggatcgcggtgtctgaggctttgcccgcagtctcgtactgcacggcggcttcggcggtttccccggcctgcacggtgaccggctgtaggctgatgccggtcagctccgctttgccgcaggccgtcagcaaaagaagggccagagccggtaaaaatgcacggtatttcataaatcttcgcctaaaatcagcttttctttcagcagggtcaccggcggctggccgggggcgctggcggcggacagcgtgccaaaagtggccgcgctgccaaacgcgccgccgcagtagcgggtcacggcgccgtcgcggcccatactcatagtaataagggctttgcccgggcgctgggcggccgcctgagccgtagccaacagcaggcgggcggcgtcggcgcggttgcggggcatgacggccagcttggcaatgtctgcgcccagatccagcatgtccaccagtgtgtcagtcatgacgcctgtgtcgggcgtggaaccaaagtggtgctcgctgaacagcgccgaaacacccgcccggtgggcggcgtcccgcagctcctcggtcagggtcttgtccgccagccattcaatgtccagtgcgtctgcactgccctgcgccaaaagtgcctggcaggcttcgccgtactcggtgggggtcaggtcgacttcaccgccctcccgcgctgtgcggatggtcacgatgagcggtttcgttatggcggcgcgcacctgggccaaagccgtcggccaatcctgccggggcagcgggtccaggcgcagctccaccaagtcagcggcgtcggcacgctgcgcagcggcggcctgggcggtcagctccggcagagtgcgggcaaacagcgggacgataattttgggagcttcggcgtgcagttcgatcataaggcactccttttgttggcagcaatactttgcctgcattttaccacattttttgggttttgtacaacagctttcgcttgcgatacccgccgccccgcgctacaataatctgtataaatggagggtgcgcttatgaacacaaaactgccggaaaattcgttgattttgctggagggtggctcgctgcgcgggctgtataccgctggcgcgctggatattttgatggagcatgacctgtacttcccagccgtggcgggggtgtcggccggggcactgaacgcctataactatgtggcccaccagcctggccgcgcggccagcatcaatctgcgctaccgccacgaccggcggtactttggcccgctggcggcagtgaaaggcggcagcttgttcggcttgaactttttgctgaatgacattgaaaaggaagtcccctttgacgaggatatgtttaaaaacggaggccagcgaatgtttgccgtggccacctgcgtggagaccggcaaggcagtctactttgaaaaagaccagtcaggtttggactttaagcaggcggtcaaggcttcggccagtttgccgctggcatcggtgccggtcaagatcgacggccacagctacctggacggcggctgcgcctgccccatccccatcaactgggcgctgcgccagggctttgcaaagatcgtcatcgtggccacgcgggagaagggtttccgaaaaaagcagcccagccagcgcatggtggacctgtatgatgatttttatggcgataaaccgttgttcctggccacgctgctgacccaggagatgcgctacaacgctttgctggaccagatcgatgcgctggaagacgagggacgcatctgcgttatccgccccgatgagccggtaggcatcggccgcttcgagggcagtaccgagaagctgacggaactctacatccgcggttacaaggaaatgcagcaaaaattggacggtatgatggagtatttggaaaaatagtgaccactccccttttgcagcctgagcgattgaaataaaaacgctcccggcggcggacctgtgcatgcgatgcggtcctgcctgcagggagcgttttgaattttggttttagatgtgctttttcaaaaagtctgtcacggccttggtgtaggcgggtgtgtcgtagtagtaggacatggcgtgggtggcaccgggaatgacgagcagctctttctcgctggcgcaagcgtcgtagttttcgcggctcatgctgcagggcacaaagtcgtccgcgctgccgtggatgaagagaatcggaaccttgctttgcgccacggccttgcggcaatccacggtatcggggtcaaagcggccgaagatcttggcaccagctttgccgacggcatagcccggtcccaccggcacgtgcggcaggtacttgggcagacaggtgcggcagatgtcccggatgctggagtagccgcaatccgcgatgatgccgtgaacgctgtccggaaggtccagcccgctggccagcagaacggtggctgcgcccatcgagacgcccattaaaaagatgggcaccttgccgctggaccgcactgaagcccagtacgcccaggcgcgggcatcgtagcgctcctgcgcgcccatggtgatggtgtagctgtcactgcgcccgtgggcacgctgatccggcatcagcaggttgtagcccagctttttgcatagcacgatcagccccatcgtgtcgcgcatcgcagtggaacggtagccgtgcatgatgatggcaatcggcgcgtcgtcggcctcgtggcagtaccgagccgacagcgaagtaccgtcatcggcggtgatatgtacatagtcgcagggcaggctgtccacaaactccacgttttcgcggatctgcggcaaaaagcgagaaccctgcgcccactcctctgccgtgggaatatccagcttcggccgctggaaaaaagccaggtggtagatgccataggcagcgcccaggcctgccgccgcagcagcggtaagggcagcggcaacacgtttcataggtttgtgcacctcactttgtttagattatgctcccatggttccacgatagcttcacctcccgaaaaaatgtttttcttttttaaaaaacagttccgatttacaccccgtttttctcctattagtgaaagggtaatctaaacgcgagttactaaggttactgtcataaaacacaaaggacagaaaggagaaaaagaacatggaaaacaaacagaaagacacggttggcttacagctaacgaaactaaacacattatatcaaaaaccaaccaatcacgcaaggagaaagcctatggagcaaacgaaacaggaacagtttatcaccaactgtgccatctatggctataagaaagacccggagaacaaataccactggctgattgacgaggaagcggctgccgtggtgcgacgcatcttccaactgaccattgagggcaaaggcccctatgatattgcccgtacggtatggaggtcaaccattacggcatggccctcttcccatttcacaatgaccggcactccagcctgtatgtggcagacgaccaccatgctgattgcagcactgctgtatgatcgaaaatttgagtaatcttttataacaagcgtctcagccgatgtctgtctgaacattggctgagacgttctttttattgatgtgcatggtcatagaggagctgaatatcatccggcagatggtctggaagcaggctcttgatccgatcctcgctgccgtcctgaatcgcctgatcataataccagcatttgaatcggagcattgtgtaccacctttttgttttgacatg

SEQ ID NO: 7861 - DNA, 3109 bp, Unknown
  gut microbiota DNA sequence
ttcatagtagtgttgccatagattctcggtgttcatttccagtttagccgcacacagggccgtttcgcgagaacattcgcggatcttggcaagcgccaactgtttatctttgctgatcacaagcccctgcttccaatcgttcagcaacttccttgcttcctcagcctgggcgtgttggatggccgatgccaacgcctgggtattcatccggcgggtatccttttcggcagatacagggttggcaatgacacagcttttctcacagaaatagcccgtgcgtaccatcgctgaggtatcctcgtaggctttttgcagcttcttctcgtcgttgtaaatttcgctgatgcagaatacacctgttcccagttccgacggcagctgacttgcaaagtttttcagcacagcgatcagacgctcccgcgctgtgactttatcaataccctgcaatacggggcaaagcaagatgatcttttcatccgcactgccaaaaatcggttcgtaacctgcttcctgcaaagcgcgtcctgtataagtttgagccattgccagcaccagcggagccttcatcttagtattgtaaaagctccccataacaactacgctgtccgcctttgttttttccttgatccaatccatatccgtaaagttagcgccggacgtaccatagcgggccagattgaacaaaaggctcgatgtagccagtgtgcgggtgttctccatctcagcttttgcctgctcggagtcgcggcgggtcgattccagcttgtccagttccgccaccactttttcgatggtatcctgtagctcggtacggctgatgggctttagcagatagttcaccgtgcccgcccgcatggcgctttgggcaaagttgaagtccgcataagccgaaacgatgaccaccttggtctgcggttcgttctgagcgcagtactcggccagttgcagcccggtaaggcccggcatcttaatgtccgtaatcacaatgttagggtgcagccgctcaatcaaacgctttcctttatcccctgttttggacgtaccgacgatatggcaacccagcttttcccaatctatcagggtttgcaaactttgcaagatcagttcctcatcgtccaatataaccacagagtatctgctcatgttttcttccttcctgcaggcgcccataccctcacactgcccgcattttcttactggtttacttctataggcagcataagcgtaatgctggtaccccattcagcatcacttaaaaccgagatcgagccacttgcaccgtacacataacggatgcggtccactacattgcgggtgccaatgcctaatttctttttatcttcctcgttcgctttgcccgcgatatatcgattgacagactccaatatctcgcgggaaagccccacgccatcatcagatacttgaatacacaagtggtcatcctccctatagatttccaccgtacaggtaccctgtcgggcactggggacgatgccgtgtaaaacagcattttctaccaaaggctgtatgatcatactggggatgcgcagtccttcgcactgcggatccacgataatactgtaatacaactgtccaacctgcatcgtctgataaatttgtaggaaagcatctacacaagcccgttcctcttctaccgttgtaaaagttgcgtcgcttatacggtttttcatcagcttggcgaatgcgccggtgatgatgcgcacttcctcggtacggcccatctgggacagagcgttgatgcattccagcgtgttatataaaaagtgcggcttgatctggtgctgcagctgggcgatctgcatttccttgtaggccaggttggccttcaggttttggttgaccagctcgtcgatgcggcgggccataatgtttagattatcggccagaatttcaatttcatctccggtgtgtacgtccagggtaatgtcgtaatcctcgttctggatttttttgacagcatccatgatatgggcgatgggcccggtgatgattgtatggttcagtgcggtgatgcacaaaatcagcagaaccgcaatcagcgcaaaggacaggatcatcagcatcagcagactttgcatctcgtaaatatcatcgttggatacggcactcaggaagtaccagccatcgttcatgacctcattgctacaaagcaacatttgcccaatgccgtccaccgttatggtgataccgccttgggcatccgataagtcctgatctgccagtgcctgcagatagacttctttatcaatattgtcgcagcatatcagcacatcatccacactgtcatacagacccaagaaattgttgctgttgcccgcaataacatccaggcgttctttcagcactcgatcatcgtacagaaatgtgatgtagccaacgattttgcgggtttctaaagtgcgcacggctcgattatacacaaggtggccatccaaaaattccgatgttacccggccatccggagtaaagcgggaaatatccgtagtgttcggcaggcggtaggcaccttcccggttgggtgttttttcccatttggtaaccaaagtacctttgatgtcatagaggtaaacaccgctgatcgcatccatcgcaatactgcgcagtgttattacactgcgcagctctttgcgattggaatagatctctgcctgagaactgccgcctttttccataatgtcggaaatttcgccgtccagagtcacgaagtcgatctgatgaacgaacgcatctgagttttcgttgaaacggtcgctcattgcctgggccagtgtctggtttgctttgaccgcgttgcggtactcaatttgcgacacctgccgaataacaaaagtgccgatcacgactagcagcaaggttatgatcgccgtactgcccgcaaccattttccaacgaagtgactttccaagtttcaaagcgttccccacctattcttggtagaatttgaacaagctttccattactgttccaattttacaccttttgttgcaataacgtctacccctgtgccagccacattttctgccaaaacctggccaatggttatgggggcggggacttccacgtctttcagcgcgcggaccacatcaaa

SEQ ID NO: 7862 - DNA, 23688 bp, Unknown
  gut microbiota DNA sequence
aagtactacgagacccgctacgaggacttcgtcaccggcaacggtaacgcaggcgactacgcctacggcgacatcgtggcttaccccttcggctacggcatgagctacaccgacttcgacatcagcgacatgaacgtcaactacaatgccgccgatgacacctacaccgtcaccgtcaaggtcaccaacaccggtgacatggcgggcaaaaagaccgtgcaggtctatgtccagagcccctacaccgactacgacaaggaaaacggcgtcgagaagtctgccgtttctctggtcggtttcggcaagaccggtagcatcgaaccgggcgcttccgaaaccctgtccatgaccgtcaacaagcgcgacatcgcttcctacgacacctacggcgcaggcacctacatcctggatgccggtgactactacttcaccgccgccaccgatgcccacaacgccgtcaacaacattctggctgccaagggctacaccgtcgagtccaccgacggcaagatgaccgccgacggcaacgccgacctgacctacacctggaccgaggacgccctcgacaccaccacctatgccaccagcgaaaacggcaccgaaatcaccaaccagctgtcctgcgccgaccccaacctgtacgagggcgttgaggaaaccgtgacctggctgagccgctctgactggaacggcaccctgcccaccgaaaccgtcaagctgaccctgaccgagctgctcaagaaggatctgcaggacatccgctacgatgccgctgactacgagagcgttgagatgcccaccctgggtgccaagaacggcgtcaagctgtacgatatgatcggtctggactacaacgatcccaagtgggacgagctgctggatcagatgaccttcgacgagatgaactccctgatcggcgacgccttccactggaccatgcctgtcaagagcgtggaagcccccggcacccgtgacgagaacggcccccagggtctgaccgccagcctgctgggcaacgacaagagccagctgaccgccaccgccttcacctctgaggacgttatggctgccaccttcaacaccgagattatgaccgagatcggcaaggttatcggcaacaactgcctgcaagccaacattgcctgcctgtacggccccggcaacaacattcaccgcaccccctacggcggccgtaacttcgagtactactccgaggacggcttcctgtccggcatgatgagcgcctacgaggtcgccgccattcaggcaaagggcgtacacgtcgttatgaagcactttgccctgaacgactgcgagcaggatcgtatcggtctgggcgtctggctgaacgagcaggctgcccgtgaagtctacctgaaagccttccaggctcccgtcgaggtcggcaacggcaacggcgttatgattgcctacacccgttggggcgctgtctggtccggcggcaactacggtctggtcaccggcatcctgcgcaacgagtggggctgcgacggcatggtcattaccgataacgttctgacccagtatgtcaacggtcccgacggcgttctggccggtgtgtccatctacgacgccatgatgtccttcgtcaccgataccctgccccagtacaagaacgaccccgtcattgttaccgccatgcgcgaggcctgccaccacaacctgtacgccatcgccaactcctgcggtatgaacggcgtcggcgcggacaccaccatcaaggtgcaggagctgcctctggtaagcatgctcaagaacattgcccgcatctccgcggtgctgttcgttgtctttatcgtgctgtgggtgctgggcggcaagaagttccgcaagaccgaagaatacaaggcttataaagatttcaaaaaatccctgaaagccgctaagaaagcctaacccccctacaggatcccgcaagctccccgccggccccggcggggacttttgagtaaattctcccccacaacaaggagcagcccatgagtgaaaatgcaaaggcagcgggtgtcaaccgcgccaaactctatcagctggtgcttttcccgctgaacaacggtgccaccaacgtatactatgtactggtgctttcctacattgctacctttggcagcaatgtactggcgctgggtacgctgtttgcttcggtcatggtcacggccatgcgcctgtgcgatgccattactgaccccatcatcggcgcattgatggaccgcaccaacggcaagttcggcaagttccgcccgttcatggccatcggcaacctgattatggccgtcagcatcctgattctgtacggcatcacccctatgattcccgacaccatgatgtgggcccgctatgctgcctttgtagggctgtatttcgtctgggtcatcggctacaccttccagaccagctgcacccgctccggccagacggtgctgaccaacgaccccaagcagcgcccgctgttcaccatcttcaacacggtcggctctctgctgggcatgggcgtcatgcagttctttgctccaatcctggccaagaactttgagggcggctattcctccgccgggttcttccgtaccctggccccggtaggcatcatcatgtccatcgtgctgaccatcctggccatcatcggcatctgggaaaaggaccagcccaaatacttcggtatcggcggcgaaaagaccgagaaggtcaaagtctccgagtatctccagatcatcaaagagaacaagcccatgcagcgcctgatggtcgccggcgccggcaccaagctggccctgtccatcgccaacaataccaccgtgctgtgcatgctgtatggctgcatgatgggcgcttacgatggactgtacctgcccatgatggtgctgggctatgtgttcagcgtgccgttcttcctgttgtcggtccgtaccagccagaaaaagggccagaaagccagcctgaccaagtatgtcagcgtggcgctggtctgctacattggcgtttttgtgctgctggcgctgtggggccgcggtgatgcgttccacctgtccctgatgggcgagaacggtctgtccatcaacttgtacacggtgctgttcatcctcttcttcggcatcggctacggtgcctactacgctacggcggatatgcctatccccatggtggctgactgctctgactacgagacttaccgctccggcaagtatatccccggcatcatgggcactctgttcagcttggtggataagctggtttccagcctgtcggccacggttgtcggcatcgccgtcaccttcatcggcctgaacaatctgcccacccagtatgacccctatacccccggtatgaacgtggtggtcatcgtgctgttctgtgtgattcccatgctggcctgggcggcgaccttgattgccatgaagggttacgctttgaccggcgaaaagatgaaagagatccaggccatcaacgcctgccgccgcgacgctgttgcgggcggcatgaagctggaagatgccatggccaagtggcagaccatcgaccagctgcctgctgagtacaaggccaactaacttcgttgtatcctatcttctccattgccccgggcaccgcaaggcccggggcctttgtgtttgtgcagaacacaaaatgtgaaaactgcaaaaccctattgacagcctgggcttcccgttctcggaccctaccgccgaggggccggtcatccagggggccaacctgcgcgctttgcagggcggtgtgaccaccgataaagtctttgatttcgtccgcgaactgcgcaaggatgtcatcatcccgatggtgttcatgacctacgccaacgtggttttctcctacggcaccgccgccccggaacacatcggcgcatatgtgaaaagcatgaaggacgcgctgcgctgacgcctgccattctccctccattaaaatacccccgccaggtccctcaacctgacgggggtatatttttatgtctgcggtttaccgatttttttcttccgttcccaggccatccaaccgagtgccgccgccagcgcggccaggctggctgcagcgcccggcaccacgccggggtgggtgtagcgcagggtaacggtgcaatcgccctggggcagcgatacgccgagtaacccgccaaacagcgccgagggctgcacctcctcaccgttgacggtgacgacccaattgtcatcgtaggcaaagctcagcgccagcaagtcgttgtcaccgctgacggtgcagtgcacatcgatgcgcccgccctcccggatgtcggcatccacatcctgcacctgctgccgggcggcggccagggcggcgctgtccagctggtagatttgggtgttggtatggaaaacttcgtcgtcggcaatgcccagcaccattgtcacgtgctgcccggcggtaaagctgggcaagcagatgacaccgcccaggctttccggctcaaaatattgggcgtagagtttgccatccaccactacgtcgatgggcagctgctcctcggtgccggggatggccatgtaggcaggcccggtgaggggcgcggtaaagtccacctgcacggtgcctttgtcggtcacgctaaaggtcggctccacgctgaccagcgcggtgtccgtgcagcctgtcaggctttgcagcatggcgttctgcatggtaaaggtattgtcggtcagtgcatccacgtccacggacagggcatcctgccgggccaggtaggccagcgggaaggccgcgtcattcttatataaagtataggcagagtcgcagtccaccggctgccagtgcccggccaccgggcggctgccatcgctgtacagccagcggatgcccagcaggctgtcggccacgccggtgctgccccagccgtaggtggaataacccacgtagcccagctgctccagcagctccttggcggagctggctttggtgctggaatagtggctgatgccccaatagcccagcaggaaggggtcgttcagcgtgtgcagaaagttcttctcgatgcggcaatcgccgtcggtctcggccttggcagtggccacggcagcggaggcgttatcgtaaaaggtggtaaaggcggccaggtcgaactgctcaaactttcgcagggccaaaaccgtgttggcgcccaggtcggcggcggtcagcagggccgccgtaccgcagagcagccgccgcttgtttacaggcaaagcgggcttttcaatcagtagccacgccagaatcagagataacgtacacagccccgccgcggcaaccagtttggtcttgctgaacagctccgccccggcggccaggggataccccgccagccagaccagcgtcagcccggcggccagcccccaggcgcggcggcgctggggccctgccgtcagcacccgcgcagccagcagaatgaccaccgcgctgaacaaaaagctgtaccggtaggggaaccacaccggctgcttcatgccgtgccagatttggtctacaccttttacccaaaagctgcccgccagcgccgccagcagcgcggcaaagcccagcttttcccggcggggcgcattgccgcaaaagtacagcagcaccagcggcaccagcaccacgccgcagtaaatgttgggcagaccgttggtgacatcgttccagaaaaagttgccgaagaacagccggtaggggagttgtaataaattaaactggggcgtcaggctgaaggtgaagtcaaacagcccgcctttgctttcctgcacttccaaaagcaccggcagcaaaaagaagaaactcagccccgccgccagcacgccgctggccgcaaaggcggcgaagcggcggccaaaccgtccctgtccccggctgggccacaggcacaaaaagtacaggatgctgaacagacacaccggccaggcaatataaaagttgagcaaaatgcaaaggaagaccagcaccgtaaagccccagtggcggccctggcgcatcaggtcatccagtgcagccagcaccagcggcagcagccagaccacatccatccagatgatgttctggttgtacacgatgcagaacgcgcagaaggcatagcactgccccagcactgcaaacaatgggtctgccttggcaaagtggcgctgcaaataccagcagaacgccgccgccgtgaccccggtgcgcagcaaaaatagcagccccgccgcctggggcaccatgcgggtaggcagcagcaaaaacagcaggttaaagggactgttcatgtagtaggcgaacagccccagggtgctgccgcccgccagcttgccgaaactgtaaaagaagccgccctgtttgacccgcgcccacatatcggtgatgtagtttacgtacagcccgcgcaggtcgccggtaagcacggtgccggtgccaaagggccaccagcccagacaaaaatagaccgccgccatcaacaggcagccgcccccaaatgccgccaaagtcagcggccagtattttttcttttccacgatgtatcctctactataaaaatgtcgcagcttgcaatggccccctctgggagagggctcccgcgaagcgggtgggggagaaaacttaatccaaggctctctccctcccagagggagactttcacggcatcccgtatttaacctaccgattatagcacgcctgccgctgcaaaacatgaaatattggtgaacaccctgtaaaaaatgcggatgaccttttcaactttgcggaacaacgttgaaagcctggaataaatgctgtataatggctttataaaaaattagcagcaaaagcgatgaaggctattcttatatagagaaatggagaaaccctatggcaacaatggaagatgtggcaaaggcagcaaaagtttctcgcgcgacagtatcgagagtgctttccaattacccatctataaagccggaaacccgccagcaggtcatgtactgggtacgagagctgcattatgagccaaaccaggtggcgcaaaaccttgcgggacaccacaccaatctgattggtgtgctattttcggacctttccaacccgttgtatgcggcactttctacagcaatcatccgggaggcggagcgcgagggatacagcgtgatcgtgggggatgcccagcgggaacgtgcccgggaagtgaacatcatcaacagcttcaagcgccgaaaagtggacggcattattgtgcgtgccatcggccgccccaacgagaaactgtataaagaactgtcaatcccaatggtcagcctgtataaggtgattgggcataaaaacattatcatcagctccgaagaaggcggtgcccaggtggcgcgtcatttttacggtacaggccgggtgcgtgtggggtatttggggcctaccagtgccctctatggtaacgacaagctggcaggtttgcaggcagggctagattcttgtgggctgcagattgaaaaaatcttgccctgcaaccagcatgaaaccgccgagaaccagaaagcttatcagatttttacagaatatctgcagggaaatgacccccgcgcagtgaatgcctggtttgcgcacagtgatattgccgccagcgatattatccgcgcgctgatggaacatggtgtacaggtcccccaggaggtgagcgtctgtggatacaatgataccctgctggcccgcaaaatgattccatcgcttacttccgttgcatcgcctgttgatgaaatggcacgcaatgccattgctttactcttgaaagaaatccgcggtgatgacgggacggaaaacgtttacctggccccgcacctgctgattcgggagtcatcccttgtcaaaatagacaaatgaacgctcgtgttcatagccaaaagagagaaaacgacgtggattggttgacaaagcacaaaaatggtgttatgttgtgaacgaaatgaacgcgcgttcatagttgcaaggctacgttcatgaaccggaaatgcacgcagcgaaaaaatggacacaaccaaaaatgggaggaaaccatgagtaaagaaagagatgttgcagaacagatcctgcagcacatcggcggaaaagaaaatgttgtcagtgcagaacattgcgcaacgcgtctgcgcctgatcctgaaagatgattctcgctttgataaaaagcagatcgaagccattgatggggtgaagggcagctttaaggctgctggccagcatcagatcatcctgggcaccggctttgttgataaggtctatgcacagttcatggagattgctaacttccaggagggtgagctgaagactaaggcagaagccaccgcagggaacatgaactggttccagaaggcatcccgtctgctgggtgatgtgttcctgcccattattcccatcctggttgctaccggcttgtttatgggcgtacgcagcctgatcaccaacctaggcgtaacgttggaccccacggcattgaccctttcccaggtgctgatcgatacggcattcgccttcctaccagccctggtcacctactcggtcatgaaaaagtttggcggttccccggcactgggcattgtcatcggtctgatgctggttgctccgcagctgcccaacgccaaccaggtggctgccggtaatgtggaaccaatctacctgtccctcggcgcactgtctgtgccaatcgttggttatcaggggtcggttctgcccgccctggtgctgggtatcatcgcagccaagattgaaaaggctttgaaaaaagtcgtgccggatgtcctggatctgatcgttactcctttcgtaacgctgctttgcagcatggtcattggcctgatcgtgatcggcccaatcatgcacgttgtggagcagggcctgctcatcggcgtacaggcacttatgaacattcccttcggagtaggcggcttcatcgtgggtgccctgcagcaggtagttgttatcaccggcctgcatcataccttcaaaacgctggaaattgagttgctggccaacaccggtgcaaaccccttcaacacgctgacctgcggtgctatcgtggcacagtgcggtgctgcagtagctgctgccctgaagctgaaggataagaagcagaagtccctctacctgtccgaggtcctgcctgcttcccttggcatcaccgagccgctgatcttcggcggcaacctgcctcgcctgactcccttcgtctgcgcctgcgtgggcggcggctgtgctggtgctttctcctccatcatgggccttgctgcaacgggcatgtccatcacggcaatccccggtatgctgctttacctgaacggccagctgccccagtatctcattgcctgtgcaatcggctttgtggttgcctttgtgctgaccacggtattttacaagccgaaagaaaattgaaaacttacgaaagtgagcgtgcataaggatggaacgcttatacaacaacattcagctgccggatgtctggccaccgaaaaataaggagacgaccctggaccaaccgctggaagtgccctatctctcccagaagccggataccattgatattcgggtgggccgtcagctctttgtggatgactttctgattgcggaaaccgaccttgtccgggtagaaggcaagccggagacccagccccagccgcttttgcagccggagaccgagatggaactgaacagcgggtactgcacctgcgcctgtcccttcaacggcggtgtcttttatgatccccaaagtgcagcctacaaaatgtggtatcaggcaggctggttcgatggcagcgcctatgcggaaagcaaggatggcctgcactggaaacgtttgcatgagttggaccccagctgcagcagtgaccgtgttctgccccgcgtaccgggccagatgcgcgatggtgatgctgtgtggctggatctgcaaactgccaacgaagcagagcgctataagatgctggcgttttaccgttgctttgataaggactatcggtattatccgtttaaacctaagcatgcccacgatgacccgacctcggtcccgccgaaagagatcacgatgctctatgcctcgcccgacggcctgcattggaccccgaaaggggagaccggccccagcggcgataacacgaccttcttttacaatccgttccgcaaaaagtggatctacagtatgcgcaccttctccacactggacagccgtgtgcgtgtgcgtggttactatgagaccgatgacctctttgcgggaaaggattggaaagcggaggatgtaagcttctggtcccgtacagacatctatgaccgcccggacccggacctgggttactacacacaattgtataacctggatgcggtagggtacgaaagtgtcatgcttggcatgtactcggtctttatggggccgcctaacttcgtagcggaaaagaccggcctgcccaagatcaatgacttgaaactgggattcagccgggacggcttccatttttctcgtggctcctacagcaatttcctgtcatcctcccgccagaaaggcagctgggactacggctacctgcacccggccaatggcatctgcacggtagcaggggataagctgcatttctactactctgctttttcgggtgcatcaccgcattttggcagccacaaatattccggtggtgcggtgggcgttgccactttgcgccgggacggttttgccgcgatggtgacagaaaacggcaacggtacattgctgacggaaaaactgacctatgcaggcaatcatttctttgttaacgcggattgcagccagggtgagctgtgggcggaactgctggatgcggaaggacatccgctgccgggctatacccgtgcggaatgctgcaccctgcgcggcaaggacagcacccgctgggaactgcactggaatgctaagggcgagcagactccttggccgcaggtgatgagagtccggtttggcttgcaaaatgccaagctgtacgccttctggatcaccgacagcgccgagggcaagagccatggttaccttgcggcaggttcccccgaagccaatgcccggggcaaagacgaataaccctaaatacaaagcggtatgcggatacgcataccgcttttgctgtagcaggcaaaattgaagattgaatccatccacccaatatgctatactactaacatagtgtgccctggcttaggggcgttttgggttgtagatagggaaaggaatcatcgatgaaaataggatttgacaacaacaaataccttaccatgcagtcggcgcatatccgggagcggatcgcccagtttgacaacaagctctacctggagtttggcggcaagctgtttgacgactaccacgcttcccgcgtgctgccgggctttcagccggactccaagctgcagatgctgctgcaattgaaagaccaggccgagatcgtcgtcgtcatcagcgccgaggacatcgtgaacaacaaagtccgcggtgactacggcatcacctacgatatggacgtgctgcgcctgatcgatgccttccagggtatgggactgtttgtgggcagcgtttgcgtgacgatgtacaccgcccaccccgatgtggaaaacttcgaggccaagctcaacagcctgggcatccgcaccttccgccactacaagatcgccggttatcccaacgatgtagcccatatcgtcagcgatgacggctacggcaaaaacgattacatcgagacccagcgcccgctggtggtcatcaccgcgcccggccccggctccggcaagatggcggtctgcctgtcccagctgtaccacgagtacaagcgcggcgtgcgggccggttacgccaagtttgagaccttccccatctggaacctgcccctcaagcacccggtcaaccttgcgtatgaggccgcaaccgccgacctgaacgacgtgaacatgatcgacccgttccatctggaagcctacggcgagaccaccgtcaactacaaccgcgatattgaaattttcccggtggtcaacgccatgtttgagctgatcgctggcaaaagcccctaccgttcgcccacagatatgggcgtgaatatggcgggcaactgcatcatcgacgatgaagtctgccgtgaagcctcgctgaaagagatcgtccgccgctactacaaatgtatgtgcgaccagaaagtcagcggcgtggtcaagcaggaccgcttcaagctggaactgctgatgaaccaggcaggcatcgcccccggcgaccgtgaggtggagaaaaaagccgccgcctgttccgaggccatcgacggtgccccggcggctgccattgagctggccgacggcagcatcgttaccggcaaaaccggcccgctgctgggcgcggcatcctcggccctgctgaatgcgctgaagcggctggcaggcatcgaccaggagatcgacctggtatcctccaaggctatcgagcccatccagcagttgaagaccacttacctgggcagcaagaacccccgcctgcacacggacgagattttgatcgccctgtccagctcggcctacgagaaccccatcgccgccgcggctatgcgggaactgcccaaactgcgcggctgtgacatccacaccacggtcatcctgtccggcgtggacatcgacacgctgaaaaagctgggtatgaacctgaccagcgccccccattacgaggaagaagaccgcatgtatcataagcggtaagataaaaggctccctttgaggggagctgtcaccgaaggtgactgaggggtggctctcgtgccgctcgtggctaaagtaaccacccctcgcccgctgcgcgggagctcccctcgaaggggagccttttgcagttactgtaatagttgtatatgtcgtacaagtcgtacacttcgtaattatcgtaatattcgtaagtatcgtcacttgtagtaagttgcaaaggcaataccgcataattctaagtgccgatacggcgaacattgttcgcccctacaaagcatataggaatacaacatgtacgaagtgtacgacatgtacgactattacaatcattacgaatattacgataatgatagtaattacatagtagagagtatttacattcagctccctccctgcgagggggctgtttttatcgtaactttatttcacttaactgttttgcagctgaaaatccgaatgttctttgtgcaaaaaagcaaaaaaacataagcaaaaccgtcgttttgctgttttatctaaaattttgtttcaaacacttgacgttttcgtgaaaaaagagtacaatccaaagcataagatcaccggcgaggaaacggtgaccacaaaaccacaaaatcgaagggagaacacaacacatgaaaaagcttgttgcacttaccatggctacggccatgaccctctcactggcagcatgcggcggcgcatcttccagcagcgcagcagcatccaccgccacgacggacacggcatcctctgccgccgaatccacggcctctgaagccgaggacaccatcaccgttatggtgccccccgtcaccggcgactatctggataagatgaccgagtgggcagacgagttccacgagatgtatcccaacctgaccatggaagtcatcggcacctcctgggacgaccacaccaccaagctgtccaccatggcccaggccggcgaggccccggacatctctgaaatctcctacgcaggcctggcaacctacgtcgaaaacggcaccgccctgaacctgagcgagtacatggacaaagatcagctggctgactttgaccagaacgcccttgactacatgaccgtcgagaacaacgtctacggcctgcccctctacatcaccatccaggcactgggcgccaacaaggatatgctggaagccgccggtgtggatgttgccaaggtgcaggagagcggctggacttacgatgagttcatggaagccatcaagaacggcaccaaggacgacaccttcggcttcgtcttcgccaactccggcgcaaccgcttctgacttcctgaacatcttcggtgtcagcgccggcctgaacaacgctttcaactccgacctgaagtatgagtacaccagcaccaagatgctgaacctgctgaccgccgttgaagaaatgaccaagtccagctacatgcccaactacggtgtcgaggcttcccagcgtatggtcatgtgcgagaccggcaatgccatgatcttcggcaaggccatgcctctgttcgagaacaacatcaacaagaacaacgccgcgatcgaggcgaacgacggcaccgctgttgagaactctatccccgttacctacgcgttcctgccggttcccaccatggacggcgtggaggaaagctgctacggcaccgtcgacggtctggtcgctttccgcaacagcaactccaccgatgagcacatccagaacgttatgaaggccctgtacttcctgtcctccggcgaacgtgccgcttacgttgatgctaccacctgcctggacggcgtctgcgcttccgcccgtgaggctctcgcttccatggataccggcgaccgtgaccagggcaacatcgactgcgctgcccgcctgatcaagaccgttgtcgctcctccgaccggcatcaccgctgagcagaccgcaagcgccaagcagctgatggacgaggtcatcgtgcccaagttccaggctctgatcgctggcgagaccaccgcacaggccatgtacgacgagatcgtcaagcaggctaccgccgtctttggcgaggatggctgcgacctgacctgattttgccgctgccccaactgaatccgcactgaatgggagttgcgcataacccccgttcagctatggcggctcaccccggcttactggtggcgagccgccatttctataggatattatggcgcaaaaacaacgttggaacgctatgtatccagaacaccgcaggaggttcccgaatgtcgaaatccacccaaccggcggccataaagccgcgcaaaaagccctttttcaccaacgatgatctgtggggctatgcgttcatcggcgttgccgtcatcttctttttgatgtttaccatctacccgctgatctcggctgtcatcaccagcttggaggattacaaacccttcggctctgactttgtcggcctgaagaactaccagaccaccttcaccaacgctctgttctggaagtccctcaaaaatacgctggtctacaccgccgtggtcgtgccgctttcgctgctgatctccttcgcggtggccatcctgatcatgccctttaaaaagaagctgcagtctgtctttaaggccatgtactacctgcccgccgttgcctccggcatcgcgctttcggtggtgtggctgtggatctacgattcctcgccctccggcctgttcaaccagctgctcaccttcttccacctgcccacccagaactggctgggttccagcaagacctcgatgctgtccctgatgatcatggcgctgctttccggccagggccagaatatcatcatctacaccgccgccctgctgggtatcgataacacctacttcgaggcggccgagctggacggcgcgaccttcatgcagaaggtcacccgcatcgtattcccgctggtcaagcccaccaccctgttcctgctggttaccggcgtcatcggctccttccaggtgttcatgaacgcttacatgatgaccggcggcggcccggacaacgccaccacgatgatcggcctgctgatctacaacaacgcctttacctataataagtacggtctggcgtgcgcacaggcggtcatccttaccatcgtcattgcggctatctcgttcctgcagttcaagatggccggcagcgatgtcgaatactgagaaagggggagagataaatggcaagtggtctgtattcccagcatgtcaataacaaaaagatgctgtatctgcgcaacaccatcatcattctgatgctggtcaccctggcagtgtgctgcctgttcccgctgttttacatgatcgtcaactccttcggccctgcggtcgaggctgcctcctccaaccgctcggtgttcccgacgtcctggagtctggattcctacaaggcgttcttctctttcagtgagtacagcgttaaatggctggccaacacctttgtggtgtccgcctgccaggtgctgggcaacgtcgtattcgccagtctggccggttatgcctttgccaagctgaagttcaagggcaaaaacttcctgttcaacctgattctgatcggcatgatgatcccgtaccaggtcacccaggtgcccctgtacatcctgatcgtcaacaagttccatctgtccaactcctacgcggcgctggtgctgccgggcctggtcacgtcgtataacatcttcctgaccaagcagttcttctccagcatcccgacctcgctgctggagagcgccaagttggacggctgcagccagcccaagatctttacccatatcgtgctgcccctgtccaagaccattctggcggtgctgtccatcaacaccttcctttccagctggaacaacttcttctggcccttcctggtcacctccaaagaggcaatgtataccattcaggtcggcctgaagcagttcaagtttgccaacaccaccctgtttggccccatgatggccggtgccaccatctccgctctgcccatgttcatcctgttcttctgcctgcagaagtacttcctcgagggcgttacggtcggtgctgtcaaaggctgataccatgatacgtaatgctgccccggcggaccacgctgccctgttggccctgtggcaggcaaacgcgccccggcaggggtatgcgtcccgcccggacgctgaagtggaccggctgctgttccgccacccgtatttttcctatgaatatacctttgtaagggcagaacaggggagagcggtcgcctttatctgcggctgtgtgggaaacgacatcccccatgggcgcgagcgcggctgcttcacctgccttgcggcagaccccgcctgggatacgcccgaaaccacggtgcagttgttggatgcgctggaagaagctttccgtgtcgcaggcaaaaccgccagcgccgtgaccttcttcaaccccatgcacctgccctgggtcattcccggctcgccggggcatgaacacaacaacatgcccggcattgccaccgacttgcccctgcatgaaagaatgctggcccacggttacaccgaaaccacccaggaaactgcgatgtaccgaactttgacggactatgcgattccgccggaggtccgcgcactggaacaccgcacagccgccgaaggctgcaccctcgccctgtatgaccccaaccgccaccacgggctggacgccatgctgcaagcgctggataacccggactggacggtccgggtcacagccgccgcccgcgacggtctctgcctgccggtggctttggcagggaacacggtggccggtttcgcaggcccggtttacccggagcctaccggccggggcttctttgctggcatcggcatcgcgccgcagtaccagcaccgccacctgggcaagctgcttttctttcgcctgtgtgcggaggaaaagcgcgccggggcagtctatatgtcgctgttcaccggcgtggccaacccggcacgtcgcatctatgaaagcgctggttttacctcggtgcgcacctttggcgtactgctaaaaacgctatgatgtacacaaacaaacagcttttacagctgacgcttccgctttttgcggagcaattcctcatcgtctttgtcggtgtggccgatacctttatggtgtcctacgcgggcgaggccgccgtctccggcgtggcgctggtggataccatcagcttcctgatcactgccgtgctgggtgctttgtgcaccggcggcgcggtggtggccagccagtaccttggcagcggcgaccggcaaaaggtcgcgctgacaggccgcttattgctgggtggtgccctgctcatcggacttgttatcttagcaggtgttgagttgctgggtgccccggccctgcggctgatcttcggcaatgtggaggcggacgtcatgcaaagcgcccgcgactacttccgcatcgtggggttcagctacccgtttttggcggtgtacagcgctattaccgcgctctaccgcagccagggcaacagcatgatctcgatggtctccagcctggtcgtcaacctcatcaatgtggcgggtaacttctggttcatccgcattatggggctgggtgcaggcggtgcagcgttggcaacggcgctctcccgcggggtggtgtgtttgctgctctgcgcgctggtggcccacagcggcatgctgcacgaccccggcaccgtaacgctggcggattgccgcagcctgaccggcaagatgctgcgtatcggtgtgcccacaggcgtcgaaagctcgctgttcagtttgggcaagctgctggtccagcagctctacgcctcgctgggcacagtggcgctggcggccaatgccgccgcaggggcgctctcctgtattgccacgctgccgggcggtgctatcagtctggccatgctgcccgtcatcgggcaggccatcggcgcgggcaagcctgacgaagcccgccgcttgggccgcaagctgctggccattgcctacgtgctgatgctgggcaccaaccttctcgtttacatcttcctgccgcagctttcgggcctgtatggcctgaccgccgagaccaccaccgtggtccacgacctgctgctgtggcactgcatttttgcctcgctgttctacccggccgggttctgcatccctgcggcgctgcgcgctgccggagatgtgcgctaccccatggtcatcagcgtggcgtcgatgctggtctttcgcgtcgggttaagcttcgtctttgtgcggggcttcggcctgggtgtggtcagcatctggatggcaattttcgtggattggggctttagggccgtgctgttcggcctgcgcttccactccaatatctggcaaaagaaaaaactactatagggcaacatcacacaattcccgcccttcgggcttaagcaccgctccggcggctgcggcacgccatctgcgttgcaaaaatgctcgagaatacacaaagtattctctgcgctttttgcttagcagctggcgcacctcgctcgccgtatcggcacttagaattgtgttctgccgcccgaaaatactactgcaaaagaaatcaagggggaccgttatggttgaactcaaacgaatcccgaccgagcaacgcaacgaagctacggcccatatcgaccgcatgtccacgttggagatggtacggctgatcaatcaggaggatcacaaggtggccgacgctgtcggccgcgaggcacagcacatcgcccgggccgtggacatcatcaccggccatatgaagcagggcggacggctcatctacgtgggcgccggcacctccggccggttgggtatcctcgatgctgtcgagtgcccgcccacctactccaccgagccggagctggtgcagggcctcatcgcaggcggcactccggccatcttccgtgccgtcgaaggggccgaggatgaccccgatctgggacgcaaggatctggaagagatccactacaccaaacaggatgtgctggtgggcatcgccgccagcggccgcacgccctatgtcatcggcgctatggagtacgccaagtccctgggcggtgtgaccatcggtgtgacctgctgccccggcagcgagatcgacactctggccgaggtgggcatcgcaccgatgcccggccccgaggtcgtgaccggctccacccgcatgaaaagcggcacagcccagaaaatggtgctgaacatgctctccacctgcacgatgatccgcctgggcaaggtgtacggcaatctgatggtagacgtcaagccctccaacgagaagctgatccgccgctgcgtgtccatcgtctgcgcggctgccgagtgcgacgaagccgccgctaccgctgcgctggagcagtgcggctatcatcccaagatcgctatcgtcatgctgctgtgcggctgcaccgccgaggaagccgaaaaacgcctgacggaaaaagacggctatattgcccgggtggtgggctgatgcccgccctgcgctgcggcgcggacaggctgggagagtataaacatctgtttaaagatgcccgcgtgggtctggtcactacgcccacgggccgcacaagcgacggccgctccaccattgccgccttgcagcaggccgctgacctgcgtgtcctgcttggccccgaacatggtgtgcggggcgacggcgcggcaggggcgttcatcccccagtataccgacgccgccacaggcctgccggtgttcagcctctatggcaaagactccaagcggctgacccccgccatgctggaaacttttgatgtgttggtgtatgatatacaggatgtaggcagccggtactacaccttcctctccacgctggcctacctcatcgaggattgcgccggggcgggcaagcggctggtggtgctggaccgccccgacccgctgggcggagagatcatcgagggtacaactttgcgccccggtatggagagctttgtgggctgctatccgctccccactcgctacgccctgaccatcggcgagtttgcccaaatggtcaacgccgagcagcactttggctgcgaccttaccgtcgtaccctgcaccggctggcagcgcggccaaagcgccccggcctggggcacgccgtggatcatgcccagccccaacatccccaactacgaaacggctctgctctacgtaggcacctgcctgtttgagggcaccaatgtctccgagggccgcggcaccgccgctcccttcgccgtcatcggtgcgccctatatccatgatgccgaggcgctggcggcggcttttaacgcccgcgacctgccaggtatctgcgctacaccgtactattttaccccgacgttctccaaacatcagggccaattgtgcggcggtgtgcacctgcacgtgctggatgccgatgccgtgcgcccgctttcggcaggcctgaccctgctggaactcatccgggatacctgccccaatgacttcgccctgctgcccccgcataccgagggcggccgcccctttatcagcctgctggcaggccatcgggaactggaacgcccggactggacggcggcggagcttatcaaagcccaggccccggacgaagccgcctttgccgcccgcaaagcggcctaccacctgtattgacgaggtgcttttatgcgtacattgcaagaaatgaccctgcaggaaaaactgggccagcgattggccgcgggctttcaggggttagagccgccgaaagaatttttgcggcttatcaaagaatataaggtcggcaacatcatccttttccgccgcaatatccaggatggcccccagctgaaaaagctctgcgccaccctgcgcaaagtggtggaggaagaaaccggcgtgacgcccttcatcaccatcgaccaggagggcggcgttgtcacccgcctgccggaaagtgaggtcaacatccccggcgccatggcggtagccgccaccggcaacccccgcaacgcctacgatatgggcctgctgaccgcccaggaactgcgcagctgcggcgtggatttcaatctggccccggtcatggacatcaactgcaacccggacaacccggtcatcggcgtgcgcagctacggcgatacgccggagcgtgtggccgaatacggcagccagatggtgcgcggcctgctggacggcggcgtctactgctcgctcaagcatttccccggccatggcgatacggcggtggattcccaccttggcctgccctgcatcgaccgcagctttgacgagctgatgcagcgggaactgaaaccgtttattgcgggcatcgaagccggtgcacccgccgtgatgaccacccacatcctctttccgcagatcgagccggagcacatccccgccaccatgtcccgccgcatcatgacgggcctcctgcgggaaaagctgggctttggaggcatcatcatttccgactgcatggagatggacgccatcaaaaagttctacggcacggtcaacggcgtgctggctgccatgaaagccggtgtcgacctggtgttcgtctcccagacacccgccctggccgccgaagcaatgcaaaatgcccgccgtgcagccgaaaacggcgagctggacctggccgaactggacgtcagcgtgcagcgcatgctggaggccaaggcccagtgcgctgccatgcagcccaaaacgctgggcgatgaagccgcttgccgcgcccgcgccgaggaagtgcgcgccgcgtccatcaccgccgtacacctgccccagggcggcatgcctgccctgggcgacaaccccttgttcctgggctgcgccgactaccgcagcaccattgcctccaacggcgaatccagcggcttcacttttcccgaagaaatgcgccgccacgcggacaaaggcaccgcgctggttaccgacaaagaccccggcgacgctgaaattgccgaggtcgtatcccaggctgcggctcacagctgcatcgtgctgggcacctacaacggtcacatcctgcaaggccagctgcgcctggctaaggccctggccgccaccggcctgccgatgatcttagttgcgctgcgcaacccctacgatttgcgtaacatgcccgaccatgtggccgcgctggccgggtgggagtacacccgcccgctgtttgacgccctgtggccggtgctgaacggcaccgtccggcccacgggcaaactgccgctgcttaccctgacaaaggcggcaaaataatggcacacctgcaaattgagcagcggctcgaaacactgggcgggcaaagcatcttccacgtcgtcctgcccgaggccggcgacctgcacgaagccccggtcatctacctgctccacggggcaggggacaacggtaccggctggctgcgctatactgccgccgagcgctacgccaccgagaagggcttggtcctcatcatccccggcgtaggcaacagctggtacacggatatggccagcggtgtacaggcgtttacctgcgtcacgcaggaattgcccgccgtctgccgccgtatgtttggcctgacgcagcagcgcgaaaaaacgcatgtcatcggcctttctatgggcggttatgcggcgctgaaactggcattgaccaatccgtatagttatacgacttgtactgcgctttctgctgcggtccgcccggagcaggtagtcaaaagccccgattggcccttgccgcctgccgccgcccgtgcggtgtttggcaccggcattgaccacggcgaactgccgccccaggccgacctgtggcagctggccgccagtgccgaccctgccgccctgcctgccatccgcatggtctgcggcgaacaggacgccctgctgcccgccaaccgggaattccacgcgctgctgcaaagcaaaggtatcgcccacacgtttgaaacagcccccggtgcccacacctggccgttctgggatgcccagctcaaacgcgtccttgaccagatcttcccataacaaaaggctccccgcaaggggagcctgaataggttgcgcactttttttgcccctctctgggagggagccttttagagttaccg

SEQ ID NO: 7863 - DNA, 3227 bp, Unknown
  gut microbiota DNA sequence
aatctggtagctgctctccagtgtgccctgtatcgccgcgtaatcctggctggccagcacggtaaacagcgcatccaccaccatcagctgcgccaaccggctgctcatcgcgccgctgcgcacatacacttctttcgacgatgtgtacagcagcagcttgcaccccgcactcagcggggacttgctgtaatgggtaatgccaatggtatggcacccgctggcctgcacggcctccaatgcctgcaagatctcctgcgtcttgccggtgttggaaataaacaccgctgtatcgtcctttgtaagcgtggcactgtagcttagctgcacatggctgttaaagttgaaaatggcgtttttgccaatgcgcagcagcttgtcgcacaggtccgaggccaccagcccagaggcccccatgccaaacagcttgatggatttggattgcagcagccaatctgaggccgtctggtaggcggcggggtccatcagtttggaggtccgctgcagcgcctgcaaactggccgccgtcacgttctgcaaaatttcctgggcgcttttgccctctcgcaggtcagaaaaatgtacggtcgggtccacttccacctggggctcagcgctgtattgcaggtagagctgctggcgcatgtccttcaacccggtgtagccgatctccttgcacagccgcacccaggccgccgagcttacgccggattgccgcgccaactcggcaatggggatgctgtacagctcccgcgtgtgggccagcagataatcggccgctttctggcaggtggggctcagtgcgctgtagctgctgcgcacccgtacttctacattagtcatgcaggttctctccttcttatgcctttacaggctcagcttgcccatcacaacagggtgggccgcgccggtggcgctgggggcgttgttgcagcggccgtgcagcatctcgttggccaaaatcgcaaaggcaacggcctccttggcgtcgctgtccaggcccagggcctcgttggtcaccacttcgcagccgggcaggcccgcctgcagcagttccatcaatacagggttgtggcttccgccgccgcccacgatcaaccgctccggcttctgcgggcagtggtgctccaccgccaggcagatgctctcggcggtaaaggccgtggccgtggcgatcttatcgtacccggtcagccccagctcctcgcccttgcgccacagcgcatccacaaaggcggcgctgtaatgctcacggccggtagtcttgggcggggccagccgcaggtaatcgtcgctgtccactaaataccgcagcagttcggcacttacctgcccctgccgtgccagcttgccgccgtcgtcgtagcgcagcgcgccgttcgttacccgcgcggccagtgcatcgatgaccatgttgcccgggccggtgtcaaaagccagcgtgtccgccagcgcaccgcccgcaggcagcacggtaatgttgccaatgccgccaatgttttgcagcgccacggtgcggtgctcctcgcggtataaaaggtactcggtgtaggggacaaggggcgcacccagcccgccggcggccatgtcccgcacgcggaagtcactcaccaccgggcagcccagccgctcggcgatcaggcttggctcgccaatttgcagcgtggcccgcaccttgcggcccaggtagtctgcgcccgcaggctcgtgccagatggtctgcccatggctgcccacaaagtccacgtcgccgggctggatacccgccgcgcggcaggcttccaggcaggcatcggcggacaggccacccaggtaaaagttcagcaggcagatctcccggctgtccagcggcgcaccgcccgccacctgcaaaattttctgccgcgcctcatcggtgaacggcagcgtgatgaaccccagctgccgcaccctggtatcggtgccgcagccccgcagctccaccacggcggcgtcaatgccgtcggcgctggtgccgctcatcagcccaatggcgatgcaggcatccttttgtaaaaaagaaagttccatcgtaggacctcctgaaataataaaacatctgtttaaaataaagtttcaacctaactctattatgttcgttttagggcactttgtcaagagaaaatttgcgtataaacgtaataactgaacaataaaggagcaaatgtatgcaaacacagtattacgccgggtgggacggcggcggcaccaagaccctttgccgcgttttgtatcaggatggcaccgcgccgcagccctttaccgccggtgcgctcaaccccaatggcaccgtggcgggtcagtgcgaggccaccgtggccgacctgctgcgcaatatggccgcgctgccgggcgggctggacgcctgccgcatgctgtgcatcggcgcggcgggcatcagcaacccggccacccgggtccacctgcaaaatgccctgcaggcaggcggctaccacggcccggtcaccttcaccggcgaccagcagaccgccctgtacggggccctcggcgggccgggcggcatcgtgctcatcgcgggcaccggctccatctgctacggccaaagcaccgatggccgcgaagcccgcagcggcggctggggcagcctgatggacgacgaaggcggcggcttcgccttgggccgggacgccctggcggcggtcgttcgtgccgaggatggccgcattgcccccaccgtgctgcacgatgcagtgttcgaggcgctgcaggtcggcgccgtccgggagctgatcggcaagatctacgcgccgggtttcggcaagcgggaggtggccgcactggccccgctggtgggggccgccgccgaacagggcgacgccgccgccctgcaaattgtggaaaaggcaggccgcgagctggccctgctggtgcgcccggtggccgaaaagctggggctgcaatcggcgcgtatcgcttttgcgggcagcgtgctgcaaaagtgcgccccggtgcgcagcgccgcccaagcgcagctgcaaaccctgctgccgcagctcaccctggccgagccgcagggcgacgccgctgccggtgccgttctgctggcacgttgcaaggcagaagaataaaagtgcatagacccggctgagaggagtgcattaggcactcctctatttttttgtccaagttttgcgctatgtttggctatgtaacaggccggacttgcgcaatttgtttgcgcaaatggattg

SEQ ID NO: 7864 - DNA, 159 bp, Unknown
  gut microbiota DNA sequence
ggcaacaccgcacaattcccgctttacagcttaagcaccgctgctgcggctgcgaagcacaatctgcgtcgcaaaaatgctcgataatacatccagtattatctgcgctttttgcttagcagcttgtacttctcgctcgccgcatcggcacttagaatt

SEQ ID NO: 7865 - DNA, 4783 bp, Unknown
  gut microbiota DNA sequence
ttcaccgtatacaaaaagcccccaagcgggtcaggcttgaggacttaggactatttgcagggcgtttttacaccactatttgtaaggctccctactataaaatagaaaaagttggtgtagtagtggtgtaatggtgtcagaaattcgcatttttacgccattttatagcgattatacgttaaatttcaatccacaggcttcatcgtggggaagaggaggacgtcgcggatggaggcgctgtcggtgaggagcatgaccaggcggtcgacaccgaagccgaggccgcccgtggggggcaggccgtactccagggcggtgacgtagtcgtagtcgacctgggccttgcagttgggctcgatggccttgcgctcggcgacctggcgctcaaagcgggccttctgatcgatggggtcgttcagctcgctgaaggcattgccgtactcggtgcagtcgatgaaatactcgaagcgctcggtgaaagccggatcatcgggcttgcgcttggccagcgggctgatctcgacggggtaatcatagatgaaggtgggctggatgagcttatcctcgacaaaagcgtcgaagaactcggccaggatggcacccttggtggggacctcgggcagctctacgtggtgctccttggcagcagcgatggcatcctcgtcggtcttccaatcgttgaagtcaacgccggaatacttcttgacggcctcgatcatggtcagacgctcccagtggcccatgtcgatttgcttgccctggtaggtgatttccaggctgccacagaccttcagggccaggcgcttgtacatctcctcgaccagatccatcatgccgtggaaatcggtgaaagcctggtacagctcgatggtggtgaactcagggttatgcttggggtccatgccctcgttgcggaagatacggccgacctcgtacacgcggtccataccgccgacgatcaggcgcttcagatacagctcggtctcgatgcgcagcaccatgtccatatccagcgtgttgtggtgggtatagaacgggcgggcggaggcgccgatctcaaagggggtcaggatgggggtgtcgacctccaggaagcccttctcgtccaggtaagcgcggatctccttcaagatctggctgcgcttgacgaaggtgtctttgacctcggggttgacgatgaggtcaacatagcgctgacgatagcgggcctcgcggtcggtcagaccgtggaacttctcgggcaggggcagcaggctcttggagagcagcgtcagctcggagatgcggacggagatctcgcccattttggtgcggaacacttcgcccttgacaccgatgatgtcgccgatgtccagctttttgaaggcggcgtaaggctcatcgcccagcaggtcacgcttgacgaagatctggatatcgcccttctggtcgcgcaggtgggcaaagctggccttgcccatgatgcgtttggacatcatacggccagccagcgagacgatcttgccggtctcggcttcggcgggcaggtcggcaaactcggctttcaaatcagcggagtaagaatcctgcggatatttggtgataacaaaggggtcgctgccggcggcgcgcaggtcggccagcttctggcggcgaacggctgcctgctggctgatgtcctgttcggtctggggcttattctgctccatgtgagatcgtcctttcgtgtttttaaatcatgaatatgcggcggtttccgcttacttggagcgggtgacggtcagcagcttgtaggtgacgatgctgccgttgggcagggtgacgtcgacttcgtcgccgggcttatggccgatcagggcggcgccgacggggctctcgtcgctgatgcggttcaggttcatgtcagcctcggtggaaccggtgatgtcgtaggattccggctcctcgccctcctcctggatggtgacgttcataccgatggaaacggtatcgccggacagctcgctgtcgtcgatgacgcgggcaactttcagggtagcctccaggtcagcgatgcgggcctcgacaacggcctgctcttccttagcggcgtcgtactcggcgttctcgctcaagtcgccgtagccacgtgcaaccttgatcttatcagcaacctctttacgtttaacggtgcgcagttcgtccaggtcatgaaccagtttatcatagccctcacgggtaacaacgacttctttcgccatggtagtttctcctaacgtgtaaatagtaaaagttgtgcggcccaatacgagccgcactaactgtaatattataaacggttcagcgccgttttgtcaagtgcattttgccggatacgaggcagttttagcttatttatccagctgcagcaggcccaccttgcggtagactttgttgacggtgcggtttgccaggcgtgaggcacgctcggcaccggacttgagcacctcatcaacatacgctttatcggcaagaatcttgccgtactcggcctggacgggggccagcgcatcggcggtgacctcggcgacagccatcttgaagtcgccgtagcccttgccctcaaactcggcggtgatctcgtccatgctcttgccggtgaaggtgccgtagatggtcatgaggttggaaacgccgggcttattttcgcggtcgaagcggacgcagccgtcggaatcggtgacggcgcgcttgcatttgcgcacgatggcatccttgtcgtcagtcatcaggatgaaggcgttgacgttggtatcggacttgctcatcttcttggccggctcggccagggacatgatcttggcgccggaggccgggacgtagccctcgggcaggatgaaggtatcgccgtagatgccgttgaagcggccggcaatgtcgcgggcgatctccagatgctgggtctggtcctggcccacggggacgaggtcggcgttatagatcagaatgtcggctgccatcaggacggggtaggtgaacaggccgccgttgacgttatcggggtgtttggcgctcttatccttgaactgggtcatgcgggacagctcaccgaactgggtgttgcaggccagcacccaggacagctgggtatgggcaggcacgtggctctggacgaagaggacatgctccttgggatcaatgccgacggccagcagcagggcggccagctcgcgggtgcggcggcgcagctcagcggggttctggcggacggtcagcgagtggaggtcagcgaccatatacaggcagtcgtagtccgactgcagcagggcccagttgcgcaccgcgccgatatagttgcccagggtgggcgtgccggtgggctggatgcccgaaaggatgcgtttacgtttttcttctgccatcgttacatatctcctatcaaaacaaagcaccgcccgcgcacgaagattcgcgctggggcggtgtccgttgtgtgtttcgtgtgatactagtattcaaccacaaacggggcggtttgtcaataaatttgggcggatgcagtggttttttaggctcggtttaggtgggcggggtattgtatggatgttcccttgttttaacggcagtatcccattataaaaggccctgccgcagggtaggcagggccggggtggcgcactatttactaaaacaaaatcaacgcttaatatcgtaattcatattcatcaaattacggatgctctctacatcatcggtgatgttggcatcgccgtggatggtgtgcttgatggcgctggaagcgaccgcgaagttcaccatgtccatgggtttgtagtcgtgcatcatagcgtagatcaggccgctggcaaaggcatcgccgccgccgacgcggtccaggatgttgaaggtgtagagcttggactcgaaggtgtgaccctcataccacatgaaggctttcaggctgttctcgctgccggaatgtacgtaccgcacgtggcgggcaatgcacttcatgttggggtaacggtcgatgaaatgctggaaaatctcgtcctgctgctcgtagctgggctgcaggggcacgccgtccttccagtcgcccttggcgtggttttcctcgtctttccacaggtgatacggctcgatgccgaacagcacgtccacgtagggcaggcactgggtgcagtagtcgcgggcttcctcccaggtccacaggctggagcggaagttgccatcgaagctgacggtcaggcccatctccttggcctcgcgcaggcagcgcaggatgaaatcggcgcagttcttgttcagcgccggggtgatgccggacaggtgcagccagtcaaagccctcaaacagctcctgcagattgaccttggtcaggtcgtactcggtcagggcgctgtgcatgcggtcatagatgaccttgctggggcggatgccgtagccggtctcgaggtaataggtgcccaggcggcagctgggggtctcctccttggtggagaggatcatcggcgtacagtgcacgtcgttgcagcgcagccagcggatggcgcttttacccagggagttgttgggcaccacgctgaagaaggtggagtccacgcccaggttggccagggccagggcaatgttggcctcgctgccgccgtagctggcctcgaagctggatgccatacggatcttttcataattcggcggggtcaggcgcagcatgacttcgccaatggtgataaatttctgcggactattattgccaagcaggatcgggttggcatgttccatgggttgcctcctgtttttatcggggatttaaggcaatgccgcataattctaagtgccgata

SEQ ID NO: 7866 - DNA, 5473 bp, Unknown
  gut microbiota DNA sequence
ctgccttaagctaaattccccattttctgtcattttatattgtaaggcattaccaaaagaaaatcaacagaatacgccctgtttaaaaaatatcaactatttctttaaaaggcttccaccttatatacggtcgcgccgctggcacgggcggcttcaaggccggggccggaatcctcgaagatcatcgtttccgccggggtaacgccgaaatgcgccatggctttcaggtagccctcggggtcgggcttgctgcggacaacatcctcgccggtgataaagacgccgaaccaatctgcgcagtggaaatactccagcacctcggtggcgtttttgcggctgccggtggtcacacaggccaggtcgtggccagcggctttcatcgcctgcaaaatcgccagtaagctggtgttggggcgcaccatgggcaggcagctgctgtacagctcctttttgcggtcgtgcacccgctccacggcttcgggggcggggtcgccgcccatcagcgggcgtaaaaactgcttataatagccgccgttgcagtattgggcgtagtattcatcggtgacggtaaagccctgctcctccagcgcagcgcggtaggacgcggcgttggcggggatggtgtccagcagcgtgccgtccaggtcgacgcagatcagcatacgttctctccttttgcaaagttggcaacatcgttggccaccatgaccagcccggcgtagaacatcggcgcgcgcttgcggtctttggccagtttgtagggcatcagccgcagccagtggatgacctcgtgcatgaggatgctttccacctgggcggcggggtaacggctctgcaggtcggccattaacgcacgatacagcgcatcataggcggccgagcgggtcagcgcgaagtcgatgcggctgccctgcacggtgacccgcggggtcttcatcatgaactcgtagctgccgtgcaggctttgcagcagcttgccgtaatccaggaagggactttcgtgcagattgccggtgttggggtcgatgagataccagccgccgttcgcgcccgggttcaggcggcagatgatgttttcaatggtcaggtcgccgtggatggtgcccacggggtcagcagcgaacaaagttttcaaccgttcgcggtcgaaaagccaggccagctggtgcaggtttttgtactcgacgccgttgacccagatggtgtcggcagccatcagctcccgcagggagcgggcatcccgcagtttttgcaggttggcgtccacctttttatcgatgtactgctcgattttttccatatccgccggacgggcggtgggacggtagagcttttcttccagcgtgtccagcacctcccgcaggatggcggtgcttttctccacagggttggagtgcaggtagcggaacaggccgacagcctgcgggtcgtagaccatgtcgtaccagcagcagccgtcctcggtgctgctttgcaggatgtcgcacaggggcaggcggtcttgctgggcgcgcagccaggccagctgttcggccagcttgtcgccgtccgcaccaaaggcatatttacggtagaacgtcttttctgcgtccatgcagagcatggtggtggcgttggaaccggcggaatagtcctgcaaaatggtgatgccctggttcatttttaggaagcccttgacccactctttgttttgcaggccgaaatactggcttaaaaacgccgcacggtcctgcgggtcggcctggggcagcaggttgaggtagctctcccctgccggggcggcctgggtggcctgattgacagcaccgcgcactttttccggcagcagcgtgaccagccacatggccagcagcggcagtgcaaaccagcacagcagcaggatgcgggcggcgggggcagccgcgcccattgccccgccgggcagcaaagcgctgaggtcggcggcgttgcggccaaaaagcaggtcgaacacatccaccagcgccatgggctgaccggccgcggtgagggccgctgccagcgccgtgtaggagccgaggtaggccgcccacatgagcaccgtattaacgacaagacgtccaatcttgatgcggcccaggtccttgaaggtgttgatgaggctccaaaagaacatcatgccgtccaatttcagcgtatcattgaacagcccgcagaaggcaaggcagccttttttgagcaggtcccgcagggccaccaccagcacaaggcccagcgccagcaccagcgagaacaccaggtaatactgcgccgcgcccagcacggccgcaccgccctgccccagcgcccaaaacgcgccgaagcccagcgccacgaaccagacgtcaagaaagcggtccataatgacggtcgccagcgcgaagccgatgccgcttttcatgcggcggccggtgaacaccgcgcggaacacatcgcccaggtggaagggcagcacaaagttgagggcatagccgccagccatgccccgcagcatctggccccgcagcgggcgctcgtaaattcggatgaactgctcccaccgcagcaggcggaacgcatgccccaccagcacaagaaatagcgataatacgatgtaaaaagtcatttacaacagttcctcaaaagcggatttgttttccggggcctcggcggcgcggtactcggccggggtgccgaagggcaggtgcaggtcggtggcgaagcctgccactttcgcgccgcggtcagccagcacgttgtagatgccggagacgaaaaactccttgtattcgcagtttttcaggtaggcggcgcaggcgtcggcgtaggtctgcttgtccttgaagtagtatgcgccgcagatggcgtcgtggctgaccacctgcttttccaccgtatggcagacattgccgtccgggccgtactgcaggtagctgtaggcgggcgagtcgcttgtgaaagtgagcagcgcaccgtccgggccgtgggcaaaatcgcccttgttgcagaagtcgttgaagctgcggcagaggaaaaggtggtcgcagtcgttgaagagcagcggctcaccatcgggcagaccctcggccccgcgcagggcggtgatggctgcgccctcggtaacggcaggcagcgcaataatacgggcgtcgggccagtatgccttgattttggcgtcgatggcgaagtcgcggatgtgctcttccagcaccacaaaggtgaggtcggcgcagtcgacgtacttctcgatgctgcgggcggcccaatagaagaagggcttaccggcaatttcgatcagcggcttggggcagacgaagccgttctcgaagaaccggctgccccggcctgccatggggaggatgaggtggagtttaggcatagtttggactccttttgttttgcggatttttgccaaattgcacggagcggcgcggaacggcagccgccattcgctattaaagtgcggccagcattttacattcggcttccaccacgcgggaaaggcctgtttcaatatccacccggggcacccagccgtaagcctcccgggcgtgggcgttgtcacacaggctgaacttgttgacctcgtggtccaggatctccggtttgatgccgtaggcgccgccgtacagttcggggtacttggcccagtaatggctgctggggcagtacttggcctcgatgtttttgcccatgatcttgttggcgatggcgtacagttcccgcaccgagtagctctggttgctggaaacgttcaccgcatcaaagccgggctgcgggcgctcgaccacgcgcagggccaaggcgatgaggtcgtccacataaatgtagtcgcggcgctggttgccgtcggagtggaactccggcgtgcggtcatagtacagctcgcggatcatatagcccacaaacggcggctgcttgcgcaggcagtcgatgtgagggccgtagacgttggcaaagcgcaggcaggtcacggtcatgccataagtgtcggcaaagctttgggcaaagcgctcggcgcagtatttggtgttggggtagatcagggtgggcgggttgaacttgctttccacggtcgggaactcggtctcgttctcgtacatggcgttggtggaggcctgcaccacctgttttacgccggtgcggcgggcacattccagcacgtgtaccaggcccatggtgttgacctcaacggcctgcacggggtcgctctggcagtccggcaggggcgcgatgcccgcaatgttatacacaacatcgaacttttcttcttcaaacagcttgggcagggcttcgcggtcgcggatgtccatgcggcggacttcggagccgaaatcgtggtcgtcaaactttaagttgtcgaggttgccgtaggaaaagttgtcgataccgacgacctcgcccccgcgctgccacagggtgtgccacagctggccgccgatgaatccggcggcgcccgttaccagaactttcataagagagcctccttataaattggacgcaataacgctgcttgtataattttcaatgggcttttcgcgccattcgcgggtgacaaatttctgcttgccggccaggtaccgcccgcagagtttgagcaggctgatgccgaagctggtgagcttgttgttgctgacctggtcctcctcccgccaggagatggggaaaaacagcacacgctgtttgagctgacagagggcgaggatcatgcaatcgttaaagtatagtgtatcggggaattttttgtagtactcagttttcagcggctcgaccgcgtagaggttcagcccgctgcccaggtcggtgatgcgcttgcccgccaccaggctgaacagggcgttgaagccgtagttgcccactacgcgcaaggcactgtaccccttgatgcggctgcccttcatgaagcgggagccaaggcagcaatcatagtttttgtacgttccatcgtttaagataggcagcaggtcagcgacagcgccctggtcgtcgccatgcagcaccaccaggtgctggtagccgtgggcggctgcgtaaccgaaggccaccttgtggctgccgccgaggccgtagttttcatcgttgcgcaaaaggcgcacgggggccgccgggtggcgggccatccaatcctgcacggcggcctcggtgccatcggtggagcggttgttgacgacgatgcactcccccacccagggcaaaacgtgcgggtccagcagctgcgacagcacgcgcgggacctgtttttcacagttgtaagcggggatgaaaataagtagtttttccatgtgtttgctcctgtttgtgtggggtttggcggaccgatgcgagcatcggcccctatagggagggcatcagccgaccagaaggacctgcaagctggcgctgccatgcgccaccgtgtaccggtccacaatgttaaaatcagcttcgatccaggaatgaaactccgccatatcgcggacctcggcgtcatcgtacaggatcacgcggggcgtcttgc

SEQ ID NO: 7867 - DNA, 6545 bp, Unknown
  gut microbiota DNA sequence
tcgccaaacgcagcggttgtcttggcattggcagggacagtagctttggcaatgggatccgtggtgtcttcaaccttttcggtcgtttccaaataaacgtcttccgctaccttgccgttctcatcgactttagcagtcgtatcagctcttgttccacgcaccagttgaagaacaccttcatgttccgcatatagttgttgatggtcgtgggcgatattttctttgcgtaatctgagcgattctctgggttattggagtttgcaggtgcatctatcgcacaggtcgtgtacttgccgcgcttttgcagatagtcaatatagctttctatatgtacacgtttaacttcttccgtccgctcaatttcacgcacacttaggaactgcccaaacagccgcagcgtctgctcatagctgcccatcgtttttgcggccaggcctttgcgctcacaagcggccataaaagcctcaacatcgtattgaaccataaaaaataaaacctcctgtatcatcgcggtccaggacccaatgaatacaggaagtttatcggtgtaaacacaaattatttataggcttatttcataatttcacagtttttatagcgatgaattcgcgagtttatcggtttgcagcgtccgccacaaaatgccggttttgcggatagtggcggggtttatgcggccttatgctctccgctttttgtccaggcggatcttgtcggcgatcatcgcgatgaactcactattcgtgggtttgccgcggaggttgtggatggtgtagccgaagtagctgttcagagtgtccacatcgccgcggtcccaggcgacctcgatggcatggcggatagcacgttcgacgcggctggccgtggtaccgttgcgcttggcgatttcagggtagagacgcttggtcacggcgttgatgtactcgtggtcggcggtggtaagcaggatggcatcccgcaggaactggtagcccttgatgtgggccggcacgccgatctggtgcaggatctcggtgacggtaagctcatcggaatccagcgagaccggctgcgggcggctagcaccgccggcggcacgcagtacccggctgaccagcacgttttcatcgaacggcttcacgaaaaagaacgagaagccgttatctaagaggtcctgctcgacttcttcgctctggaacgcgccggtgacaaagaaggtggtatgtacgccgctgctgttcttttcctcgtagcgctgcttgacggtgatggcgtccaggtccggcatgaaggcgtccagcaggcaggcctgggggtggacggccagcagggtctccagggcggcggtgccgtttttgtcgcacaccatcacggtcacgcctttggcttccagcgcttcgcggcagacttccgtcacgatgtcgctggtattggtcataacaaacttgatcttatccatcgtcaactttcctccatacaatgaacaggtgccgcacgctgtggtgtttgcccgtcgttctctttactgtggaaattttaccatatttttccattcatcgcaagaggtttttccatttttttcagcgattcccgctattttcgttcgacacaattcgtcattttccttagatttgccgtcattttctaaaaatacagacatttttcggccctgttatttgcttccagtaattttccagtttttccaattttccatgttaggcggttttcttgctggaaattttatggtcccggcattcctcccgctttccgctgtgcagatgcgtatttctacctttatatgataggggcgtgttgttatcggcagcacattttgcaggaatggttgttatccacggcataatttgcggtgggcgcagcccagactgcggtgcagaaaagtacccgagaaaaaattatagggcagttttgtgggggtagttggcgggttactatcttataaaaaaattttctgcctgtaatttgcctgtgattcccgcaaaaaaaaatataaattgtgccgccgataacaactggcctggcttttgcttactattgttattcacggcacagtttaccggtgagggcatggccgattgagagattttgaggttgttatcggcggcacaatttatggtttcttatgatttcgcttgcgggtcactttcaaattcaaacggctggtgggcggcccaggcgggtattgttattcgcggcacaattcggcggggcggggtttaggcatatacccaggctgggttgttattcagcgcacattttcctttttgaggggtgggtctggcccgggctttggggctgtgtggtctgttggaatcgtccgcacattttcctgcagtcagcagctcccaaggcgaaaggcagctgttgttattggcggcacaattcccagggcagccttttccgcacagggttgttattgacaacacaattgggtgtacaacaggctgcggcggccccgttggctggggttgttgttcgctgcacattttaaagcggggcgtgcccgcaggctgttttccgggattttgcacgcaggattgttattcagcgcacattttctcattgccgatgtgcccgtatttatcgcaataccgctgattttttgttttctatcagcagttgttattgtttgcatatttttacggtttaccgccgctttcctcgcgtatccaccacagcagacaaagaaaatgctgggttgttatccacagcacaattctatgtacagcgtttttcattcggtttccaaattgcgtatccgccaacagcccaggcaaatacaacttggccggcaaaatcctctccgcgtccccctcaaaaaaattctcatcctccccgttgttatccagcgcacatttccaaaatcttaaaaatcctttccacttttctccgcccactatcgcacagcaaaaatattttttttcggcaatttatgctgtgaataacaaccgtggtcccctgttgttatccgcggcacaattccaaattgcctgtctgccctacgcaaaatcttttgccgccccgagtgattgttattcagcgcacattttgccgcatagcccccattttgtgcccaagtagggttgttatcccccgcatattgttgttccgggcacagatctgtagttattctcggcacaatgcacttgttattccgcgcacatttcggttgttatcggcagcacagctttaccttatatctaaataaaaaaactaaaagcataaagagataagaccgacggatataggatttttacggaaaaatcaaaatgtgctgactattacaataattgacgaatgaagcacaatctgctattattagcattaccgtcgtaggctgtgcgccaaaacacccattttggcacagccaagcatagctgcgggaaaaaacagaggtaacactatggcacccaaaaaacagtcaaacgccccacggaccaatgacgaggctctgaccccggtcgctacctacagcgcccggggcaaccagaccattgtgcgcaaatccaacgacttgatccagaatgccatgtacagcctgacgctgagccaacaaaagctgatgctgcacattttcgctatgatcaagccgtcggataccgagctgccgcggtacgagatgtcgatttacgaattcctgaaactttgcggcgtggacccgcacaatggctcgatgtacaaacaggtcaagaaaaacatcgaggatatcgccaacgccaaggtgcagtggatccggttggccggtacgcaaaaaatcacgatgttccgatggttgagcagcgccaccatcgatgagggcaccggcaagatcgtgctgacgctggaccaatccttaaaaccccacctgatccagctcaaagagttctacacgacaatgaacatcacctacacattgccgatgaagagccagtacagtatcaagatctacgagctgtgcaagagctaccagaacctctacctcgaaaagaagaaaaaaggcgaaccgctggtgtggagcatcgagacgctgaaaaagcaggtggactgcaacgcgtccaactgggcccatgtgcgccgcaccgtgctggacaaagccaaaagtgagatcaacggcaagaccgacatcctcttcgactatgccgtatacgaaaaagaccgtcagcgcgtcatcgccatctcggtcaccatcgagccggtggataagcaggtggccgatcagaaactaaacgagatcaccaaactgcgcagcaagcgtctgcgcaaaaagacgaccgccctggaagtggctgagacaggcactttggacgatgatccgaacattctgacactggactatgtctcggtgcccgagacgaccatcccctactcctacggagccacacccgacctgatggcccaggagctgggtgtgaaggccgagctggataagctggccctggtgctggcccccgaggagctggacgccgtacatgtcattatcgacgcgatggtgcggatggccggcgcccccagcgacaagatgatcgacggcggcaacgcggtgtttttccagaccgtgaacaatgtcatcgacaactgcaagggcctgcgccgctggtttgagggcgtggccagccgttacgcggccaaggtcattcccacggcccgcaccaagcgtgcccccatgccctacctgtacaagtccatcatgaacgacctagaagattaccgcctatacgtggcgggcatcggggtcgaagaactgcgggatgaggacgccgagccgaccgagaaccaggctccgccggtgcccgacctgctggaggcggatttcgttgaggccgagcccgatgctgctcccgcccagctgacgtctgaggacgccgccaccaaaaaggcgatgattgccgcgctggaaaaattcagcgattacgagaacctgaaagcccgcctttccggcggccagcaggaagcgctggaggacatcgtgcagatgaccgcctatttctgccgccgcaacgtcaaaggcaaggacgacggcatgatcgagggcaaggccaacatgcagtttgtcggttcgctgaaccgggttatcgcccgttacggcgacctttcaccgctgtttgaggcgctggccgtgacgatggactacgacacctactggaaagagctgatgaaaaatccccggatcaagaaccccaaactggtgttccagaccgagatcgagaaagctttgctgatgcccgccgccgtgctgggcgagttccgcgcccgccgcggccaggaccccctgggcgcaccggtgcgggataaagaggtggattggctgaaggcgtttgaggaagtgtaagatcactgattatacgtttctgccatttttaacatcgtatcagcaaaaattccgtatccttttgcgggtgtgcccaccagcacatgggtaacagcgcccaccagttttccgtcttgcaccagcggcgaaccgctcatcccctgcacgataccgccggtggcggaaagcagggccgggtcggtgatgcgcagggtaaggtcgcgattggcatcctgaccgccgctgcccacccgctcaatgcgcacggtgtagtgttgggcggtgcggcccgagagggtcgtccacagctcggcatcgccggtgtgtacctcgcccggcgcggcgatgggcagcatcgtcccgacattttgtgccggggcggtccagcggccatacaggccggtggcatcgttgcccgtcacgatgccgagaatgtccgataaaaattccccgcgcagttccccggctgtgccggatgaggcgctgcgcacaccggtgacagtgaccggcacgatctcgccggagagcagcgtaaaatccgccccggtgtccacatcggagatcgggtgtcccagccccgcaaaggtgcccgccaccgggtccacaaaagtcagtgtaccgatcccggcgctggaatcccgcacccacagcccggctttatacacccccgaggcatccgcccagggggtgagctgggccgtgtactcatgcccgccgcggcggtagaggatcgtgaccgcgctcccctgccctgtctgcagagcggcggataagtcgtcgttgctgtgcacggggcggcccgctgccgagatgatgaggtctcccagccgcaggccggcttctttggcgggattttcccggccagacgcggaataccgatccgcaaaagccaccaccagcgcaccgtcagagaacatttttaccccaaaaggcgtgccgcagaccgccacgctgcgggggcctgcggcagcggctggttcgatctggacagccggatgcgcctggcaaaacagcagcacaattgccaacagcagcgccgccagccccgccgcgccaaagcgctgccgacaaaatttccgagaattcacggtcagtgccccctttcccgcttagtctgtgcggcgcggaggcggattatttatacattcgtcacccatatgggcgagatcaacgacatcggcggcatcagcctgtcactgtttcagggcattgtgatgatcaccctgccgctgctgctggctggccagacagtgctgatgtt

SEQ ID NO: 7868 - DNA, 31461 bp, Unknown
  gut microbiota DNA sequence
cttagagcaaaagaggagcctgctgaaaggtttctctttcctgtttttatgctgcaaaaaatgcggaaaaaatctttcccaaacctgttgacaaaaccctagcggcatggtatagtatcattgttagttaaaactaacctatgaccccctacaatgaatctcctgcaaccatagcccgcacagtgcggctctctccccgtgctgtgcggttttatgggggttgcagttagcaaaaactaactaatgcgttttaaaggagccgagcttatgcctgcccccactcacgtcacggtcagcccccgcagttttgcctgcgatcttgccacgatctgcgcgcctaccctggcaggcctcaagcccgccagtctcttccgttaccagccagcctccggccaggatggtacggctatggcggtggcctggcacgccctgctggcaccccgcggtgtgaccgtccgtgtgctgaaagcctgccccgtaaccggcgcggtgctggtctatgtgtaccgccccacccaggtggctgccatcttgcagcgcggcgacgtgcaggactttctgcaaagcgagggctacacccccggcgatgctgaatcgatgctggcacagctctcccagcggctttgctgtgaggaggactttccccacgagatcggcgtgttcttgggctacccgctggcagatgtcatcggcttcattcagaatcgcggcaaaaactttacggcctgcggctactggaaggtctacaccgaccccgccgccgcccaaaaagcctttgaccgctataaaaagtgcgagcgaatctacgcccgctgttatcacaacggcaccccgatccggcagctgactgtggctgcctgaacgtggacatacttactattaaatatatagtagcaacgaaaggaagaaacgattatgagcaagatcgcagtagtttattggagcggcaccggcaataccgaggctatggctgacttggtggcaaacgctgcacagtccgcaggtgcaactgtggacaagatgaccagcgctgagttcaatgtggctgacgctgctaattatgacggcttcgccctgggctgccccgctatgggcgctgagcagctcgaggagagcgagttcgagccgatgtatcaggatctgcgcggctccctgtccggcaagccggtcggcctgttcggcagctacggctggggcgacggcgagtggatccgcacttgggctgaggatgctcaggctgccggcgcccggctggtggctgaccccgttatggccaacggcgcacccgatggcgatgccactgatgcctgcaacgccctgggcactgccctggccaacgcctgatacgcaaagcagccgaggcaacaccgcacaatttccgcctgacggcttaagcaccgctccagcggctgcggcgcaccgtctgcgttgcaaaaatgctcgagaatgtcgggttgcggtacccgcatcgtgcttcggggacaaaagcccctcgcactctgcgaccgctgcccctgcttcggttcgctgtatccgccaccggcggcgctcacctttgcagcacaaagtattatctgcgctttttgcttagcagccgccgcacctcgctcgccgtatcggcacttaaaattgtgcggtattgcctcaagtttaaattttccaaccattgcctttctcctgaacattgatcccatatacaaaaccggcgcactgtggcagcagcgcgccggttttgttgtggcggggcaagggagtgggcggtatccccaaagtgcctgcttgacaaaaccatgaggttagtgtattctaaacacagaattagcaaatgctaacttggagggaagtatacctatggcaaatattattattgtattgattttggtcgccctggtcggctatggcatttacagctatgtacatcacctgacccacggcggcggctgctgcggtgagcgtgacgccgccgctaaaaaggtcaaggtcgaggaccacaacaaggcccactacccccacacccttgtgatgggtgtggacggcatgacctgccagaactgccagcgccatgtggaaaacgcgctgaacgtgatgcccggcacctgggccgccgtggacctggccgcccagaacgtcaccattctgaccaaggacgaggctgacgaggacgccatccgccaggccatccgcgatgccggttacctgccgctgcgcaccaccagcaaagtgtaaggctgcaacattgtacctgcgccgccgccgaaaacgatggcggcatttttgtgtttacgataaaaggaactgcttatgatgatcgacaaacgcctcatcgggatgatgggagactcgaaacggtacatcgccaaaaacgtggcgctgcaatggctggctctggccgccaatgtggccatgatctttgcggtcagccgttatttaggagccttgtacgaccagctgaccatcggcgacacgatggccggtgcccccaacctgcccttgacgctgggcatcgtggcggcggcgctgctggtgcgtgccacctgcacccgcggcgcggctgcggccagctacaacgccagccgcactgtaaaaaagacgctgcgcagtgcgatttacgaaaaactgctgcgcctgggcggcagctacacccaggctgtgcccaccgccgaggtattgcagctggcaggcgaaggcgtcgagcagctggagacctactttggcgcgtacctgccgcagtttttctacgccatgctggcgcctgtcaccctgtttgtggtgctggccccggtcaacgtaaaggcagcggtcatcctgatgatctgcgtaccgctgatcccggtttccatcgtggctgtgcagaaatttgccaagcggctgctgggcaaatactggggccagtatgccgccctgggcgatagctttcttgaaaacctgcagggcctgaccaccctgaagatctaccaggccgacgaagcccgccaccaggccatgaaccgcgaggccgagcacttccgcaaagtgacgatgaaggtgctgaccatgcagctgaactccatcatcgtgatggacatcatcgcctacggcggtgcggcgctgggcatcggtatcgctgcgcgggagttggcggtcggtcatgtcagcctgagcggcgcgctctgcatcctgctgctgtcggcggatttcttcctgcccatgcgcgcgctggggtcctacttccatgtggccatgaacggcatggccgccagcgataagatctttaagctgctggatctgcccgaagccgccggcaagaccgccgagccggatgccgattgtgccatccactgccgtgacctgcacttcggctatgctgccgaaaaagagacgctgcacggcctgaatctcgacttctcccgcggcagtttcaccgccctggtgggcgagagcggctgcggcaaatctaccatcgccgccgtgctgaccggccgcgccgcgggctacaccggcagcgtgaccctgggcgggcaggaactttccgctgtgaaggaatccgccctgctcagaaatgtaacgctggtcagcctgggcagccacttgttcaaaggcacggtggccgagaacctgcgcatggccgcgcccatggcggacgacaacgccctgtgggctgtgctgaagcaggtgcggctggcggacttcctgcgcagcgaaaacgggctggacacccagctgaacgagggcggcagcaatctttccggcggccagcggcagcgcctggccttggcccgcgccctgctgcatgacagcccggtttatatctttgatgaagctacgtccaatatcgacgtggagagcgagaacgacatcatggcccagatccaggcattggcaggcaaaaagactgtcatcctgatctcccaccgcctggccaacgttacggcggcggacaacatctacgtgctggaccatggaagcctggcggaacagggtacccacgaagccctgctggcggcgggaggcacctacgcccgcctgtggacccagcagcaagaactggaaaattacggaaaggaggaagcatcccatgcctgagaataagaaaaagacccgcggcaatctggccgttatggggcgtctggtggggctggtcaagccgctggcccccgtgatggtggccgccgtgctgctgggcgtgacaggcttcctctgcgccatttttatcaccgtgctgggcgcctacgcgctgctggacagcatcctgcccggcatgcccatcagccttggcaccgtttgcctgctgctgccggtgctggccatcgcccgcggcgtgctgcactatgccgagcagggctgcaatcattttatcgcctttaagctgctggccctcatccgggataaggtcttcggcgcgctgcgccagctggccccggcgaaactggagggccgcgaccgcggtgacctgatcgccgtgctgacggcggacatcgagctgctggaagtgttctacgctcacaccatttcacccatctgcatcgcggtcatcgtcagcgccattatggcggcctttttggcgggttaccactggctgctggggctgtatgccctgggggcctacctggtcatcggcctgctggtgccggtggcggcggccaagtccgcccgccgcagcggcgaggaattccgcgcgtccttcggcgcgctgaacggctttgtgctggacagtctgcgcggcgtgcgggaaagtctgcagtatggcgacggcccccatcgtctggctcagatcaacgcccgcactgatgaactttcgtcgcaggagcgccgcttaaagctggcgggcggcacggcccaggctgtcaccggcggcatcattttgctgctggacgccggcatgctggcgctggcggcgggccttgcccaaagcggcaccatcggctttgacggctgcctgatcgccgtggtggcgctgatgagcagcttcggcccggtcatcgccctggccaacctgggcaccggactgcaaaacacctttgccgcgggcaaccgtgtgctggacgtgctggacgagcagcccaccgtgcgggaagtgaccggcggcgaggacatcgcctttaccggcgctgcctgccgccgtgtgacctttggctatggcagtgacgtgattttgaacgacgtatcgctggaagtgccgcagaactccgtcatcggcatcaccggccgcagcggcagcggcaaatccacgctgctcaagctgatgatgcgcttctgggatacggatctgggcaaagtcgaactgtccggcgtgaacattaaaaagatcaacaccgccagcctgcgcagcgccgagagcttcgtcgagcaggacaccgtgctgttccacgacagcattgaggaaaatctgcgcatagccaaccagaacgccacccacgagcaggtggtgggggcttgcaaaaaagcgtccatccacgattttatcatgaccctgccccagggctacgatacgccggtaggggagctgggcagtaccctttcgggcggcgagcgccagcgtttgggcgtggcacgggcttttttgcacgatgcgccgtatatcctgctggatgaacccaccagcaacctggacagcctgaacgaagcggtaattctaaagagcctggccgaggagcgcaaggacaagacggtggtgttggtcagtcaccgcgcctccaccatgcgcattgcggaccgcacctactcggtagagaacgggaggatgagctgatggccgccaaaacacccgcccaaaagcgcgagcaggaaaaacagaccgtgggcttgatgatcgagctgtactgccatggccaccacggtaccagggggcatgccctctgcccggagtgtgaggctttgcgcagctatgccgatgcccgggtggaccactgcccgcacatggagaccaagaccttctgcagtgcctgcaagactcattgctacaagccccagatgcgggaggccatccgccaggtcatgcgctggagcggcccgcggatgatcttccaccaccccgtcctggcgatacggcatttgatcgagacgaaaaaacagaaaaagtaatatgcccctgcaaatagacggcaacacggaaaaggctccctcacagagggagccttttctgtgtaatcgcgtaacttgcgccaattctccaaaaagtttttgcaaatgctatggcaaacccctgcataatatggtattataataagctgaagacttgtagtgtgtctgtatataactgttgaggagtctttctactatgaacgaaactaaaaagctgcgcgttgcgctgtttttcggcggcgtatccagtgagcacgaggtcagctgtgtttcggcctcgacctggctgcgcgccctggcacaggccacctgtgccgatcgatacgaggtgttccccgtgggcatcaccaagcagggccgctggctggcctgcagtcccacgcccgaggccatggccgacggcagctgggagaagggtgccgactgcaccccctgcgtcctcagccccgaccgcaccgaccacggcatctggctgctgaaggacggcaaggccgagctggtccacatcgacatctgcgctcccgtcatgcacggcaaaaacggcgaggatggcaccatccagggcctgtttgaactggcccgcatcccttacgtaggctgcggcgtgctgggcagcgctgtctgcatggacaaagccgttgcaaacaccatcatggatgccgccggtgtgccccactgcaagtgggccagcgccatccgcgccgagctggagggcgaccacaagaccctgctggacagcattgaacagcgcctgggctaccccatcttcgtcaaacccgccaacgccggttccagcgttggtattaccaaagctaccgaccgtgctgtgctggagcaggccgtcgtgaccgccctgaaagaggatgacaaggtcgtctttgaggagttcatcgacggccaggaggtcgagtgcgccgccatcggcaaccccgacgaccccgccaccgtctccaccacccgccccggcgaaattctggccggtgcggagttctacacctacgatgacaagtacaaaaacggtgtctctcagactgtcatccccgctcatctgagcgaggaaaagttggacgaagtccgcacagaggcccgccgtgcgtacctggccctgggctgcgccggtctgtcccgctgcgacttctttgtggagcgcggcaccggccgtgtgctttgcaatgagctgaacaccctgccgggctttacctccatcagcatgtacccgaaactgatggagcacgagggcctgagctatgcccagctggtggaccgcctgctgcagctggccctgcaccgtcggaagggggcatactgatggacacccgccccatcggagtgtttgacagcggtctgggcggcttgaccgccgtgcgccagctgcgccgcgtgctgcccggcgaggacatcatttattttggtgataccggccgcgtgccctacggctcccgcgggcgggagatcatccgccagtatgcccggcaggacatccgctttcttctttcccacgatgtaaagttcattattgctgcctgcggcacagtgtcctccacctacccgcccgaggaagccgcccgtctgccggtgccttttaccggcgtggtgggtgctacggctcgtgcggcggtggatgccacccgcaacggcaaggtgggcatcatcggcacggcggccacggtgcgcagcggttcctacgcggcggtcatcaaggacatgaagccggagacggagatcgtcgcccgcgcctgccccatgttcgtgccgctggtggaaaacggctatgtgaacgacggcaaccccgtcaccaagctcatcatcgccgagtatctgcaggaggtaaaggatgccggggtcgacaccctgatcctgggctgcacccactatccgctgttgaaaaagatgatcggcgatttcatgggcagcgatgtcaccctgatcgattccggaaaggtcacggcccaggcggccgcggcggcgctggcggatctgggcctgctgaacggccgcgccgagggcggcaacgcccattactacgtcagcgacacgccggataacttcgacgaactggaacatcgcttcctcggcgaatacgccggcggccctgttgagcagatcgcgattgaaacttactaaggcaacaccgcacaattcccgcctgacggcttaagcaccgctccggcggctgcggcacggcatctgcgttgccaaaatgctcgataatacacaaagtattatctgcgcttttggcttagcatctgccgcacctcgctcgccgtatcggcacttagaattatgcggtattgccctaaataagcatcttctgcccaaaggccccctctgggaggatgactccccacagcgtggggagatgtcgcgtagcgacagaggggtccggccgcgtaagcggtcccgcgaagcgggtgggggagagagcctacccttaagcacaaacttatatttgtataaggaaaaaccatgcaggaaaattttctcatcaccatcaaaggcaccatggagcagcgcggcgacagcgacaccgtcgaactgatgacccgcggctccctcgtccacaaagagggtgcctattatatcgtttataaagaaaccgaagccaccggctacgatggatgcaccaccaccgtcaaggtggccgaagatgcccgtaaagtatcaatgctgcggtacggcaaggtgcccagccagcttatcattgagaaaggcacccgccatctctgccattacgagacaggctacggtgccatcagtctgggcgtcgccgccgatgtcatcgagcatgaactgaccgaggagggcggcaagctgaaattcagctatacgctggattccggcgccgagaatttcatcagccgcaacctcgtggacatcacggtggaagccctgcccgaaaacaccgaaaactaaggcaataccgcataattctaagtgccgatacggcgagcgaggtgcggcagctgctaagccaaaagcgcagataatactttgtgtattatcgagcattttggcaacgcaggtgccgtgccgcagccgccggagcggtgcttaagccgtaaggcgggaattgtgcggtgctgccctaagtcgtacaaaagcaaaactcccacaggaggtaacctatggactataaaaactacaacccccgccaggccgcgctgaccgaagcccgtgccctgctgaccgatgccgccaaggccgccgtggccgatggcactctgcccgccgcggaactgcccgatttcatcgtcgaaatcccggcggatgtcaaaaacggtgacgtagcatccaacattgccatggccggtgcccgtgctttccataaggcaccccgccagatcgctgaggctatcaccgccaagctggacctgaacggcacgctgttctccggcgtggacattgcgggccccggcttcatcaacctgttcctgggtcaggattggttcaccagcgttgtctgcgccgcctgcgccaacccggaatacggccgcaccgacgccggtgccggcaaaaagtataacgtggagttcgtttccgccaaccccaccggccccatgcacatgggtaacgcccgcggcggtgccctgggtgacggtctggccgcctgcctggattgggccggctgcgatgtcacccgcgagttttatatcaacgacgccggcaaccagatccagaagttcggcaagagcctggccatccgctacctgcagctgtacaagggcgaggaagcctgcccgctgcccgaggagtgctaccagggcgctgacatcattcagcgcgccaaggagtttgctgaggtccacggcgacagctatgtcaatgccgacttcgaggagctgaaagaggcgctcattgccgacgccctgcccaagaacattgctggcctgcagcgcgacctgggcaagtatcgtatcgattatgatgtctggttccacgagagcgacctgcacaagtccggtgcggtccaggcggttgtggataagctgctggagatcggtgcctgctacaaggccgaggacggcgctatcatgtaccgcagtgcccagtacgccgccaagtacggcgttgtcaacaagaaaaaggctgacgacggcagcgaggaagaggctaaggacgaggtcctcgtccgtgccaacggcatccccacctactttgccgccgacatcgcctaccattataataagctggccgtccgcggctttgacaaggccatcgacgtctggggcgccgaccaccacggccacgtggcccgcatgaagggtgctatggatgccatcggcctggacggcaatcgcctggacatcgtgctgatgcagatggtcaacctgatgcgcgacggcaagcccgtgcgtatgagcaagcgtaccggcaaggccatcaccctgaccgacctgctggacgaggtgcctatcgattccgcccgcttcttcttcaaccagcgcgaaagttcctccaccctggactttgacctcgacctggccgtgcgcaacgacagtgagaaccccgtctactatgtgcagtatgcccacgcccgcatctgctccgtgctgaaaaagctggagagcgagggcatcaccttcaacggtgtggacggtgttgatgcctccgtgctgaccgaccccgccgagcaggccctgatccgcctgctggccgccttcccggcagagatcgtggccgcggccgataagtacgaccccgcccgcatcacccgctactgcatcgatgtggcctcggcttaccaccgcttctataacgcctgccgcatcatgggcaccgagggtgctgtccagcagggccgcattgccctgtgtctcgccgtgcgcggcgtcatccgcaacatcctgaccatgttcaaagtcagcgtgccggaaacgatgtaaaagtgtgaaaaaatcccttgacaaggcacggtttctatggtaaactattgcctgtaaaaaaagcagcaaccggcagtaggccgtcggctcaccttgcgggcgcaaagccccgggtcataccagatacgcacttggtgcgcaactacgtatgttcggcggctgcttttatggcagccgcttttatcatttatcatacacttgtgggaggtgtgttccaatcgccagcaacagcaattccaaggaactggaaatcaatgagcagatccgcgataaagagatccgcctgatcggggcggacggcgcgcagatgggcattatgagcccgcgcgacgcactgcgtatggctatcgacaaagatcttgacctggtcaaggttgcgccgcaggccaagccgccggtgtgcaagatcctggattacggcaagtaccgtttcgagatgcagaaaaaggaaaaggaagccaagaagaaccagaaagtggttgaactcaaggagatccgcctttccctgaatatcgacaccaacgacttcaacaccaaggtgaatcaggctgccaaattcctgcagcagggtcacaagctcaaggtgagcatccggttccgcggccgtgaaatggcacataccagcctgggtctggaagtgcacaagcggtttgccgatgcgttggcaggcaaggccgtcatcgacaagcagcccaagcttgagggccgcagcatgatgatgttcatgtcccccgcacccaacaagtaagaagtaactctttaggaggaaacaacaatggctaaaatgaagctcaagaccctttccggcgcaaagaagcgcttcaagatgactgcttccggtaagatcaagcgcaatgcgaccaagcgccgccacatcctgaccaagaagaccaccaagctcacccgcggcctgcgcatgcccaagtatgtcgacaagaccaacgaggctgctgtcaagaaaatgatgccctacggcggctaatcgccccgcggcaaggtcagttaacttaagagtgtataaaggagatataaaccatggctcgtattaaaggcgctaccatgacgcacaagcgtcgtgctaaaactctcaaactcgcaaagggctactacggtgctaagtccaagcacttccgcatggccaagcaggccgtcatgaagtccggcaactacgctttcgttggccgtaagcagaagaagcgtcagttccgcaacctgtggatcacccgcatcaacaacgctgttcgcgctcagggcatgaactactccagcttcatgaacggcctgaagaaggctggcgtcgagctgaaccgcaagatgctgtctgaaatggctatccacgatcccgccagcttcaacgctctggtcgagaccgccaagaaggctctgtaataattcttgcaaaaagactcacgcgcacgcgtgagtccttttgtgtttaaaggggaaagctatagcacagccgttttacggcttactgtgggtggctttcctgcatagggaatccctatcgttcataaaacaacattgattttacgggagaggggcgctacaatggatataatcaccagccgtgacaacgcaggcgtaaagtatgcctgcacactgcgcgatagtgagaagcagcgcgcggcagaggggctgttttttgccgaggggccgaagctttgcctggaactggccaaaagctgcaccccgcgcacggcttatgccaccgaggcggctatggaaaagacgcccgcgttggaaagcttgcgccccacgctgatcgcgcctcacgtggccgaaaagctggcgggcaccaagacgagccagggcgtgtttgtgctgtttgaacagcccgcgcccccggtagagcggctggacaccgccacccacatcctggcgctggaaggagtgcaggaccccggcaatgtgggcaccctgctgcgcagcgccgcggcctttgggtacgatctagtcctgttgggaccggggtgcgccgcaccgttttcgcccaaaacactgcgctcctcgatgggcgcggccgggcggctgccggtactgcatgtggacgacctgcccgccaccctgcaaggcctgcgcgcccggggtgtggcctgcctggccaccgctctgtacaactcccgcccgctgggtgaagccgggcaggagttcccacagggactctgcgtagtcattggcagcgagggccagggcctgacggatgccaccgtggccgcctgtgacctggctgtgcgtatcccgatgacagaccaggtggaaagcctgaacgccggtgtggccggcagcgtgctgctgtggcagttccgcaatgtgtaaaaacatagcataataagggaaggggagacacgcgtggataagacactggcctggctttggctggcggatgccgttggttctgcctgccagaacgcccgcgatctgctggcgctctaccccgacccagaagctttatacgaagccctgtgcgccgggcgggaagcaccgccctactttttgagcgaccacgccgtcgcccagctgtgcgacaccaccccctttgattatgaggagcggctggaccactgtctgctgaccggtgtggagatcatcactcccgatgatgccgcctacccggatcgcttgcgggacctgccggatatgccgctggtgctgtacgtcaccggcgagcccgcctgcctgaacggccaccgctatgtgggcatggtgggcacccgccgccccagcgcttacgggcggcaggcggcgtttgacctttcgctggagatggccaaacagggagccgtcattgtcagcggtctggcggacggtctcgacagtgagggccaccgcgcggcggtggaagctggcacacccaccgtggcgttcctcggaacggccatcgatacgacctaccccgccgccaatgtcaagttgcgccagcgcatcgagaaaggcggcggcgccgtctgcagcgagtacccgcccggctaccagggcaagcaaaagggcacctttctggcccgcaaccggctgatcgccggcctgtcggaggtgctttgtgtggccgaggctcgcatccgcagcggcacgctgaacaccgtgtcccacgccgaaagcctgggccgcccggtgctggccgtgccgggcagtatttacagcgcccaaagccagggaaccaacgagctgctgcgctccggccgggccggggtgctgtgccaggcagcggacgtgctggcctgtatgggcgtggaaagtgaaagcgccgcgccggagcaatcggcctttgcggtggaacaaaccagccccgacgcccaggccgtctatgcggcactgggccccacgcccaaaggcgtggacgagttggccgctgccaccggcctgtccgccagccgggtgctggccgcctgtaccgaattggagttgtacggcggtgcacaaagtcagccgggacggcgctatgtcgccctgtaaaatatagagttaagttgaggtaacctatgccgaaattagtcatagtggagtcccccgccaaagcaaagaccatcagcaaatacctgggccggggctataaagttacggccagcatgggccatgtgcgtgacctgcccgccagccagctgggcattgatgtggacaatggctttgcgccgaagtatatcaccatcaagggcaagcagaaactggtcaaagagctgaaagccgaggctaaaaagtgcgacggcgtcctgcttgcaaccgacccggaccgcgaaggcgaagccatcagttggcatctggccaacattttgggactggaccccgccgcccccaaccgcgtgacctttgacgagatcaccaaaaagggcgtcaaggagggtatggcccatccccgtgccatcaacattgatctgttcaacgcccagcaggcccggcgcgaactggaccgcctggtgggctacaagctcagcccgttcctgtggcgcaaggtccgccgcggcctctccgccggccgtgtgcagagcgtggcggtgcgcctgatccgcgaccgcgagctggaaattgaaaacttcaagccagacgaatattggaacatcgacgccgcgctgtacccccagacccagagcaacagcaaaaacggctttacggcccgcttggccgctaccgctgacggcaaaaagctgaccgtcaccaacaaagagcaggccgataccatcgtggccgcgctggatggtaaaagctacaccatctccaaactggaaaaaggcaagcgccgccgccagcccgcgccgcccttcatcacctccaccctgcagcaggacgccagccgtgcctttggcttctcggccacccgcacgatgcgcgctgcccagacattgtacgaaggcatggacattgcaggccacggcaccgtgggtctgatcacctacatgcgtaccgactcgctgcgcattgccgccgaggccagcgccgccgccaaacagttcatcgcgggccgctggggcgacaactacgtctgcaacacccagcgcaagtggaagtcccgctcggccacggccgcccaggacgcccacgaagcgatccgcccgtctatgccggaactgacccccgatgaagtggagcagagcatcagcggcgacaccgccaaactgtaccgcctgatctggagccgctttatggccagccagatggccgactgcatccaggataccgtctcggtgtccatcacggcaggggattacctcttccgtgcatctggcttccgcgtgtcttttgacggcttcaccgccctgtacgaggaatccaccgacgacaagcagaaaaaggagaccgccctgcccccgctggaggagggccagaccctcaaactgcgcagcctgacggcagaccagaagttcacccagccgccgccgctctacaccgaagccacgctgatccacgcactggaagaaaacggcatcggccgcccttccacctacgcgcccatcatcaccaccatcgtcgaccgcggctatgtggaaaaagaccagaaaaagctgaaaaccaccccgctgggtcaggccgtcaacactgtgatgatggagcagttccccaacattgtagatgtgaaattcagcgcagatatggagaaaaagctggatattatcgaggctggcaaggctgactgggtccagaccatcgatgacttctacaaaggctttgccaagagcctggaggacgccgagaagaacatggagggcaagcgcgtcaaggtcgaggacatccccaccgacgagatctgcgaaaagtgcggccgccccatggtcatcaaatccggccggtacggcaagttcgtggcttgctccggcttcccggagtgccgcaacgcccacccgctggtcaaagataccggcggcatctgcccggagtgcggcggccacatgctggtgcgcaaaagcgcgaaagggcgcatttattacggctgcagcaactaccccaagtgcaactttatgacctgggacgagcctgtgcctgaaaaatgcccccagtgcggccagaccctgtttaagaaaaaaggccagctctactgcgccaaagagggctgcggctttacgaagcctatcgaaaagaagtgaaaaatggcggaataacgccgaaaccataacggagtgactatgcaagtaaacgtgatcggtgccggtctggcggggtgcgaagccacgctgtggctggcggacgccggtgtgcaggtagacctgtacgaacaaaaaccgggcaagttttcgcccgcccataaaagtgccggctttgccgagctgatctgctccaattcgctgaaagccgagcgcccggactctgcctccggcctgctcaagctggaaatgaagatgatgggcagccacctgctgaaggcggccgagaccgcccgcgtggcggccggcggtgcgctggcagtggaccgggatgtcttctccgccgccgttactgagatggtggaaaagcacccgaatatcacagtgcatcgtgaggaagtgaccgctctcgacgaaagcgcccccgtgctggtagcctccggcccgctgaccgagggagccttggcggacgccgtggccggcctgaccggtgaccaccgcctgagcttttttgacgcggtagcgcccatcgttaccgccgaaagcctggactacgagaaggtcttcgctgcttcccgctatggccgcggcgaggccgattaccttaactgcccctttaacaaggaagagtacgaggctttccacgccgagctgatcgccgccgagcgcgcgccgctccacgattttgacggcgatctcaccgtctacgagggctgcatgcccatcgaggtcatggctgcccgcggagctgatacgatccgctttggcccgctgcgcccggtgggcctgcgggacccccgcaccgggcaccgcccctgggcggctgtacagctgcgcgccgagaacaccgcccgcacgctgtacaacctcgtcggcttccagacgaacctcaaatggggtgagcagaagcgagtgttcagtatgatcccgggcctcgagcatgccgagttcgtgcgttacggcgtcatgcaccgcaacacgtttttggaaagccccagcgtgctgaccgggcagcaatttctgaaagaacaccccaacgtgttttttgcgggccagatcaccggctttgagggctatatggaaagcgccgccagcggcttgctggctgcccgccagatcttggcccgcctgcagggccgtgagctgcccccgccgcccgccagcacgatgtgtggcgcgctgctggattatatcaccacgcccaacaaggacttccagcccatgggcgcgaacatgggcatcttgccccgcaccgaagaaatcaacaccatccgcgataagcgcgagcgctacgccgctctttcgcagaacgcacaaaacgccatgcacgcatgggtggaggaatacaaatgaaaattttagtagatgccatgggcggcgataacgccccgctgtgcgttttgcagggcgcttctcaggctgcggccgagtttggcgacggcatggagctggtgctgctgggcgaagaagacgctatcaaggattgtgccgcccagaacaaaattaacctggcaccattcaccattatcaattgcaccgagaatatcgacatgcacgacgaccccgtcaaggctgtgcgccacaaaaaggattccagcctggtcaagggcctgacgatgctgaaaaacgacgaggcggacgcctttgtcagcgccggttccaccggtgcactgcatgtgggcaccagcctgatcgtgcggacgatcaaaggtgtcaagcgcccggcgctggctaccccgatgcccggcgcgaagcagaactttctgctgctggattgcggcgccaacgttgagtgccgctccgaaatgctgaacgccttcggcaccatgggcagcgtctacgccgagaaggtcatgggccgcaccgcccccaaagtcgcgctggtcaataacggcgccgaggagaccaagggcacgcccatctaccgcgaggcccaccagttgctcaaagctaacccttgtatctatttcgccggcaacatcgagccgcgctacatcatggatggcgaggtggacgtcgtcgtctgcgacggtttcgtcggcaacgtggtcctcaagctgaccgagggcgtcgccaagacgctgctgggcatgctgaagaaaattttcctgcaaaacctcatcaccaagctcagctacctgggcatcaaaggcggcctgggcgagctgaaacggatgatggactctgaggaagtgggcggtgcgccgctgctgggcgctgccaagccggtcatcaaggcccacggttccagccacgccaaaggcatcaaaaacgccatccgccaggccaagctgtgcgtcgccaacgacctgtgcggcaccatgcagaccgccctggccgctgtggccgaaaaggccgaagccgagaaagccgagcctgtaaaagagtaaacgctatcgtactgttgttttaagaaaggcatgagacagatggcaaaaaaaccggaagaactgcagcaagtactgcattatacctttaaaaatcccgcgctgctgcgcattgcattgacccacaccagctttgccaacgagagcaaggtcgccaccacccacaacgagcgcctggagtttttgggcgacagcgtgctgtccgttgtggtggcggactacctgttccaccagtccggccggcctgaaggcgagctgacccgcatgcgcgccagcctcgtcagtgaggatgcgctgttccagtttgcccaggagatccacctgggcgagtacctgcgcctgggccacggcgaggatctgggcggcggccgcaaccgccccagcgtggtgtccgatgcgtttgaggctgtcatcgctgcgctgtatctggacggcggcatggaggccgcccgcaacttcatcctgccctttatcaccgagggcaagaccgccgaggaagactacaagacccagctgcaggaggtagtccagcaggaccccagcgccgtgctgcgctatgaggtcaccggcgagaccggccccgaccacgccaagaagtttaccgtttgcgtatggcgcaacggcgaaaagctggccgaagcccccggccgcagcaaaaaagccgccgagcagcacgccgccaaattggcattggagaaactgcggtaaaaatacgaattcaaccaacctacgcgaaaggttttaaccatacatgcgcctgaaagaactggaaatccaaggtttcaaatccttccccgataagaccaagatcaccatcggcgagggtatcaccggcgtggtcgggccgaacggctccggcaaatcgaatatttcggactcgatccgctgggttttgggcgagaccagctccaagcagctgcgcggctccggcaagatggaggacgttatcttcggcggcacccaaagccgcggcgccatgggctttgcctcggtcgcgctgaccatcgataatagcgaccacggcttggacatggatgccgacgaggtcaccatcggccgccgctactaccgcagcggtgagagcgagtactctatcaacggccagaacgtccgtttgaaggatgtctacgaactgctgctggacaccggcatcggccgcgacggttacgccatcgtcggccagggccgcattgccgagatcgtcggcgccaagtccgccgagcgccgcgaaattttcgaggaagcctccggaatcgccaagtaccgctaccgcaaaaacgaggcggaacgccgtctcgaagccgccgagggaaacctcgaacgcctgcgggatattttgggcgaactggaaaagcgtgtcggccccctgaagcgggacagtgaaaaggcccagcagtttttggaactctccgagcgccgcaagagcctggaagtcactctctgggtcgatgccatccgccgcgccaacgataccgtgcgcgaccagcagcgcaagtttgaagccgcccaggcagattacgaacgcctgagccgccagctggacgagttcgacgaaaaaagcgccgccctgcgggaggaagcccagcagcttgtcctgcaggtcgagcaggccaacgccgacatccgcgccgtgactgaggccaacgcgggcagtgaaagtgagatcgccgttttgaaaaacgagagcgagcacagccgcttccgcatcgacgaagccactggcgagttggagcgcgccgggcagggccgccagtccatcgagaccgagaccgcaggccacaaagccgccatcgaaaaactgcacggcgaggtcgctgcgctggacgcccgcgtggcagaactgcgcgccgaactccgtgcgctggaagaaaaagctgccgccagcggccagcgccgggacgttatcgacgccgctattgcccgcctgcaggacaccgccactgccgcgaaagtgcgcgccgcctcggcccaatcggcaaaagaagccgccgcccagcgtttggatgaagcaaagcagcaggccgtagagctggaaaactccgccgccgctgccgaggaagaaaagcgccgcgccgagcgccgcctgaaggatgccgaggaggccgtcacccgcaacgataacatcaaggcgggcctaaagctgaaactggaaagccgccgccgccagcaggctgaagctgccgacgcgctgcaaaaggccgacaaggagcggtccaacacctcccagcgcatccacattctggaagacctggagcgcaacatggacggctaccagcaaagcgtcaaggctgtcatgcgcgccgctgcgggccgtcgtctgcggggcatcatcggccctgtggcgggcatcctcaccgtcgaaaaaggctatgagaccgccatcgagacggccctcggctttgctttgcagaacatcgtggtcgaggaccagggctgcgcccgtgcggccatcggctttttgaaggacgagcgcgcaggccgcgccaccttcctgccgctggataccgtgcagggctcccgcttcaccggccgcctcaccggcaccgccgaggtcgccgccgatctggtcaagtgcgacccgcgctaccagcacatcatcgataacctgctcggccgcatcatcgtggtcgaggatctgtccgaagcctccactgtggccaaaaacctgggctaccgcaaccgcatcgtcacgttggacggccaggtcatcaacgccggcggttcgtttaccggcggctccactgcccgcagcgtgggtgtgttcagccgcaagcaggagctggatgaactgcgcacccgtctggtcaagctggagaaaaagcgtgccgatgctgaaaaagagctggacgcccgcaaggccgaggtggataaccttaccgcccagctctccggcgccgaggccgagggcatgaatgcttcctccgaacggctgcgcgcctcgctggagcttgatcgactgaccgccgccgtagcccagcatgaggaaaatacccgcagtctggccgccgaaattgaggcccagcaggctgccgtgacccagaacgagaccgcctgcgccgaagccgaagccgcccaaggcaaggccgaggccgagctgaacacctacaatgccgaactggccgaactgggcgagagcacaggcagtctgaccgccgagcgggagcgcatcaccaacgaattgagcgaaaaccagatgcagcgcctggccaacgagaaggacatcggcctgcatgaggccgctttggaaggcctgcaaagccgcaccggcgaggccgaagcccgcgcccgcgagctgaacgccgccatcgaggccgccaaggccaagatcgaagccaacgccttaaaaatcgccgagatcgagcgcacccgcggcgagaacaaagagaaaatcgccgccgccgaggagaccatccgcacggccaacgccgcccgcatggaaaaggaagccgccgtggcccgcttaggacaggaaaaccgcgccctgaccgatgagcgcgagcggatgagcggcgagatggcccgcctggccgaacgccgcactgccgccgaaaacgagctgaacgacaccaacaccaaactgtgggaggagtaccagctcaccgccggcgaggcaaaggagctctgcgttgagtttgagtccctgaccgagctgcgccgcagcgtggccgaggtgcgcggcaaaattcgcggcttgggcaacgtcaacgtcggcgccatcgaggaatataaggaggtcaaggaacgctacgacttcctgaaagcccaggtcaccgacgtggaaaaggccaagagcgagctgacccgtatgatcgccgagctgtgcagcgagatggaagagctgtttacgacgagcttcaagcagatcaacacccacttccagcagattttcaaagagctgttcggcggcggccacgcacgcctgtacctctccgacgaaagcaacgtgctggaatccggcatcgagatcgaggtctcgcccccgggcaaggtcatcaagaacctgagcgccctttccggcggtgagcaggcgctggtcgccatctcgatctacttcgccatcctcaacgtcaaccccgcgcccttctgcttcctggatgagatcgaagctgcgctggacgacgtcaacgtggcccgctatgcgcaatatctgcgccgcatgaccgaccacacccagttcatcgtcatcacccaccgccgcggcacgatggaggccgccgacgtgctgtacggcgtcaccatgcaggaggacggcgtttccaagatcctgcgccttgacctggacaaggtcagcgcagacctcattacctgatatataagggaggcttcccatgggatttttcaactttttcaagcgcaacatctcggagcaggagttccaggagcagcagaaaatgaagtacggcctggaaaagacccgcacgggctttttccagaacattgtcaacacgttgacccatgcccagatcgacgacgacctgtatgacacactggaagaacagctgattttggccgatgtcggccccatgtgcgctgtgcgcctggtggacgagctgcgggatgccgtggaggaaaagcacctcaagaacggccagcaggcattggacgaactgcgccagatcatctgccaggaattgaccccccgctacccgatggagctggacggtaaacctgccgtgattttggtcatcggcgtcaacggcgtgggcaagaccaccaccatcgccaagctggcccacctgtataaggagaaaggcaagcgtgtgatgctggccgcgggcgataccttccgcgccgctgccagcgagcagctggaactgtgggccgaccgcgccggtgtgccgctggtgcaggccggtcagggtgccgaccccgccgccgtcatctttgacgcggtcaagagcgccaccgccaagggctacgacatggtcattgccgataccgcaggccgcctgcacaacaaaaagggcctgatggacgagctggccaaaatttcccgcagcgtcaaaaaggccagccccgaagccagcctggaagtgctgctggtgctggatgccatcaccggccagaatgccatcagtcaggccgaggagttctgccgcgccgccggtgccaccggtatcgtgctgaccaagctggacggtaccccccgcggcggctgtgcggtctctgtgtgggagaacctgggtctgcccatccgctttatcggtgtgggcgaaaaaatcgatgatctgatggaattcgacgcccagaccttcgtggagaccctgctgcccgagaaagcactgcagaaagaggaagaagagaaagaggaaacttccggggaggaacaggcatgatcgtatgtgccgccagcaacaacgccggcaaactgaaagaactgcgccgcattttggagcagatgggccacgaggtcaagagcctgcgtgacttatgtatagacctcgaccccgaggagaccggcactacctttgccgagaatgcccgcatcaaggccgaagcgttctgcaaggccagcggtctgcccaccgtggcggatgactccggcctgtgtgtcgacgccctgcacggtgcccccggtgtgtacagcgcccgctatgccgggcaccacggcgatgacgccgccaataacgctaagctgctgcacgagatggccgacgtcccggcagggcagcgcaccgccaagtttgtctcggccatctgctttatgctgcccgatggccgcgcactggaagtggcaggggaatgccccggctccatcagcttcaccgagaccggctccaacggctttggctacgacccgctgtttgtgcccgcccgtgtgggcctgcccgacggcaccaccaccgagaacaccgactgccgcagctatgccgaactgaccgacgccgagaaggacgctatcagccaccgcggccgcgccatggaaaaactggcccgggagcttccggtgtttttaaaatgaatgtctgcgtttttacagtaacctatttataaaaaggagaccattatggctttaaccagcaaacagcgcgccgccctgcgcagcgccgccaataccattgaccccgttttccagatcggcaagggcgagatcgacgataccctgatccagggcctggccgattgcatcgccgcccgtgaactgatcaaaatcaaggtgctggaaaacagcgagtattccgcccgcgaagccgccgacaccctctgcgaagcgctggactgcgagtgcgtgcaggtcatcggccgtaagttcgtgctgttcaagaaaaagaagaaagaaagcgccttcgacgctgtttttgcaaaataatgggcacggtgcaaaaggttttgttgtacggcggcacgtttgacccgccccacaacggccacatgaacaacctgcgggccgcgctggaactggtgcggccggataaggccatcgtgatgcctgcgggcatcccgccccacaaaaaggccagcaccacccccggcaaagtgcggctggccatgtgccaatgctttacggcgcttagcccggcggtggaagtcagcgattgggagatcgcccagggcgggcgcagctacacggtacacacgttggaaatgctgcgtgatgcctaccccggcgcagagctgtacctttgtgttggcagcgacatgctgctgacctttacccagtggtaccgctggcaggatatgctggccatggccgcgctggtggtggaaagccgcgaagcgggggacgaacccgctttgcaggcggccgctgccgacctgaccgcccagggcggtagggtgctgtttgccagggccgaggcttacccctgtgcctccagcgacatccgcagcggcaagatcccgccggaacaatggccggagattttgccgccggagacattgcgcgtggtgcaggaaaaccacttatacagcgcagaaaaagaggtttgataccatgacctgcgaagaagccaagaagatcgtgaagccgcgtctgagcgaaaaacgctggacacacaccaaaaatgtaaaaaaaatggcggtaaaactggcaaaacagtggggcgcagacccggaaaaagccgctgtggcggcaattttgcatgattctgccaaagaactacccaaatcggagttgttgcagatttttgccgataatgctataatagcagaaaatgcccctgcgcgcccatcgcccgtgtggcatggcatcgccgcggccatcctggccgagacccaatggggcgttaccgatcctgagattttgtccgccatccgttgccacactaccggcaagctgaacatgaccaaactggacaagatcatctacttggccgatatgaccagcgctgagcgtgactggcccggcgtggaagacctgcgcaaattggagatgcaggacctggatcgggcattgtgcgacgctttgaagcgcagcattgattttgtagaagaaaagggcggcacgctggaccctgaaagcgtggccgcatacgagtatgcaaaagagcatttgcaagaaccgtaagggaagccaaagtgctgctgccgtatccgcggtatgttgttttgcggctgttcccgccaactccaaaaacagggaggaaacataatgagcgaaccgcgtaagctcaataccggcagcgcgtccggcggatttgaccagtcccagtatgaggctgcccgccgccgtgcccaggagcaggccaaccagaacgcccgccgccgtatcatccagcagcccatgcgcacccagcagcaggcccggcagatccgccagcaggcccccgtacaggaacctgtgcaggaagccccgcagccggtccagcaggcctccgtgcaggagacaccccgtgagctgacccacgcccagcgccaggccatggcctaccgcgctgcagccgaacgcaagtacggcaacaccgtgcagttccccacgcgggagatccagacccgccgccccagccggcccgcgcagccgtcccagcagcgcaccatccaccgtgatggtgccgcccagaccggccgcccgcgtgcgcaggtgcagcagctggatgtgaacaaggtgcagggcagccgccccgcctttaattatgacgaggcagcccccgccgccggaggcatccagatggaagaaacgccccgcacccacaaggcccaccataaggacgaagccaccccccgcacccatcgcgccaacggcggcggccgcaagcccccgcgtgacggttaccccgccgaccccaagcctcacggcaaaaaaagcggcaagggcaacggcggcaaaaagaagaaaaagaaaggcacctggtggaagatcctgctcatcaccctgctggtgatcgtgctgatcttcggcggcgcgtatgcgctcatcatgggcgctatcgcccccaagggcggcagcatcaagctgaaccagctggtcaacacccccaaggaattccaggataaagagctgaatgtccttgtcaccggcgtggatcgttcctccaccggcgacctgtccgccggtgccgccaacgactccaacgtcaacgacggcatgaccgatatgatcctgtacgtccatttcaacaacgaaacgggcgaattgaagatgctgcagatcccccgtgacacgatggtcaccaccgacgccagcgtctccggcaactaccgcatcaacggcgtggccaagacccagggcagcgataacaacaacaatatggccgccctgtgcgagctggtcgccgaccagtacaagatccacatcgatggttatatcaccatccgcctggaaatgctgactgaacttgtcgacctgttcggcggtgtcgagatcgacgtccctgtggacgtggattactcggccatcggccagggctccagcgttatccacgccggttaccagacattggacggcgcggctatggagttcctgctgcgtgcccgtaaggtctacccggatggcgacatcggccgtctgaacatgcagcgccagttctacgccgctctgttccgcaggctcaagagcatcggcaacatctgggacgttgctaggctgacccccgccgtgctgaactatatggagaccgacctcaacgcctccaccctcatcagctttgcggtcagcatgctcaagatcgattccaacaagatcatgatcgcccagatgccggtcatcagcggtccgaagtatcagggccaggcgctgctttacccggcacggcaggaggacgccgacctgctgaaccagtatttccgcgagaataccggccctgtggacgccagccagctgaacctgtgcgataacgtcgttgacctgtccggctactcggccaccgaccccaacatccagatcatgggcggcctgatgagcgaggccgacgatgcccagaagaacaataaccgcgacggttccaaccaggttacggatgttatggaaaatgattcggcgactacgacatcggaatccgaatccaccagcgaaccggccgcctaaataaaaggagaacctatggaaagcagagaacttgccatccgtctggcccgtgcgctggacgccaaaaaggctttcaacatccatatcctggaggttgaggacctgaccaccgttaccgagtatttcgtcatcgccaccggtaactccaccacccatgtaggtgccctggccgatgaggccgagttccagctgggccgcgagggcgtccaggtgctgcgcaccgagggccacgacggcaagcgctgggtgctgctggattacggcagcgtcatcgttcacgtctttacccaggaagcccatgactactacgacctggagcacctgtgggccgatgccaagcccgtgcccgccagcgagtggatgccggaagaagccgagaccccggccgaataaccttacagaaaagcccatttaaattatcaacgtggggagaaaagatagagtatgaagtacgatttcaaaaccgttgaggccaaatggcagaaggtctgggaggatgaagataccttccacgctgacatcgaccattccaagcccaaattctacgccctggtcgagttcccgtatccctcggccgctggcctgcacgtcggccatccgcgtagctacactgcgctggacatcgtagcccgcaaaaagcgccagtgcggctacaacgtcctgtaccccatgggctgggacgctttcggcctgcccaccgaaaactacgccctgaagaaccacatcaaccccgaaatcgtcaccgcccagaacgtggcccgcttcaagagccagctgaaagccttgggcctgtccttcgattgggatcgtgaaatcaacaccactgaccccgagtactacaagtggacccagtggatcttcatccagctcttcaaaaagggcctggcttataagaaagagaccaccgtcaactactgcaccggctgcaaggtcgtgctggccaacgaggaagtcgtcaacggcgtttgcgagcgctgcggcagccccgttgtgcagaaaaacaagagccagtggatgctcaagatcaccgcttacgcggaccgcttgattgacgacctggacgatgtggactacatcgaccgcgtcaagacccagcagcgtaactggatcggccgcagccatggtgccgagatcaacttcgacaccaccgccggcgacaccctgaccgtctacaccacccgcgccgatacgctcttcggctgcacctacatggtcatcagccccgagcatgccttcatcaaaaagtggaccgacgccggcctcatcaagaatgccgacgctgtctccgcttatcaggaggaagccgcccgcaagtctgacttcgagcgcaccgagctgaacaaggaaaagaccggtgttgtcatcgagggcgtgcaggccatcaaccccgtcagcggcaagcaggtgcctatcttcgtgtctgactacgttctggctacctacggcaccggcgccatcatggctgtcccggcccacgatacccgcgactgggagtttgccaagaagttcggcatgcccatcatcgaggtcgttaagggcaccaccgagagcgacctggacaaggaagctttcaccgatgttgctaccggcacgctggtcaactctggcttcctggacggcctgtctgtcgaggatgccaagaacaagatgtacgcctggctggaagagaacggcaagggccacaagcaggtcaacttcaagctgcgtgactgggtcttcagccgccagcgttactggggcgagcctatccccatggtctactgcgacaagtgcggctgggtgcccctgcctgagagcgagctgcccctgcgtttgcccgagatcaaggactttgagccgggcgagaacggcgaaagcccgctggcccgccacaccgagtgggtcaacaccacctgcccctgctgcggtgcccccgccaagcgcgagaccgacactatgccccagtgggccggttccagctggtatttcctgcgttactgcgatccccacaaccacgatgctatcgccagcaaggaggccctggagtactggagccccgtggattggtacaacggcggcatggagcacaccaccctgcacctgctgtacagccgtttctggcataaattcctgtacgacatcggcgtagtgcccaccaaggagccctaccagaagcgcacctcccacggtatgatcctgggcctgaacccccatgccttcgagaaccagcccgatgccgagcgcaagcgcctgctggccgattatggcgacgagaagggcgcccgcaaggccctggtcgagaagtacggtgagatggctgagcatcccatcgtcaagatgtccaagtctctgggcaacgttgtcaaccccgatgacgtggtgaacgagtacggtgccgacactctgcgcctgtacgagatgttcatcggagacttcgagaaagccgccccttggaacacctcctccattaagggttgcaagcgtttcttggataagatctggtccatgagcgagaagttggcggacggcgacggcatccgccccgagctggaggctgtggccaaccgcaccatcaagaaggtcggcgaggacatcgacgccctgaaggccaacactgccatcgcccagctgatgatctacgtcaacgccctcagtgacaagggcggcgccaccaaggacgagtacgaggttttgttggaactgctgaacccgtttgccccccacatgaccgaggaactgtggcagcagctgggccacaccgagcagctggcctaccacgcatggcccacctacgatgaggccaagtgcaccgagcagaccatcgagatcgctgtccaggtcaacggcaaggtcaaggcccgcatccacgtgcccgccgccatcgagagcgccgatgccattgcccaggccaaggctgagcccgctgtggccgaagccatcgccggcaagaccatcgccaaggagatctacgttaagggcaagctggtcaacatcgccgtgaaaggctaagactctgttctttctttgaaaagaaagaaccaaagaaactttaggcaataccgcataattctaagtgccgatacggcgagcgaggtgcggcagatgctaagccaaaagcg

SEQ ID NO: 7869 - DNA, 60268 bp, Unknown
  gut microbiota DNA sequence
cggcatccgccttgctgaactcgcccaggggcagcaccagcttggccagcaattcctgcggcaggtcagccagcagggcactctggtcagcctcggcatccacagcggtaatgatgtgggacacgccgtcctcgtccacttcaatgcgggcataatgcccggtggcgataaaggcgcagtccagcttggcggcctgctcggccagcagcggcagcagcgtggccggggcggcgggggagtcgacagtatcttcggcggtaaaggtcagcacggcaaagccctgctgctgcaaaatgcggtaggctgctgcggcatcagcgccactgttcagccccagcagcactttgtcctgcttttcaaaggtgttgaaaccatccattgtctttctccttattttatagttagagggagcgttatgcctggcggccgccgtactttttgctctgctccacggccatgcggtcgcagcgctcgttttcggggtggccggcgtggcctttcagccagtggtaggtaatcttgtgcttttcgctttcttccaaaagcggggcccacaggtcagggttcagggcgggggacttgtcggcttttttccagccgcgggcgcgccaccccttggcccagcctttttccagcccgttgatgacatactggctgtcgctgtacaaatcgatggcgcagggctctttcaactggcgcagggcttccagcagggcggtcatctccatgcggttgttggtggtgttggcctcgccgccggaaagctccttctcgtacactttctgtgcggtacggaaccgcaaaatggccccccagccgccggggccggggttgccgctgcacgcgccgtcggtataaatttcaatctgtttcattcgtaatctcccatgatccggtaatactatttattatagcgtgtccctgcaaagatggcaaggcgtttgacaagtaaccacaatccgtttataataaatagtaattgcaatgttgtgtatgaaaccgggcccggccgcaccttttcaggtgggctcttcgcgcccagccactgtcttataagggtagacccaccctttagcaaaaatacataaatcgcaaacaggcgcaggaaatgtcggcgtgtacagagcggtatacgtcagtcctgctagacgagaatcggaggttttcatggaagaattcaagcctaagcgtaaaaataacaactattctggcaccgacaaggccggtgcgccgcgccgcgccccgcgccagaatcatcagaataagcccccgcaggagaatagcaccccggccaataagccccgccgccgtcctgcccgcccggccgctgccgaagctgcccaggccccggcacaatccgtgcctgcaccgcgcccgcgccgcccccgcaacacaccgcagggggagggtcaggctccgcaccagcagcgccgcggccgcaagccccagcagaataacaatgccccccactacgagatgaccccggccatccccatgcacatctgcccgctgggcggtctgggtgaagtcggcaaaaacattaccctgtatgagtgccagggcgatatgatcctggtcgattgcggcctcgtcttcccggatgcggatatgttcggcgtcgatctggtcatcccggatttcacctacgtgctggagaacaaggaccgcatcaagggcctgttcatcacccacggacacgaggaccacatcggcagcctgccgtacctgctcaaaaaattcaacgtgccgatctacgccgcccggctgaccatcggcctcatcaagaataaactcgaggaacacggcttggcatccagcgccgtcttccatgagatccgcccccgccagaaggtcaagctcggctgcttcaccgtcgaacccattcacgtgaaccactctatccccgacgcgctggctttcgccatcgagtgcccggcgggcgtggtcatccacaccggcgacttcaaggtcgactacacgccgctgtccggtgatgccgtcaccgacctgtccaccattgccgagtacggccgcaagggcgtgctggctctgctgtccgactccaccaacgccgagcgcccgggctttaccgcgacggagcagacggtggccgagggcgtgcgcggcctgttcggcaaggcaggcaagcgccgcatcatcgtggcgacctttgcctccaacatctaccgcgtgcagcagatcatcgacctggccattgagtcgggccgcaaggtggccgtcagcggccgcagcatggtctccaacaccgagatggcccgcgaactggggtacctgcatgcccctgacaatgtgctgatccccatcgaggagatcaacaagtacccgccggaaaaggtcgtgctcattaccaccggcagccagggcgagccgctgtctgcgctgtcccgcatggcgcaggccagccaccgtcaggtcaaggtcggccccaacgactttatcatcatctcggcccgtcccatccccggcaacgaaaagaccgttaccaaggtcgtcaacggcctgctggccctgggcgccgaggtcatctacgagaacatgtacgacacccatgtttcgggccacgcctgccaggaagaacagaagcttatgctgaccctggcgcacccgcagtacttcctgccagtgcacggtgagttcaagcagctcaagcgccacgccgagacggccgagcacctgggctatatcccgaagcagaacatttatatcgccgagaacggccagaacatccgcctgtctgccgacggcatgaccgtggagaacaccgttaccgccggcgctgtcatggtggatggctacggcgtgggcgatgtgggcaatgtggtcctgcgtgaccgccaccacctgtccgaggatggcatcatcatcgtgacggctgctgtggatggttccaccggccaggtgctgtccggtccggatcttgtcagccgcggcttcgtctatgtccgcgagagcgaggagctgatggacggtgcccgcatgcaggtagagatggccctggaccgcagcctgagcgacaatatgcacgattgggccagtgtcaaggcccgtgtgcgcgaggcactttccagctatatctaccgcaagaccaagcgcagcccgatgatcctgcctatcctgctggaagtgtaagaccaccccaaactgatgtgaaaatgtgagggatttgccatgaagcaaaagcaaggcctggatctggcagcggtcatcctgctgctgctcattgcctgcgcggctttggccgtgccggtggcgttgctgtcgcccaaatggctcattgccccggccgtgctggtcgttgcagcgctgggcgtactgtggtatcagcgccgctgtctgcgcacctttgtggccaaaaacctttgcagtacggactttgagaacagccgcatccagtacagcctgaccggcctgcctatccccacgatgctgattgcagacggccgcgtgctgtggtataatactatcttccgggaggaagtgctgaacggcaccgatgccgtgactcggcccatcgaccggcttttcccggaactggaccttgcggtctgcagccgcccccacggtcaggacttgaccgtagggaacaagcggttcacggcctacgcaggcgccgccaagggcagccgcggggccaacatcgtctaccttgtggacgataccgtttataaacaaacgctggaggaatacaccgccagccgccccgcctgtctgatcatcgtgatcgacagctacgatgaactgttcgacgacatgaaggacagcgagcaggccaaggagctggaagctatcaacagtctgctggaagcgtacatcggcaaaagcaccggtttcctgcgcaagatctccaatagccgctacattgcggtagtggaggaacgcgacatccactggatgctgcaggaacggtttgaaattcttgaccaggtgcgcgcgctgcatcccggcggctttaccacgctgtccatcggcgtaggtcacggcggcaagactttgcaggaatgtcaccagatggcccgtgagagcatcgatattgccctcggccgaggcggcgaccaggcggctgtcaagaccgtagacggctttgaattctacggaggtatctcccacggtgtcgaaaagcgcagtcatgtgcgcagccgcatcatcgccaacgccttgtgcgaccttatcaaaaagagtgacagcgtcatcattatgggccaccgcatgagcgacctggatgccatcggctcggccatcggtgcgctgcgcatctgcaagatctgcggcgtcccggcggtcatcgccgtcaacagcgacgccaccctggcaggcccgctgctgaagactttcattgatgcaggcgagggacacaacttcatcctgccggaccaaaccctggacgttatcacgccccgcacgctgctgatcgtggtggatacctaccagaagcgcctgctggaaagccagaaaatctacgaaaagtgcaagcgcattgttgtcatcgatcaccaccgcatggcggtcggccatatcgacaacccgctgctgctctaccacgagccttacgcctccagtgccagcgaactggtgtgtgaactgctgcagttcctgcccaaagaggataacatcaccgcgctggaagcccaggccttgctggccggcatcatgctggacacccgcagctttgcgctgcatgtgggcgtgcgcacctttgaggctgccgcctggctgcgcagccgcggcgcccagactgccgataccaagctgctgttcaacacctcgaaagaggagtacgaggcccgcgcccacattgtggaaagtgcctacatttacaaaggctgtgccatcgccctttcggaggagctggatgctggcatgaacgtagtgctgcccatggcggccaacgatctgctgaccatcaacggcgtggacgccagctttgtggctgtcgccaaaaacggcggcgtcaacatctctgcccgcagtatgggcgccttgaacgtgcaggtcattctggagcccttgggcggcggcggtcatttgatgatggccggtgcccagctgcatgactgtaccctgcaggatgccgaaacgcgcatccgtgaacaaattgacatttaccgcgccgcccaggctgcccagcaggacgcggcacggtaaaaatagagacatacggagggaatctatatgaagatcattctgaaacaggatgtcaagaccattggtaaaaaagacgagatccatgaggtttcggacggttacgcccgcaactttctgttcccccgcggcctggctgcccccgcagacgccgctgccctgaaccaggcccgcaccaagagcgaggccaaggcccaccatgaggcagaagcccgcgcggctgccgaggagctggctgccaagatcaagggccaggtcgtcaccgccaaagtcaagggcggtgcctccggcaagctgtatggcaaggtcaccggcaaagaagtcgctgaactgctgacccagctgaccggcaccgagatcgacaagaaaaaagtcgagctgccgtccgctatcaaggagtttggtagctatgacgccgctgtgcgcctgtatgccggcgttgtcgcaccgttcaaactgaaagtggaagaactgtaaagccaaccaacttcacaggcaaaaggaggggagtctgccatgccgagaaatgaagaattgagcctgtccagtctgggcatccagatgccctacaacatgcaggccgagcagagcgtgctgggcgccgccctgatggatgaaacggtgctgaaccgcctcatcaccgatatggaacctgaaatgttctattcggatcagaaccgcgccgtctacgagacgatgcgctctctttacaccgagagcgaagccgtcgacctcatcacgctggtcaacgccctgggcaacaacggcacctttgccggtgcagacgatgccaaggtctacgttacccacctggccgagacggtcccggctatctccaacgtcgattcctacttaaagatcgtccgggaaaagtaccaggcccgccgcctgatcgaagccgcccgcagcattttgagcgagacatcctccggcgaggatgccgacatgctgctggaaagcgccgaacagaagatttatgacatccgcagcggccgcgataaatccggcgtcaagaccatccgggaatccatcctggaagttatcgacaccatgcagaagctgagcggtgccgaccgcgacaagttcgccggcatccccacgggcttcaactacctggacaccgtgcttaccggcctgggccgttcggaccttatcattctggccgcccgccccggtatgggcaagacctccttcgcgctgaacatcgccaccaacgtggcgcgtcagcagaaggttccaaccatcattttcagcttggaaatgacctgcgaacagctgaccgaccgtatcctttccagcactgccaacatcgacagccaggcattccgtaccggtcgtctgaacaactccgactggaacgattttgcccaggctacgtcgcttttgtataacgcacccatctatatggacgattcctccggcatttcggtgccggagatcaaggcgaagatccgcaccatcaaccaggatcccaaaaaggaaaagatcggccttgtcatcatcgactacctgcaattgatgcagagtgccaagcgcactgagagccgcgtgcaggaaatcagtgatattacccgaaacctgaagatcatggccaaggaactgaacgtcccggtcatcgctctgtcgcagctttcccgtgcagcggaaaagactaccggccgttcggaccaccgtccccagctttccgacctgcgtgattccggctctatcgagcaggacgccgatgtcgtgttgttcctctaccgtgcggcctactacaactcccaaaacggcgaggacagccaggccaacgagaacgaggccgagtgtatcgtggcaaagaaccgtcacggtgagaccagcgttgtacgcctgggctgggacggcgcgcatacccgcttcagcaacctggatgtgagccatgagtactgacgcggaaaaaactgtacagtgtatcgaggagactctgttggcctactgccgccagcagggtctgttcaagtctggcgacagagtcattgcagcctactccggtggagcagactctatggctttgttgctttttttgcttcggcggcgcaaagacttggccatcgaagtgctggccacccacgtcaaccacggtatccgcggtgcgtcggcccgggctgacgccaactttgtcacggcgttctgccgccggaacggggtagaactgttcctgtatgatgccgagaaagagggtgtgcccatcccgccccagcccagtgaggaatgggcgcgggagctgcgctatacctggttcgaccagctggccgctcgggaggaagcgctgattgccacggcccacacctgctctgaccaggcggagacgctcttgtttcgcatggcgcggggaacaggcctgcacgggctggcaggtattccgccctgccgtggcatctaccgccgcccctgcctgtgcctgacccgcgccgataccgaggcatactgtgccgcccttgggcaaaactatgtgcaggatgagaccaacgccgccgacctttacgcccgcaaccgcatccgccacacggtggtgccggcgctgcaaagcgtcaacccggcggcggagcaggcaatcgcccgcctgtgccgccagatgcgggcactggatgattggctgaccgccgaagcagctgcgcttttgcaggcggctgctgtgcagggcggctatgaggtcgagaccctctgccgcgcccgcggcccggtgctggatgcagcgctgcatgcgcttatcagccctgtgcgggacgccgaagaaaagtatgtaaaccttctgcgcttccttgttttgcagcgggaaggtgccctgcaattgacgccggaagtgacctataagatcaaaaacggcgtactgctgcgcctgaccccgcagggcataaaaccgccgccggccccgccgcagccccttagcgagggcagttttagccttccgggtggttattttgtggaatttcggcgcgtaaagtatgaagaatttctaaaaaatcaaccaattttcaaaaaagacttaaactgttgtgcggattgtgctaaaatacaagggaatgttatgctgcgcacacggcagccgggggacagtttccgcccggctggtaggcatgtacgtaaaacactcaaaaaatattacaacgaactgggcgtcccgctggatgagcgggcgctgctgccgctgctggccagcggcagtgaggtgctctggctctggggcagcggctttgccgaaggctgcgcccccgatgcgtatacgcatgaagtgctgacggtgaggacggaaaaaacaggggaggcataaattatgcagagtgtcatggatcgggatattgaccatatcctcgtctcggaagaacagctcaagacccgcgtggctgagctgggcacgcagatcagcaaggactatgcaggcaagaatctgctgctggtctccattttaaaaggttcggtcgtctttatggcggacctgatgcgggctgtcagcatcccgtgcggcatcgactttatggtcgtttccagctacggcggagccaacacgtcctccacgggccttgtcaagatcatcaaggatctggacgccgacctctccggtaaagacgtgctgatcgtcgaagatatcctggacaccggcatcaccctgtctcacctggtgccgatgctgaagatgcgcaaccccaacagcgttaagctctgcaccatcctcagcaaacccagccgccgcaaggcggacattgagccggattactgcggctttgaagttcctgatgagttcgttgtcggctacggtctcgactatgacgaaaaatatcgcaatctgtcgtatgtcggtgtcctcaagccggaagtgtattccaagtaaagcccgggtgggcgtaaaatcgtccggcctcgcgccggattttaggagttgatttcttgcagcgcaaacctcgtttcagcggcatcctgctggttgccgtgctcatggtagtggtactgcttttcgtaagtctctcgccgctggtggcggcttcggcttccaagcatgtcaattactctgacatctactattatttccagaatcagcaggtgacctcttaccggctggaccgcaacaccaacgtcctggagatgtggcttaaagagggcaagatgcctctgccggaggatacgtcctccacggcagatctgccgtctggcggcttgctgaccaacctcagcggcagccaggacaatgacgacgaactgcccgccaacggcggaaccgtctacgtcagctataagctgccctacggtggcgacttcaacaccggtaagatcaccgagtttgtggacgcctacaatgaggccaaccccgacgccccgatgatcttcgactacgtggccgtcaagaccagcgtgccctggctggagatcatcttctactcggtcatgctgggcagcgtcggtatgctgttcatgtcgatgtaccgtggcggtgcgggcggcggcatcatgaatgtcggccgtgccaaggtcaaggaccagcaggagagccagcgcaaggcgaccttcgctgatgtggctggtgctgatgaagaaaaggaagaactgcaggaagttgtcgagttcctcaaggctcccggaaagttcaatactttgggtgcacgtattccccacggcgtgctgctggtgggccctccgggtactggtaaaacgttgctggcccgtgcctgcgcaggcgaggcgggtgtgccgttctacgccatctccggctctgactttgtcgaaatgtacgtcggtgtcggtgcctcccgtgtacgtgacctgtttgaaaaagccaaaaagaccatgccgtccatcgtctttatcgatgagatcgatgccgtgggccgccagcgcggcgccggtttgggcggcggccatgatgaacgcgagcagaccctgaaccagctgttggtcgagatggacggcttcgatgccaacgatggcgtcatcgtgatggctgctaccaaccgtgccgacatcctggataaggcgttgctgcgtcccggccgttttgaccgtcaggtctatgtcggtttgcccgatgtaaagggccgtgaggagatcctcaaggtccacaccaagaacaagcccctcggccccgatgtcagcctgaagaccattgcacgttccacggctggtttctccggcgctgacctggaaaacctcgttaatgaggctgcgctgctggcagcccgcaagggtaagaaggccatcaccgagccggagatcgaggaagcttccgtcaaggtcatgatgggccccgaaaagaagagccacgtggtcaccgacgaggagcgccgcctgacggcctaccacgagaccggccacgccatcaccggctacttcagcaagcaccatgacccggtgcatcagatcagcattatttcccgcggcggtgcaggcggctataccatgtacctgcccgagaaggaccccagctacgttaccaagaccgcgatgtttgagaacatcgttacctccctgggcggccgtgtggctgagcagctggtgttggaggacatctccaccggtgcttccagcgacctggagcaggccaccaagactgcccgcgccatggttacccgttatggcttctctgagcggctgggccccgtggtctacggcggcgatcccggcgagactttcctgggccgcgacttcggccagggcaaaggctactccgaggcgattgcatccgagatcgacaacgagatccgcgacatcgtggatgaagcctacgagacggcccgccgtatcctgaccgaacacatggccgaactgcacaaggtctcggccgtgctgatggagcgcgagaagatcagcggcgaagagttcaagaccctgatggagggtggcaccctgccgccctatgacctggccaacggtaagaccgccgaaccggcagcacctgccgtccaggccgaacagccgaaatccgatacggatgccgagcaggttacggaccagcccgacgtgcaacagtaaaaagtaggtgtgaaccatggatcagaatttttccttgatggcgcagtcccgcgccaactattatacggccggcagcccggtccagtttgttcgcgtagaactgctgaaaggtgacgtcaccggcgaagttgcggtttgcctgaccttcaaaaacgtcggcactgagccgctgaccggtctggtcgtccatttcaaatgtaaggacgccgcaggccaggtcctgtgcgaggacgatttctattacgagcagctcaatgcccagcctggcgaggtctttggcagtgacgatgctgtctatgtcagcgatacgccggtctccagcgtggaggtcgagcaggaccgtgcgttcctgaacggccgcggcgtcgacctgcgcgcctacaagcgcgtgcgcctgcagctgccccgtgtgctgcccgcttccattgcccgcaccctgcagaaccgcaccggcaacgcccagctgacctgcgtgccgcaggataacgagtacggctggttctgcgcctgcggtgcattccatcccaatgaggaaaacacctcggtctgctcggagtgcggcggcgaccgtgcccagatcaaagcgactctgaccaacatcctggaggacgcccgccgtgcggccgagcgccagcagcaggaaatcaatgccgtggcccagcaggctgccccgcagcagcccgtggccgctaaggctgatcccgccgccaccgctgccgctgcccaggctgccatcaacagccagatcgaggatgacgccggtgctaccgccgcctacgaccccaagagctttgccgcccacgacgaggaacaggacgaggaggacgagcgcgtccgccgctacgcccccaagggccgtctgtttgccgatgatgacgacgatgacgagggcacccagatgtacgacaccgacgagctagatgacgatctggacgacgatgatgacgaggattacgcccctcgcaaaaagcgcggccgctatgccgacgatgacgaggtgagcgaagacgatgagatggccgagcgtatcatccactgggccccgccgatcactgccattgtctgtgcgctgatcattgcggtctcgctggtctatcatttcgtcctggcgtaaaatacggacataatgaaagcacggtgctccacgcagagcaccgtgctttttgcgtaccagcatttgtttacaatttggcaatggataccgccccactgctgtgctatactattcaaaaataagaagggagccaacgcttatgtgtacggcagcatcctaccggaccaaagacctgtactttggccgcaacttggattatgaattttcttacggggatgaggtgaccatcaccccgcgcaactacccgttcacgttccgtcgggcgggggagatgcgcacccactacgccatgatcggtatggcctatgtggccgaggagtatccgctctactacgatgctgtcaacgagaaaggcctgtgcattgcagggctgaactttgtgggcaacgccgcctgccagtcggaaacggacggaaaggacaacatctcggtgtttgaactgatcccctggctgctgggccagtgcgccgatttgaacgaggtacgcgccctgttggccaagctgaaccttgtggacatcccatttaacgcccagctgcccacggcaaagctgcactggctcatcactgatcgcaccggcagcatcacggtggaggccgtggccgacggcctgcatgtgtacgagaatcctgtagaggtgctgaccaacaacccgccgttcccgcagcagatggccatgctggccaactaccgcgccctcagcccccggaccccgaaaaacactttcgctcccggcgtggatctgccggaactcagccgcggcatgggcggcatcggcctgccgggcgacctttcctcgatgtcccgctttgtcaaagtggcctttacccggggtaactcgaaatcggccgacgacgagatgagcagtgtcagccagttcttccacatcctcggctcggtagagcagcagcgcggctgctgtgagctggatgacggcaagtacgagatcaccctctacacaagctgctgcaacgccgatacaggtgtctattactacacgacctacgataacaaccagatcaccgctgtgtccatgcaccacgaagatttggacggcgtggccctcgtgcattatcccatcatccaaaagcagaacattttctgtcagaactaaaagtaaaccgaaaacgtcccgcggccttgccaagcaaaagcaaagctgcgggacgtttgattttataagaaaaatgtgtaaggtttagtcaagctcaatgccgcaggcacgcagggcacgttcaaaagacttggggttcttgtacaggatgccggtgatgcccaggttgtaggcggcctgggcgttgaccttattgtcatcgatgaagatcgactcgtcatacgccaggttgcaggtctgcatcagggtggtatagatggccggttccggcttgcacaggtgcacctcacaggaggcaacaccgccgtcaaacagtgagaaccattccctctggcgcagctcgtccataatatccgctgggatgttggtcaggtagtacaggcggtatccggcggctttcagcttttgcatggtgtgcacagtggattccttcgtgcgcaggatggtgggccactcgtcgatgacggtctgcacctcaaatacgcggttgacgcgggcggcgttttccagcatcgcagcgttgccctcttcacgggtgatggtgccgcggtccaggtcctgccactcctggctgccaaaggtcagctcgtacacaatttcctcggcgcgtttgttcataaagtggtccatcagaaaatctttgggattgaattgcacgaccacgccgccgaaatcaaaaataatatttttatacataaaaccctccgcaaaagagaagtattgattccttacttggtttctaagtatatcagtataccataaattcaccgatttgtccaagaaacaattccacccttaccgcatacaataaagcggcgaaaaatcgcacaccaaagggggagtggaccatgacgctgcgtgacctggcccggaaggatgtgatacgcctttccaatggcgaaaacctgggccgcatcgatgatattgagtttgaggaaaaatctgcccgccttaccgctgtggtgctgcatggtcgcagccgctgcctggggctgttgggaagcgacgatgaccttgtgatcccgtggcagagcatcaaaaccattggcacggatgccgtgatggtggagcctgacccggatgcagacctgcaccgccaccgataaaatcgtataatttatgtaaaacctgcgaaattcaagtgcaattatctgtacagtatgctataataaacagaactacagtatcgtgggggaaaatgtatgcaaaaacagcagcctaaccgaaaagtactgctgtttttggccacactggcggtgctggcaggcattgtatggggcgcgttattcttgattgccccgatctggcagcccggcacaccagtcgcgtatatgccggcactgccgcagacggaagccgccgccgagagtgcgccgacacagctggtggacctgaacaccgccgatgccgaaaccttgcagaccctgcccggtatcggcccggccaaagcggcagccatcattgcctaccgggaagagcacggcccctttgcggcgctgcaggatgtggccaatgtccccggtatatcagagcaaatgacagaaaaatgggcaggcctggcacagacgggaacgcccgccgaaaaggcaccataaatagggaggaatcaccttggaaaagtccgagagcatcttcatcaaccgtgagctgagctggctggacttcgacagccgcgtgctggcgttggccaaagaaaaaactgtgcccctgggcgagcgcctaaaatttgccgccatcttcggcagcaatatggacgagttcttcatggtccgcgtcggctcgctgtacgaccagacgctggtgaaaaacaacaagaccgataacgtcacccacatgacggcggcggagcagattgctgctatcacgccccgcgtggccgagctgcaggcaaagtgcgacaaatacttccagcatcttgtcactgctctggcgcaggagggctaccgcaaggtggactttaccaagctcagcaagcagcaggagcatttctggaaagcttatttccagcgcgagctcctgccgctgctcagcccgcagatcgtggattcccgccatccgttcccgtttttgaacaacaaagatatttactacatggcccagctgcgcagcaaaaacgacggcgtttgctacggcatcgtgcccgtcagcagccagtttgagcgcgtgcttttcatcaaggacggcgaggagacctgctttgccttcgtggaggagctggtcgcccactatgccgctaccatctttgcaggcagcagcgtgcagaagcagtgcctcttccgcgtgacccgcaatgcggatattaccgtggacgagggcatgatggaccacgacatagacttccgcgatgtcatgagcgacctgctgaaaaagcgccgcaagctggcggctgtgcgcctgcagttctggccggacgctccgcaggagatcgtcaagttcctgcgggagaagctggtcgtcccggcggaccgctgctatgcccagacctcgccgctggataccggctgcctgttcaaactggccggccgcatctccggcgacggcagccacaacgccatgttctacccgccggccaagcccatgcaggccccggcagggtacgacctgtacaccgaggtccgcaagcacgatgtgctgctggcctacccataccagagcatccgcccgttcatccgcatgctgctgcgcgctgcggcggacccggacgtcgtctccattaaaatgacgctgtaccgcatggccagcgactctcagatcgtcaatgcgctgattgccgctgcagaaaacggcaaggaagtcgtggccatggtcgagctgcgcgcccgctttgacgagcagaacaacatcgactggtccaaacaactggaggatgccggctgcacggtattctacggctttgacgattacaaggtccattccaaactgacgctcatcaccagccgcaaggatggcaagtacaaatacttgacacagatcggcaccggcaactataacgagaaaaccagcgagctgtacactgacctgtcctttattaccacccgccaggaaatcggcgaggaagccagcgcagtgttcaacaacatggccctgcagcgtctgaccagcgaggccgacaccatgctggtagcgccgttgcgcttcaagagtgtgctgttggaggagatggaccgacagattgcactggccatgcagggcaagcctgcctcgatgatcctcaaaaacaactccatcaacgacccgcagatcattgataagatcagcgaagccagctgcgccggggtgcgtgtagacatgatcgtccgcggcatctgctgcgtgcgcgccggtgtgcccggccgcaccgaaaatgtgcacatccgcagcctggtgggccgttatctggaacattcccgtatctactgcttcggcagcggcgagaatatgcgcatctacatcgcttccggcgacttcctgacccgcaacaccgagcgccgcgtcgaagtcggcgtgcgggtggacgacccgactatcgccaaaaagctgcgcggcattttggacttacagctgcgggataccgtcaacgcgcgggaaatgcagccggacggcacctacaccaaggtcaagcccgccccgggccagccgccggtggacagccagatggccatgttcggctatttccagaacggctttgagcaggccaccgaaaagtctgctcccgccgtaaagcccgtgactaaacgtgcggccgccgcagcccaacccgctgtgcgtgcccgcaaggccgccgccctgcgcccggccaaaaccggccttttgcaaaatctctttggccgtaacaaaaagtaaggagaacccaaaagtatgaaaacctgtgtagtgaccgccaattacagctgcgaccccaacaaggtgtggctttacctgaccaagcccaccctgaaccactggcgcagcgacgtgagtgagtacgaggagagtgacgacggtctgaaaggtgtcgagcataacaccgacggcggcacgaccgaaatcgtttttacccgcaaggacaaggcccgccacctcagctgcaacttccgcaagggaaagatcaacggcacctttaccgccatcctgatgggcggcggcgactccaccagtttggagtgcacgctggacgtagacggccttggcctgttcaccaaaccccagaagctgctggatgagcgcctggaaatgctgcgcaaagccctgggcgtataatctgtaaaacgtaaaacggcggcgagagtttgtgcctaacgcatggactcccgctgcttttgtattgctgctctatttggctccccgcctgcatacaatctggtaaaaggaggtggggaccatgtgggaaaatgccgcaccgcaaagcgaaagccagaatccgccgcccccgcgtccagcctgtgaaaacgggggagacaccctgctgtgggggcagatgcttttttgtacggtggtgctgctggtggcgctggccgcacggatgatgggcctgccgttttacccggaactgcgccgcacctttgcccaggctatgcagccggaacaggactttttcctgagcacagagcgttacttctctaaatttacagagaaagccgccgctgccatcgcccaggctctgcccgcaacgtcggaaacagcccgccagccccgccgcaaaccccagcctcccgccaacgcgcgtgaggaaagttacacgccaaacttcccgctgctgttcccgctgcccggcggttcctgtacccgtacctccggttacggctggcgcaccgaccccatgggcggtgggggaacggacttccatttggggcatgacctggctgctgctaccggcacgccggtgctggccgcagcagacggcgtagtgcgtgtagcgggcaagcatgccagctatggcaactacctgcgcattttgcacgcggacggtgacgagaccctttacgcccacatgcagtatctcttcgtcagcactggggcggtggtcacggcggggcaggtgctgggcgttgtgggcgagaccggcaatgccaccggcccgcacctgcattttgaaattttgcacaaagggctgcgctatgacccggcacaggcgttacaggatgcggcgtaaaacgcgcctgcggctgcgcgccccggcggtaacactgtttctgctggcctgcctgctgtcgctggacggcaccggcgtgctgcgcacagggctgctgtgcgccatcctgcacgaaagtgcccacgccctcgtgtaccgcaaactctggcaccgctggccggatctggcgctgtcgcccttcggcatttgcttacagcttcgcggcgtgccgatgacacccgaagaagaactgcggctggccgccgccgggccgctggcaaacctgctggcctgctgcacggtgcttttgtacatgcagacggcgggacggtacagctacggcggctactggtttgcctgcaccaacctgctggtgggcggggccaatctgctgccgctgccggggctggacggtgcgcacattttacatggaatgttttacagccttgacaagcggcaccgaatatgataaagtgaaacctgttaaatgcaatgaagggaaccagtacgcagcctttcctgttccagagaagccccggtcggtgcaaggggtcaacagcaggtatgccgaatacatcccggagcagcaggctgaatcaacagtaggccgtgccgtgtacgcacgttacagcgtttgggtgtacgcagccctttgtctgccgcacccgcgaaggcttgccgccgcgaggggcaggcaaacagaggtggtaccgcgaactttcgccctctgccaaatttcacatttggcaggggcttttatttttgcccttgccgcaacaaacgggaggtaaattccatgacgatttacgacgaactgaaagcccgcggcctgatcgcacaggttacggacgaagaagaaatcaaagaggtaatcaacaacggcaaggctacgttctacatcggctttgactgcacggccgacagcctgaccgctggccactttatggccctgaccctgatgaaacgcctgcagcaggcaggcaaccgtcccatcgctctgatcggcggcggcaccaccatgatcggtgacccctccgggcgtaccgatatgcgcaaaatgctgaccaaagaggacatcgaccataacgccgagtgcttcaagcgccagatggagcgctttatcgagtttggcgacggcaaggctatgatgctgaataacgccgactggctcctgaacctcaactacatcgagcttctgcgcgaagtcggtccctgcttcagcgtgaacaacatgctgcgtgctgagtgctacaagcagcgcatggagaaaggcctgtccttcctcgagttcaactacatgatcatgcagagctacgacttctaccacctgttccagaattacggctgcaacatggagttcggcggtgacgaccagtggagcaacatgctgggcggcaccgagctgattcgccgtaagctgggcaaggacgcctacgccatgaccatcaccctgctgaccgactctcagggcaagaagatgggcaagaccgccggcaacgctgtttggctcgatcccaacaagaccagcccgtttgagttctaccagtactggcgcaatgtcggcgatgcagatgtcctcaagtgcatccgcatgctgaccttcctgccgctggagcagatcgatgagatggatcactgggaaggtgagcagctcaacaaggccaaggagatcctggcctacgagctgaccaagatggtccacggcgaggaagaagccgagaaggcccaggccactgcccgcggcctgttcagtggtgatgctgaccacgagaacatgcccgcaacccagctggatgcttccctcgttaaggacggcaccgtcggtctgctggctgccatggtcgccgctggcctgtgcggctcgaaccgtgaggcccgccagctggtccagcagggtggtgttctggtggatggcgagaaagtcactgacccgaaggctgccctgaccgtcgaagcgttgaacaagggcgttgtcattaaaaagggtaaaaaggtctaccacaaagtgaccctataatacgcaataaagcaggccgctgccgccggagacaccgtaagttcccggggcggcggccctttttacaggaattacacagattacttgcccccattgcagatttgggatataataagggcagtcgttgaatttgtagccggaggaaccccatgcctaaagataagctgaaaacgatctacgtctgcaaccagtgcggcgagaccagcccccggtggatgggccgctgcccctcctgcggggcgtggaatacgatgaccgaggatgtagtggcggaaccgaccaaaagcagttcccgcgccgcagcccccgtccgcgtgaccggtcagacgagcctgacgccccaaaagctgaaaaacatcagcaccaccgaggagaaaagccgcatcgtcaccggcatcagtgagctggatcgcgtactgggcggcggcatcgtcatcggcagcgttacgctcatcggcggcgagccgggcatcggcaaatccacgattttgctgcagctttgcggcgaggtcagcaaaaccaaaaacgtgctctatgtcacgggcgaggaatcggtgcgacagatcaaactccgcgctgtgcgtctgaacgtgcctgaggacaacgtttcgctggtggcagaaagcgacgtggacgagatctgcggtctgatcgaatctatgaagccggacctcgtagtcatcgactccatccagacgatgcgctgcaccgatatttcctcttcggctggcacagtcagccaggtcaaggaaagctcggcccgctttttaaatgtagccaaaacgctggaaattcccaccttcatcgtgggccacgtcaacaaggatggcgccatcgcaggccccaaagtcatggagcatatcgtggatacggtgctgtactttgagggcgacaagaccctgccgtaccgcgtactgcgcgcggtcaaaaaccgctatggctccaccaacgaaatcggtatgttcgatatgaccggccgcggccttgcccagatcgagaacccctcccaggtcatgctggagggccgtcctctgggaatcagcggtacatgcgtggcctgcgtgatggaaggcacccgcccggtgctcagtgaagtacaggcgttggccaccaagaccagttttcccagcccccggcggacggccagcggctttgactataaccgcatgtacctgctgctggcggtactggaaaagcgcgcggggtataacttctccagccaggatgtgtatgttaacatcattggaggcctgaagctggacgagaccgcctgcgacctgccggtctgtattgcgatggcatccagctttttggacctgccggtgggtgaaaagaccatcgctatcggcgaagtgggcctgggcggggaagtgcgcagcgtgacgcacctggagacccgcctgcgggaagcccagcgcgtgggctttgatacagccatcgtacccaagcacaatttaaaaatgatcgatccggcccagttcccgggcctcaagctggtgggtgtctcctacctgcgtgaagcgatcaacacgataaaattaaagtgaggagaaaaccatgcctgaccagaatcaacccaaagcaccggcgttcaacccgaagctgaaagatgccatcgtagcgctgaaagccgaaaacaaccccaaaaacctcaatgccgttctcaacgagctggtgcgctctccgctgctggcaccggccaactttgacctgcagggtcagtctgcccctacgcccggcccggatggccgcgtgcagttgccccccaacaccaaaatcaacctcatcatggtcaacagccccgagggcaaacactactacctgggcttcagtgattgggacgctgtacatgcatggcagaagaacccggagcagggccgccaggttatcatgctgcgctttgatgatttcgccaatatggtctcgaagaacccagatgcctccggtatagtcatcaaccccggcgagaacagcctgcgcctggagaagccactgatcgagtccgtcaaaaagcagagggacgaaatcgccaaggccctggcccagcagcgcgccgctgtcacccagatcaagccgggcgacaaggttaccatcgtggaacccagcgtcctgccggacgagctggccgaccctatctgcgaagttctggctcaggctcccggcgtcggctctgcctacctgcagatcatgatcatcaacgatgaggccaagagctacctgctggtgctggacggccccaaggatgacaagttgtttgccgccgttgccaaggcagcccgcccctatctgatgggccgagagaagaagatcgacctgaatatcaccacgtccatctctccgctgggccagcagggcatgcgcggcagtgagccgttctaccgcaagggcatcggtcgcatcatggacgaggacgacgacgaataatcctgtttgtacatagcaatgaaaactgcacacccgtaaagcgtgaaaactctgcggacgtgcagttttttattcggattttcttgcatcttggctgtaaaaatagtacaatatacaatatatgtgtttgtgcatctggcacaggaatccgaaggtatgaggtgtaggatatggttttgagcatgacaggctacggccgcgccggcgcactgctgcacgggcgtgacattaaggtggaactgcgcagcgtcaatgcgcgtttctttgagtattcttcccgattgccgcgctcctgcgcgtttctggaagacaagctgaaaaagctggtggcttccagggtcagccgcggcaaggtggaattaagcctttccatccagacggtcaccgccgccgataccgtggtgtcggtcaactggcagctggccgagggctaccgcgccgccctgaacgagatggtggagcggatggacctgaaaaacgatgtctccgttggtatgctttcgcgttttcccgatgtgctgacccagactgctgcccccaccaacgaggaagaactctggcaagatgtgcagtcggtggctgaaaaggccgtggatgcctttgtggctatgcgcgccgtcgagggcgaaaagctgaaagaggatgtggcgggccgcctcgataccatcgagacgctggtcggccagatcgaggaaaacagcgcaggccgtgtgcaggcttacagcgataagctctacgcccgcctgcaggaactgctgagcgaccgcaacatcgacgaaagccgccttgttactgaggctgccatctttgccgataagaccgctatcgatgaggagaccgtccgcctgcacagccatgtggcccagtaccgcgagatcttggccctggatgagcccatcggccgtaagctggactttttgacccaggagttgaaccgtgagtctaacaccatcggctccaagtgccaggatgtagccatcacccgcctggtggtggagctgaaatccgagattgagaagattcgcgaacagatccagaacattgagtaagcgggggcatccatgaaactgatcaatatcggctttggcaatatggtcaatgcagaccgcgtcattggcatcgtcagcccggattcggcacctatcaagcgcatggtgcaggatgcccgcgagaagggcgctttgatcgatgcttcctacggccgcaggacccaggcggtgcttatcatggactcggatcacataattttgtccggcatcccgctggaaagtattaccggccgctttgcccaggaagaagaaagctgaaagggagtatagagtatgaaaggtgaaaagtatctgtttgttgtctctggcccgtccggcaccggaaaggacaccgtcgtggcaagcctgctgaaaaaacacccggagatccagcacaccgtctccgccaccacccgcaccccgcgtgagggcgagaaggacggcatcaactaccatttcatgacggtagctgatttcgaggatcatctggcccatggccagattgtcgagcacaccaaatactgcgaaaactactacggtaccatgcgcagcgagattgagggccgcatggcactgggcatcccggtgattctggtcatcgaggtcgaaggcgcaggcaacatcaaaaaaatgtaccccggtgccaccacgatctttgtgctgcccccggatatggaagaactggagcgccgcctgcgcaaccgcggcacggaaaatgaggagaccatccagcgccgcttaaagcgtgccgagaccgagattgccaactccgtcaactacgacgagcatgtggtcaatgtcgaggtcgacagctgcgctgagagcatctactccatcatccagttcaagcttaagcacggcgctgccgaatgagtttgcagattgcccaggcggcggtagatgatgcgacgatccactttgataaactgtattcctactgcatcccgccgcggttaaacgataaagtctggcccggcagcatggtgttagtgccctttggccggggaaataagccccggatggcggtggtgctctcggtagcggagctgccggagggcgccgacacccaaaagttgaaaacgctgtacgatgccgccccggcggaagctcggctgacgccggacttgctggacctggtgcgatttttgaaagatcgcaccttctgtacctggttcgaggccgtcaaggcggttatcccatacggtgcccagtaccgtgctgtcgtgggaaacggccgccccgtgatgcagaaccggctgtcccgctcgaccgagcgactttacacgctggcaggggagctgcccgccaagccgaagcccggtccgcgtcagctggcggcgatggaagcgctgagcaccggccccaagacagcccgccagctggatgaggcaggcatctccaaggcaacgctggacaccctttgcaaaaagggcgtgctcacggtggccgagcaggataagtcgctggatcttttcgcggacattccgttcgacccgcagccactgaccctctccgaagaacagcagaaagcctttgcgacgctgctgccggacttggaggacgacaagccccacgcagcgctgctgcacggtgtgaccggcagcggtaaaacggtggtatttttaaagctcatcgaacgcacgctggaactgggccgccgcgccctggtgctggtaccggagatcagcttaacaccgcagatgatccgccgcttaaaatccacctttggcagccgcctggcggtacagcactcggcactcaacaacaccgagcggctgctccagtggcggatgatccagcaggggaatgccgacatcgtggtcggcacccgcagcgcggtcttctcgccgctgcaaaatttagggcttatcatcgtggatgaggagcaggaacacacctaccagagtgaatctgccccccgctacgatgcccacgacatcgccaaaaagcgcgctgtcatggaaaacgccctgctggtctttgcctcggccacaccgttgaccgagacctaccacgccgctcaaagcggcaaactgaaacttgttaccctcacccagcgctacggcggctgcccgctgcccagcgtggatttcatcgatatgcgcgccgagctgacggcaggcaacccccgggaggtcagccgccgcctggcacgcgagctgcaggaaaatctcgataatggggaacagagcatcctgctcttaaatcgccggggctaccgcaccatcggcatgtgcaccgattgcggccacgtgctgaaatgccccaactgcagtgtgccgctggtctaccacaaaccccagcaggcgctgatgtgccaccactgcggccaaacggtgcatccgctgccgacgctctgccccgagtgcggcggcaagatccactacagcggcttcggcacccagcgtgttgaggaagaactggcggaacttctgcccagcgcccgcattttgcggatggaccaggactctaccggcaaaaaaaacgcccacgaaacgatgctggcccagtttgcccggcacgagtacgacatcctgcttggcacccagatggtagccaaggggctggactttgaaaaagttacactcgtcggtgtgctgggcatcgactcgctgctgttcgggcagggcttccgcgcctacgagagcgtgttcagcctggtcacgcaggtcatcggccgcggcggccgcgccgcgctgcccggccgcgcactgatacaaacagccgtgccggatcaccccgttttacagctggccgctgcccaggattacgaggcttactaccgcgaggaaatcaccttccgtaagtttggcctgtatccgccgttctgcgcgttttgcgttattggctttgtgggggcgcaggagggggccgtgctcatcgcagcccagcgtttcggctcgctgttggcggaacgtgccgcccagcgccccggcctgccgctgcgcatcttaggcccggcccccatgaacattacgatgctgaacggaaaattccgttataagctgacgttgaaatgccgcaacgataccgcgttccgcacccttttgcgtgaaacactggatgcttacgccaaagaaaaactaccgcagaaagcgtccgtgatcgtggatttcaactccgacggtgatttataaaatagaacgtattgaaaacaattttggaggtattacccatggcacttcgcaccattgtacaggacggagacccgattctgaaaaaagtctgccgccccgtcacgaaatttgatgaccgcctcggcaccctgctggacgatatgaaagagactctgatcgccgccaacggcctggggctggctggcccgcaggtgggcatgatgcgccgcctgttcatctgcctggatgaccgtgacctgcccgaggaggtccccgctaactacgagtacaagttcatcgagttcatcaacccggagatccttgagctgagcgatgagcaggtggaactgtacgagggatgcctgtctttccccggccataacggcgctatcaagcgctccaagcatgtcaaggtaaaggcccaggaccgccacggtgagtggtttgagatggaggctgacgatatgctggcccgctgcatccagcacgagaacaaccatctggacggcatcaccatcatggacctggccgagcatttctacgaagacgattaccccgaagaaaacgaggactgatatcatgcgtatcctgttcatgggcaccccggatattgctgctgccagcctgcaagccctgctggacgccgggcacgaggtctgcgcggtatttacccgccgcgataagccggtgggccgcaagcagatcctgacggccccgccggtcaaacagctggcggtggagcgtggaatcccggtctatcagccctgcactttgcgggacggttcttcggatgacatcatccaggagctggccccggagatcatcgtggtggtggcctacggctgcatcattccgccgcagctgttgcatgtagccaagtacggctgcatcaacctgcatgtgtcgctgctacccaaataccgcggctcggcacctatccagtgggcggtgctcaacggtgactccgggaccggcgtttctatcatgcagctggacgaagggctggacaccggtgacgtgctgatggtcgagccggttgatatcgaccccgaggagaccagcggtgagctgtttgaccgcgtcagcgctgtcggtgccaaaacactggtcacggcgctggaaaagatccccgccggcgagctgaaactccaaaagcaggatgatgcccaggccacgctggccccgccgctgaccaaggagatggcacagttctatttcaccgaagacgcagcccatatccacaactgggtgcgtggtatgaacccctggccggtggcttggtttgcgcatgagggtaagcgcatcaaggtacaggagagccgcctggcggagaacccacagaatgcggcccccggcaccgtgctggcccttaagcccttgaccattgccgccgcaaacggcgcagtggctctgctgaccgttacgcctgagggaggcaagccgatggccggcaccgcctgggccgccggtaggcgcttaaaagcgggggaccgcctgtgacgccccgccgcctggccgtgaaggcattgattcaccaggaacaggccggttacgccaacctggtgctggatgccgaactaaaaaagtgtgacccgcccatgaacacccgcgacgccgcctttgcggcccgcatcttttacaccacgctggagcgcctgccgctgctggactatacaatcgaccgctacaccaaaaagccggtcgccaaactggacgccccggtgcgtgccgtgctacgcagcgggttggcccaggctaagtatatgcaggtgcccatgtcggcggcggtgaatgaatccgtccgactgacgaaagccctcggcaaaagcagcgccgccggtatggtcaatgccgtactgcgcaaggccgttgtaaccgaggtacacgaggacgattttgccaacccactgcagcgcttgggcacctattactgcctgtcacccgcggtggcaaagctgctgtataaccagtacggtgaagaagccttcgccatggccggcgtattttatgagcgcccggctacggccatccgcgtcaacaccctgcgcaccaccgacgaagagctgaccgatttgctgcacaccgagggccacagcgtccggcccggcccatggccccatgcgctgctggtggagttcaacggctcgcccgccgcaagccgggcctttgccagggggcttttccacgtgcagggcttggccagccagtttgctgccctctgtgtgggggcacagcctggccagaaagtagcggacctttgtgccgcgcccggaggcaaaagcctgacgctggccgagtgcatgcagaatcaaggggaactaatcagtggcgagtatgtggaatcccgcgtgccgctgctgcgcaaagcctttgcccgctgcggtgtcacctgtgccgaagccgtgcagaacgacgctgcccagctccgcagcgattggggcaaattcgaccgcatcctgtgcgatgtgccgtgttcgggtttgggcgtcatagccaaaaagccggacattcgctataaagatttggacgggatagagaatttgctgctaagccagcagaagatcctgcaaaatggcgcagatttacttgccgaaaacggccgattggtgtattctacctgtacagtcaatcgtgacgaaaacgaggaacaggtgaaaactttcctcgaaaataacccgcgtttacatgtggctgtccccgccttgcaactgcctggcatgcagcagggcgaatatggcacactgtttttgccgcataaaacggccactgacggattttttgccgctattttggaaacagaaagtacacaatgatcgtttataatagtaaagaagggaggaacgcagcatgagcgaagcaacgaagatttgcttatccgattttacgctggacgcgctgaccgcgtatcttgtcagcctgggccagccgaaattccgcgccaagcagatttttaaatggctgcaccagaagcttgtgacggatttttcccagatgaccgaccagcccaagaccctgctggcacaacttgcggaaaattgcaccatcgcagcgcccaccatccgccgtcgccagcaatccaaggacggtacggtcaaatatctgctgcaattggccgacggcaactgcatcgagacggttttgatgcgctacaagtatggcaacacggtctgcgtgtccacccaggtgggctgcgccatgggctgccgcttctgcgcctctacccaggcaggccgcgtgcgggatttgaccgcgggcgagattgcctcagaaatttacaccgcacagaaggactccggagagcgggtctctcacatcgttttaatgggcatcggtgaaccgctgcacaattttaacaatgtgatggactttttggagatcatctcctgcccggagggtgtcaacattggcatgcgcaacatcagcctgtccacctgcggcctggtgcccaagatcgacgagctggccaagcgccatttgcagctgacgctttcggtctcgctgcatgcgccggataacgtgacccgctccggtatgatgcccgtcaacgatgcgttcccgctggagcagctgatcccggcctgccgccgctaccagaaggagaccggccgccgcatcagctttgagtattcgatggtgcgcggcgtcaacgacagcgatgagatggctcaaaagctggccaaccttattaaaggcatgggcgcccatgtgaacctgattcccatcaaccccgtggacggcagcccgtactctgctacggacgacgccaacgtgcaccgcttccagcaaaagctggaaagcctgggcgtgaacgccacggtgcgccgccgcttgggcacggacatcagtgccgcttgcggccagctgcgccgcgaggatgcccagcaggccgaaaattgctgaaaactacggaaaggaaccaacctgaatgaagattgccgcaattactgacatcggcagctgccgccaggaaaaccaggataactactgcgcgcagcagctgccgggcggtaccgcctggggcattgtctgcgatggtatgggtggcgtcaatggcgggcgtatcgccgcgcacattgccaccgatacgatgcagcagtattttgcccgtcagatgcgctccctgcagccgggcggcgagaaaagctttatcatgcgcgggtttgatattaccaaccgcgccgtgtatgaaaaagccacctcggaccctgagatgatgggcatgggtacgaccggcgtttgtgcgtatgccggcggggggctggcgcatgtggtccatgcgggcgactcccgcgcgtatcttttccacgagggcgagatgcgtcagatcacgcgggaccactcaatggtccagcagttggtggacagcggcaagatcactcgggagcaggcggcccagcaccccaaaaagaacctaatcacccgggcgttgggtgtttcggccaatatcgtgccggaatataaccgctgcgagatcgaagtcggcgacattttgctgctgtgcagtgatggcctgaccaacatgatctcggatgaagagattgcactggtgctgcgggaagtcccgttctttgaggcccccagcatcttagtagatagagctttgcaggccggtgggcaggataacatcaccgtgctgctgatgggcgtggaaattacggaggtcaatcatggataatctcattggaaagcggctggacggacggtatcagatcgaaagtctggtcggcatgggcggcatggccaacgtctaccgcggcaccgataccaggaccggcaatgccatcgccgttaaggtattgaaagaggaattcctggataacgaggagctggtccgccgcttcaaaaacgagtccaaggctatttccatcttgaatcaccccaacatcgtaaaggtttacgatgtatccgtgacggaccgtctgcagtatattgtcatggaatatgtggacggcatcacgctgaaggagtaccttaagcagcgcggcggcgccctgacctggaaagaaactgtacactttgccacccaggtgctcagcgctttgcagcacgcccactccaagggcatcattcaccgcgatgtaaagccgcagaacatcatgctgctggcagacggatcgattaaaatgatggacttcggcattgcgcgcttctcccgtgcgcagagccagaccgtcagcgataaggccattggctcggtgcattatatcagccccgagcaggccaagggcgataagaccgacgcccgtaccgacatttactcagtgggcgttatgctgtacgagatgctctccggcaagctgccttttgacggcgatggcgctgtgtccattgccatcatgcagatctccgataaggccaagcctttggcgcaggtggcccccaatgtgcccgaagccctgtgccagatcaccgaaaaagccatggaaaaggacccggccaaccgctaccagagcgcccaggaaatgctggaagccatcgaggctttcaaacgcaacccctcggcccgctttgcgtatgagtaccgcaacacccaggacaacccggaaaggaatatcaaccgcgtggtaaacagcacaaaacctgccgcaaaatcggcggctggaaccaaggcagcggctaagtccggcagcaatatccgcaccggagaagcccgtcgtgtgggcacccagaaccccggccgcggcaaaaagaataagaagaaaaaaggccagaagcctttctctctgctgcccattttctttggcatggcggtcgcctttgtcatcggtgccgctatcctgatctatttgatcttcaccaactccagcaacctgcttttctccaaccgtaacgacgtcaccctcatcagcttcatcggcatgaccgaggatgagttccgcgcttcggagtataattctctgctgaaattgcagaaagaggaagaatattccgacgaacccgccggcaccatcgtcaagcagaatcccaaggccggccgtactgtcaaggagggccagaagatcaccttgaccgtgagcctgggcacccagtatattacgatccccgagacgaaaaacatggtggctgaggatgccgagcagaccctgaaagacatgggcctgcgcgtaaccaaaaagccgatggtggacgccaccgtcgcccccggcgcggtcatctacacccagcctgctgccggtgagaccgtcaccggtgactcgatggtcatcgtctacgtcagccgccaggacaagaacaagacccagcctgtgcccagcctgaccggtcgtatgctcgaagatgcccgcaacgagatcaagggcaagttctcggtccgcgtggtcgagcaggccagcgaacagccagccggtaccgttttgagccagagcccggccgccggttccgaggcccgcatcacatcggctatcacgctggtggtctccaccggtgtgcctgaagtcgtcgaaacgccgacggataccggcaacggcgatgaaggtgacagcactattgaagaaagctggtggcccagcgccgacggcagccaccagattcaccagctgaccgatggcacgatgtggaatgagaacggccagcgctgcgatgcccagggcaacccgctttgatggggaacgctatgaactatatcacaaaaggcatcggcggcttttactacgtaaaaacgccggatggcatcaaagaatgcaaggcgcgcggtatcttccgcaaaagcggcatcaagccggtggcaggcgattgggtagagctttccccggacggtacggtcatcgacgagatcaggcctcgcaaaaacgtgtttgtgcgcccgcctattgcaaatttggatgtgctgttcattgtggcaagcaccgtgcagcctgtgcccagtaccctggtgctggaccagctggcggcggctgccatttataaagatgtacagccgattctggtcgtgaccaaggctgaccttggcgcggcggatacgctggtgcaggcctacaaaaccagtggcatcccgctggtgcagctgaactacgagactggcgagggccttgacgagatcaaggcgcagatcaaagatcatctctgtgctttctgcggcaactctggcgtgggtaagtctacactgctgaacgctctggcacctgaattgcagcgggagaccggctccatcagccaaaagctgggccgcggccgccataccacccgcgaggtggagatatttgaaatctgcggcggccgtttggccgacacgccgggctttgccagcctggaagcccagaagctctgccgcatccccaaagaggacatccagcacaccttcccggagtttgagccttactttgggcagtgtcgcttcaccggctgctcgcaccgtgcagagaccgactgcgcggtgcgacaggcagttgaggaaggcaaaatcagcaaaacgcgctatgccagctaccttgccatgtacgaggaagccagcgccaggaaagaatgggaaaaataatgaaacacgcgatcctgctttcggccgtgccggtcgatgcagctatgaagcgctactgccgccccggcagctttgtagtagcctgcgatgccggctaccgcaattccgattgcctgggtgtgcgcccgaatctgatcgtgggggattttgattctgccccgcagcctgataccgacagcgataccattgtgctgccacacgtcaaagatgacaccgacacccactacgccgccaaatggctgctggaaaacggctatacccaggtcaccatgctgggcgccttgggcggtgcccggctggagcatacgattgccaacctttccactggcctgtttttagctgagcatggcgtggacgtagtgctggcagataccgccagcgagatccattatcttgtccccggcaaagaccttaccttgcagcgcggcgaatggcagtatctctcggtgttcccgtgggatggcaagctgatcggcgtggacattgagggggcgtattaccccctgcacggtgcagaactcgtgccggattatcctcttggtgtcagcaacgagtttgtagaacccaccgttaccctgcgttgccaggcaggccatggcatcgttgtgctgacccgcgccgattaaaggcacacatcccgcactgctgccatagtatggtttatacagtaaatcccagggaagggaggtgtaagccgtgcatgtagtggtggtacgttgtccccgcgcgctgcgctggctgctccgcgcagctttcaaagtgtaaaatatcctatgcctctgcccgttgggcaggggctatttttttaccctgccgcatatacatgcacaagaataccaaacggaaaggggtaaccagcatggaactgaaggtgtttaaggacacccttgcagcatacggcgggcggtgggagacacggcaggaactgccggtggaaacggaaattttgattccggattatcagccagctgtttttaagatcgtcaaatgcctgatgcagccggtggtgctgcaaaaccgggtagctagcgggcgctggcactgcgaggggtatctgcgctgcaccgtgtattatcaaagcgatgagcccggctgccgactgtgccgcaccgagcagaaatttgcctttgaaaaatcggtcgagctcccggacgctgcctttgccgaaggcccggctcaggtctggggcgagcaggaatactgcaactgccgcgccgtcagtgagcaccgcatcgacctgcgcggggcgtacatcctgtgtgccgcggcgctgatggtcaggaattgcgagctgctgacctcgctggccgattgcggcattgagcagcgcacacaagagctatccggcctgacccgcgtggccgccgaggaaaaggccctgaccagtgagatcaacctgccgctgccgggcacaggggagtccatcctggatatcggcggcagctttaccctgaccagcctgaccatgcagaccgggcaggccagctgccagggcattttgcaggtgcaagtttgctgccagccgccggaaagcgaagcgctggatgtccgcaccaaagagatgacggttcaacagaccatcgaccttcccggagcagccgagagcgaccagtgcatcgcctggggagagctgctgcactgcaccctgcgcacagaggatggtgcggcggatgcaagcctatcggttacatggaaaatgcacctggaactgtggcggctcgctgcccacaccgtggtggcggacgcttactcgaccctttgccaggcacagaccgtgcagaccgtctgcaagctgctgcaaaggaccaccgacctgaacggccatctgtccgtgaccgtagaggatgacctgcccacgcccgacgccgaagtgcgcggctgctttgtcacgctggaagcgccggtgcagattcctgaggaagcagccagcaaagaaaaagcaggagagacccgctgggaactgcagggcaaaggcacggcccatgtgttgtgtgccgacagccgcggcgaactgacctgttacgataaagcttttacctggcagccggaaggcagctggcagggaagtcccggcgatgcttacccctgcctgcatgccgatgtgacccgtctgaccagcggcaaaagcggtacgcggctgcgcgtagaaattgagctgagcataaccggctccatgctgcaggcccaggcccagcaggctttaagtgaggtggatctgggagaagaatttaccgatggcacagatggcccggcgctgtacctgtactatgcgcaggaaggggagcgcatctttgatattgccaagcgctaccacgcccgcgccaaagacttggccgccgccaaccacttggagaccggcggcaccgcaccccaggacctgaccaccgagagcacctgcctgctgattcccgccgctttgtaaaggaggaaacaccgtgacgcaagaacaaatctaccagaatattgcgcgccggaccggcggcgatatttatattggcgtggtggggccggtgcgcacaggcaaaagcacctttatcaagcgcttctccgagctgcttttgctgccgcatatccaaaacgaagcccagcgtgcccgcgccaacgatgaactgccccaaagcgccgcaggccgcaccatcatgaccaccgagccgaagttcatcccggagaaggcggtcaatatcgagctttccggcggcggcagcttccgggcacggcttatcgactgtgtgggctacatggtggacggtgccctcggccatgaggaacaggacgccccccgcctggtgaaaagcccctggtttgaccacgaggtgccctttgacctggcggccgagaccggcacacggcgcgttatccgtgagcatgcaaccgtgggcgtcgttgtcaccaccgacggcagcgtggccgacctgccgcgggaaaactactgcgaggccgagcgccgcatcatcgccgaactggaggccatcggtaagccctatgtcattttgctgaactgtactgacccggacagtgatgccgcccaccagctggccgcccaattgcaggatacctaccagcgggcggtcgtgcccatcaactgcgtagcaatgactgccgaagcgctggacggcattttgcagcggcttttgtatgagttcccgattcgagaaatcgccgtgcagatgcccagctgggtcatgatgctggaacccggccattggctgcaaagcgctgtatacactgccatgctgaaatttgccggctctgtgcacaaaatggccgatattgcaggcaaaaatctgccgttggaatgtgagtacatcaccaaaaccatgctgaccggcatggaccttgccagcggttcggtgcacattacggcaatgattgcgcctgatattttttacaaaattttgggtgagcagaccgggctttccatcgtggatgaagccagcctactgccctgtgtggtcagcctggccaaggcaaagcgcgcctacgataagatcaaatcggcccttgaccaggtggaagccaccggctacggcattgtgatgccgggtatcgaagagctgacgttggaagagccggagatcgtgcgccagggcgggcagtacggcgtgcggctctccgccagcgcacccagtttgcacattatgcgggccaacatccacactgaactttcccccacggtgggcagtgagcagcagggggaagaactcatcaagagcctgctggcagatttcgagaccgaccccggcaaactgtggaacactaacatctttggcaaaagcctgaacgaattggtcagcgagggagtgcaggccaagctgctgcatatgccgcaggaggcccgcagccgcctgcaatctacgttggaacgcattatcaatgagggctgcgacggcctgatctgcatcctgttgtaaagggggccttaccgtgaagcacctgacccggcaggaaaagaaatgccagaaagagcgccgcgccctgatggccgagctggacgcagctacgcaagccctgcgtgctaacgagaaagcttttcaagaagcgctggacccttttgtaattgagcagctaacctaccaacatgcggccctgcgatgccgcagccgtgtgctgctgcgcttattgcgggaggaggatgccccgtgccgctgacagacactttgtggccttgggcgttcggcgcggtatgcctgctgctggttttgcggtgcgccgcccgccagcggcacccggtactggctgtgctggccggggccgtctgcgggctgggggtgctggctgtgatagcgctgctggaacctgtcagcggcattgtactgccgctgaaccgctatacggcctttgtggcggctgtgctgggagtgcccggggtggttttattgctgcttttacagctgatattataaaaaatcttgccaattgctgtgcaatatgctataatatcccagaaacgagtggaacatacggcggcgggacagttcgcaagaactgcctgaggaaagtccgggcttcacagaggcatagcaactgctaacggcagccgggggcaaccccagggatagtgcaacagaaagaaaccgccgtgctttgcacggtaaggatggaaaggcgaggtaagagctcaccagcgcactggcgactttgcggctatgtaaaccctgcttgaagcaacatccgtatgggacattatgcggagcctcgcgcgtcccggtgatggcgtgagccttacggcaacgtaaggccaagatagatcgtcgtttgatacagaacccggcttacggtccagtcgttttcttaaacaatttctgcacagcggttcatataactgctgtgcagtttttgtttgtaggaaacaccacattacaatcacatccgaaatcaacggcagagcttgcacccggcaccacctgacagcagacagaaaaaagccccgcgcttgacacaggggaagcagaaagctataataaagacataacatgctatttcgctaaatcaaagtttagcgaaatagagggaggggcaaacagggaaaatgagcagttatatcgatgtggtccacccggaccgccatgcgccgtatttggatatacccaatgatgtggtggaatacctgcattatctggactttgtaaagatgcggtcaccgcgcaccatcaacgcatactatctcgatttgcgcggcttcttccgttttatgatggcgatgcaatggtcgcgtgtgccgcgggatacgccactggaagaaataaacttaaaggacatctcaaccgaggatataaaaaagatcaccaagcgggacatcttttcctatttggactacgtgcgcagcacggacgccaacggcggcaaagcccgtgcccgcaagctgagcgctctaaaaggctttttctcctatctggtgacccaggtgaataaactgcaggaaaatcccaccgagggaatcagtctcggctcaccaaaaaaggccctgcctaagtacctgactgccgcggaaagcatagacttgttaaaaaatatacaaagcgacttctatgagcgtgacttctgcatgattaccctgtttttaaactgcggtatgcggctgacagaactggtgaccatcaacatgggcgatttcaagcaggataccatccgcatcaccggcaaaggcaacaaagagcggcttgtctacctgaacgacgcttgcctggaagcgctggaccattataaaaaggcccgtgcagcgctgccgaacctgccggcagatgaacgggccttattcgtctccaagcgcaccggcaagcggctgacggcgcgccgcgtggaacagatcgtggcgcgttgcctgcaaagcgcaggcttaagcggacgaggtttttcgccccacaagctgcgccacacggcggcaacgctgatgtatcagggcggtgtggatatgttggcgctgaaagaaattttgggccacgagagtgtttccaccacgcagatctacacccacatcaaccaggagcgcctgcgcgccgcggtgaaagcctctcctcttgcagatcaaggttatatcgcggaaagcaagccctcacagcaggactccggcgaggaagactgacagccagccgttgaccagattgaccgttccggccagcagcaggcaaaacagaaagcggattgtcagccgccgaaaagcccccgccaactgcccacgggcggccccgcccgaaaagacgcactggaacaacccgttgcttatcgctgcgctgtagccggatagccacagccctgcaaacagtacactcagattggacaggctgctcagcagccagtagcagacaaggccccggctctcccctgcagccagtacgcaggcagcgcataagccgagaaagccaccgcgcaaaaagaataaaatcgggaaaaagaaacatcccaaggccgaaaagctgcacagatacagcgcggccaactgcaaaaaggcagcggaaaactgccactgccatacagagaaaaccgtgctgtagctgcttttagacaggtagtaagccgccagctgactgcctgactcccaggctccggttcgccccagccaaatgcctggcaggtagcccagcaaaaacagacaggcgcagcccaagggcacataaggcagcctgcccgccgcgtttgccggggcctgcggcactcgcgacgctggctggcgcggccagaacatccgggcacggacagcgggtcgcgtaggttgtgccgtgcgcatcagtgcccctccttaatggcggagagcgcaccgcctaaggtgccgcctaacagcagagctagcggcagcatggcgtcgctacgtgtccagctgggcacaccatgtacaagaaacgccgctgccagcaggcaaagtgcataaaaggccccgcaaattaacccgcatacaaaccgctgccgcccgattttacccgccagcaaaaagccggaaaccgcagccccggctgatgctgccaggcaggccatcggttgcaccagatgcagcggcagcggcgtatgcgtcaagagaaatgcagccagcgccaacagcaaaaggcatagcccgacccccgccgcaaaaacctgcaccagcatccaggctggcgcattttgtccgcgcggacggctgcggcgcctgggcagattgggagaaatacttttagccataataaaacgcccccttgcacagtaaacactatgcaagggggcgttttggtatgccgttgggcaaaattacttcttagcaggggtggtgtccttgccgcccatgtccagcttctccacgctggcaatggcggtacggcggaagcgaatcttggtgcggtcactgccggtctccagaacgatggtgtcgtccttctcggagatggcacagacgatgccgacgataccgccgatggtagaaaccttatcgccgatttcgatggagctgcgcatagcggcgtccttcttgtcctggcgcttctgcggcagatagatcagaatgaacatgaagacgatgatcaggatcatcggcagcagcgtaaacagggtctcggtcatgctggcggaaccagtggcactcaaaaactgaatcatagcgggtatactccttaaaataaacgatttcttctattatatcgaactttgcggcacagcgcaagcgtttacgaaaaaatatcagatgcgggtgtcaagtttatgcacataggtgtcgtggaactgctggaaagtgccgttgtccagcgcctcgcggatgcgttccatcaggtggttgtagaaatacaggttgtgcataacagccaagcgcatgcccagcatctcatcggccttctgcagatggcgtatgtaggcgcgggaaaagttgcggcagaccgggcaatcgcaatgcggatcgatgggagattcgtcgcgctcgtacttcaggttcttgatgttaatgatgccgtcccaggtgaacaggtggccgtggcgggcattgcggctgggcatgacacagtcgaacaggtcaacaccgcggtaaacgccctcgatgatgttgccgggggtgccgacacccatcaggtagcggatcttgttcttgggggcaaagggctctacggcggagatgatgtcgtacatgacctcggcaggttcgcccacggccagtcctccgatagcatagccatccagatcgtattcagcgatttgcttcatgtgttctacacgcaggtcggcaaaggtacagccctggttgataccgaacagcagctgatcggggttgacagccttttcctcatgcttcaggcgagccatctcatccttgcagcgcagcagccagcgggccgtgcgggcgcagctgtttttggcgtactcgtaggtggcggggttctccacgcactcgtcaaaggccatggcgatggtagaacccaggttggcctggatctgcatgctctgctccggccccataaaaatgcggtgaccgtccaggtgggagttgaaggtaacgccctcctcggtgatctggcgcagcttggccaggctgaacacctggaacccaccgctgtcggtcaggatgggaccgtcccacttagtgaatttgtgcagaccgcccatctcggccaccagcttgtcaccggggcgcagatgcagatggtaggtgttgcacagcatgacctgggcacggatgtctttcagatccagcgccgacagaccgcctttgatggcggcggcggtggcaacgttctggaatgcgggggtctgcacggtgccgtgcaccgtagtaaattcgccgcgacgggcggcaccttcctgtttgataaggcggtaaggcatgttggcagctcctttattgattgatgaaaatatccttatttaataaacatcgcatcaccaaagctgaagaagcgatacttttcctctacagcgaccttataggcggccatggtcttgtcataaccgtagaacgcggagatcagcatgatcaaggtgctttccgggaggtggaaattggtgatgagaccgtcgatggctttcagctcgatgccgggatagatgaagatgctggtgttgccgctgcaaggtacgatcttgccgtacttggcccagacggattccagcgtgcggcagctggtggtgcccacggcgataacgcggtggccagcggcgcgggtgtcgttgatgagttgggcagtttcctcgctgacagagtaccactcgctgtgcatctggtgatcctcgatggattcctcgttgaccgggcggaaggtgcccaggccgacatgcaacgtaacctcggcaatgttaacgcccatcgcacggatggtgtccatcagctgtggggtgaagtgcagaccggccgtgggggcggcggcgctgcccagctccttggcgtaaacggtctggtattggctctggtcctccagctgtttggtgatgtagggcggcagcggcatcttgccgaactcgtccagcttctcatacagcgtttcggtgtcataggtaaaggtaacatatttgttgccgtctggcaaagtctcatccaccacagccgtcaggctgccgtcgccgaactccaccttagtgcctgtctgcatccgcttgccggggcgggccaggcactcccaggtgtcccctttcacctggcgcagcagcagtagttcgcatacagcaccggtaggaaccttggtgcccatcagacgagcgggcagcaccttggagttgttgacgaccagcagatcgcctttttccagaaactggggcagatcatgaaagaccgagtggacgatgctgtcattctggcggtccagcaccatcaggcgggccgcgtcgcggggggcggcaggctcctgcgcaatcagttctttaggtaagtcgtaccaaaaatcttttttcagcatggtttcttccttttttcgttgacaatcagggatagggatactataataaagccagcacagaggcgcgaagtgcatcagtaacccggtttgaaatcccctgccaggggcataaactgggtgaaagggtacttcgccgaaggcgatgcgcggcacgcattgacctgggctcgtaaccaaacaggtgcgggactgtcacaccctgaaaggtgtgttgcgctgtgtgtatatgcaatatgatattatattgcattttgtgccggttttcaagccggtttttttattatctgtgcaaaatcggaacaatttatgccgctgctgcatagaaatcgggaaaggtattgcgaaaggaagggttaggaaagatgaaacagtacaatgtaggcgtcatcggtgcaactggcatggtcggccagcgttttatcacgttgctggaaaaccacccctggttccacctggccgccgtggctgcgagtgcgcgcagcgccggcaaaacgtatgaggatgcaatcggtgaccgctggctgatgaagatgccgatgccggaatgtgcaaagaagctcgtcgtgctggatgcagccaatgtggaggaagttgcctccaaagttgatttcgtgttctgcgctgtcaacatgaagaaagaggagatcaaggccctggaagaagcttacgccaaagccgagtgcccggtcgtttccaacaacagcgcgcatcgttttaccccggatgtgcccatggtcgtgcccgagatcaatgcggatcatatcgacatcatccctgcccagcgcaagcgtctgggtaccaagcgcggcttcgtagccgtcaagtccaactgcagcctgcagagctatgtgcccgccctgcatcccctgcgcggctacggtatcactgacgtgctggtctgcacctaccaggccatctccggtgctggcaagacctttgaaaccttccccgacattctggataacgtcatcccctacatcggcggtgaggaagaaaagagcgagcaggaacccctgaagctgtggggccacatcgagggtgacaagatcgtctccgccgatgctccgcgctttaccgcccagtgcctgcgcgtgccggtttctgatggccacatgggtgccgtgttcgtgcgctttgccaacaagcccagcaaggatgagatcctgaaagcctggaaggaattccatggccctgcacaggacctgaatctgcccagtgccccgaagcagttcctgcattattttgaggaaaacgaccgcccgcagcccaagctggatcgcatgctggaaaacggcatggctgtcagcatcggccgcctgcgcgaggataaccagtacgattacaagttcgtctgcctgtcccacaacaccctgcgcggcgctgctggcggtgctgtgctgctggcggaactgctggctgccaagggctattttgactgatccgctgccctgcccggcgcaggaacctgcgctactttaaaagaaggagcattccctatgaagaagcctgtttttaccggcgctgcggttgccattatcaccccgatgaacgccgatggcagcgtaaactttgaagaactgggccgcatcattgatgaccagatcgcccatggcaccgatgccatcgtcatctgcggtaccaccggcgagtccccgacgctgtccgatgaggagcacaccgcctgcatccgctatgcggtcaagcaggccgcaggccgcgtgccggtgattgcgggcacgggttccaacgataccaagtatgccatctggctgtcccagcaggcccaggccgacggtgccgatgccctgctgctggtcaccccgtactacaacaagaccagccaggcgggcctggtggcccattacacggccattgccaacgctgtgaatctgccctgcatcctgtacaatgtgcccagccgtaccggctgcaacctgacaccggccagcctggcccagcttgccaagctgcccaacattaacgccgtcaaggaggccagcggcaacatcagccaggtagctgagatcgctgccgcctgcggtacggagctgaacatctactccggcaacgacgaccagattgtcccgttgctggctttgggcggcaagggcgtcatcagtgtgctgtccaacgtggcaccccagtatactcacgacatctgcgccaagtggttcgccggtgaaacgcaggaaagcctgcagatgcaactgaaagccctgcccttgtgcaaggccctgtttgccgacgttaaccctatccccgtaaagtgggcgatgaaccgcctgggctggcaggccggtgcttgccgcctgcctttggtcgagccttctgctgcggtgcaggatcagctggagaccgccatgcgggatttcggcctgctgtaaatcatgctgaccggcccgtggcaacctgctgcgggccttttttgaaaggaaacagaaaatgacggatattgtgatacagggaatctacggccgcatgggccgtgcgctgatcgaaaaaattgcagcccgccaggattgccgcgtggtggccggtgtggaccgtgaggctggtaaggtcggcgatatccccgtttatgccgggtttgagggcctgcccaaggtcgatgccatcatcgacttttcttcccccgccggtgcggtggcggcggtacagtatggtgccgtccatggcgtgccctgcgtgatctgctccaccggcctttccgccgaggatgagaccgtgctggaggatgccagcgccaaaacgcccatcttccgcagcgccaacatgtcgctgggcgtcaatgtgctgatcgagctggcccgccaggctacccgcgtgctgagcggcgagtttgacattgagatcgtcgaaaagcaccatcacaataaactggatgcccccagcggcacggccctgatgatcgccgatgccatcaacgccgaggctggcaacagctatgagtatgtctacgaccgctctcaggtgcgccagaagcgcggcgcgaaggagttgggtatcagctcggtgcgtggcggcggcattgtgggtgagcacgatgtgctgttctgcggtcccgaggaagtgctgaccctgagccacagtgcaggcagccgcggtgtgtttgccgatggcgctgtgcaggcggccctctacgtggcaggccgagagccaggctactacacgatgaccgaccttttgcggggcaagctgccatgcgtttgagaaataatgaaattgcagcctgcctggtgattgccctgggcgttggcagcgtactgacaggagcgctgctgcaggaaatcagcaccggcaagaccgcacaacagccggaatcggtgacagccgccgcctatgtagagccgaccccggcaccggaaactaccccggagcctatgccaaccgtggagaccgtgcggttttccgccaccggcgacgacctgatccacgacggcatctttttgcaggcgaaaaatcgcggcaccgatggctactatgatttttcctatgcgtatgaaaatatgagggacttctacacccagtttgacgtaaattggctgaaccaggaaacgctggtcaatgatgcctttgatcccagcggctacccgatgttctcaacgccgggagatattacagatgcactgtatgacattggcttccgggtgttcagcctgtccaacaaccacagctacgataaaggtgcggcgggcatcgatgcctcccgcgagcattgggccgcgatgcccgatgacgtggtttcgatggggttctataacctggaaacctatgacgactacgtgtaccagacggtgaatggcatcaccttcggctacctttcctacaccgaacataccaacggcctgccgacgcccagcagtgcgacctatggcgttgtgtatttgagcgacctggatatcattgaacagcagattgccgccatgcgccccaattgcgatgtgctggtggtcagctgtcattggggtgtagagggcagccatgatgtggcggactcccagcggcagatggctcaatggctggctgaccatgacgtggatcttatcatcggtacccatccccatgtgacccagacagccgaatggctgaccggcgcagaaggtcataccagttttgtggcttacagcctgggcaatttcctgaatgcacagtccagcccggacaatatgatcggcgcggtattggacatcaccttccagaagaccacccagtcggacggcagcagcgccgtggagatgcaggacccgaaactgcattgcgtgataagccagtacgaagacgggtggaaaaacatccgcgagtatccctactctgcctataccgatgaattgggcgcggcgcatggaaacttcacgctcacccgtgaatacatcgaaagcgtattgtatggctctatcgacgagcaatttgttacattagattgatgaaaggatgacggtttatgtacggtgtcagcaagatcagcagtgagcagaatatcatgctcacgactttccccggtgcgcagtacagcgcacaaagcttggcggaacacctggacgtgtttgccaaggccggtatcgtggtggatatgatctgccagagtgcgccccgcggcacggcggtagatttcagctttactaccagctatgataactttgccgccgtgatgaaagccctgcccgcagcagccaaggccaatcccccgctggtttccggcggctacagcaagatcaacctgtttggtgaggagatggtcaccagctgcggcgtggctgcccgcgcactggctgccctggccggtgccaacatcgagatcgtgctgatcacgaccagcgacctggacatctcgctgctgattcgccagcaggacgaggatgccgccctggaagccctgcacaaggctttcgaggtctgatttatagcctaacacaacaaagcgcccgcgttctgtttttacccggaacgcgggcgttttgctatacttaacagttggaaatctgctcccgtatctggcacagcgcccctttttccaaccggctcacctgggcctggctgatgccgatttccttagctacctcggtttgcgttttgccgcccaggtagcgcagtgcgatgatgcgacgctcccgcggggacaatgcccgcaccgtatcacggaacatcatatcgctgatccagctttcctcgctggttttatcccgcagctggtccatgaccgaaaagctgtcctcgccgtcggaaaagaccggctcgtacaagctggtgggtgccacggcggattccagcgccatggcgacattctccggcgaggccccgacctgggcggcgatttccgatattttcggttcgcggccatcccgcatctgcagttcttcccgcgcctgcatcgagtggtaggccaggtcacggatggagcgactgacccgcacggcgttattgtcccgcagatagcgcttgacctcgccgcagatcatcggcacgccgtaggtggaaaaccgtaccttctggctggggtcaaagttgtcgatggccttgataagcccgatgcaccccacctgaaacagatcatccaggttctcgccccggcttgcaaatttctgcaccacactaagcaccagacgcaggttcccctggatcatctgctgccgggcgtcctggtcgccattatgggccgcttcgatcaggcggcttttttccgcttcgctcaaaaccggaagctgtgaggtatccatcccgcaaagttccactttccgtgccgccatggccgattccccttcctgctgttgcttacaaagcagtatgggctgcaaagtacacacgcaaacaaactggaaaaatctgcacatgtccttttcctggggcatagcatgggattaaagggagggcttggtatggtggatcttttatggtttgtgttaacgctgattttgttggcggcggaaacagtggtgctggtattgctgctggtgctgcggtggaaaacgccgcgcaccgatacccgcgagacgcgcaccgaatatttgcagcccaattataatgaggtggcaggtttccggctggcgacttacccggacaatgaaatcatcatcccccagcgctactggctgatcgaaagtgaggtggccgagttggactttgtcattgtgccgggccgcgccatgagcctgcgggtcgcccgaagcggcaccatgcgggagccgaccaacctgaccgtcaacggctacgaacgaaccgaggaatatgagatcgacggtctgacggtgacgcagaagcagaacaccgggcgttatacttcgatcagctggacgcgggatggattcgactatattctttattcgcaaaagccggagatgaacatggtcagcgggctggcagtgccgttcatcaccaacacgcgggccgaggaaacgtgacggctttagctgacggcttccagttctcgccgcaggcggcggatgatgcgcttttccagccgggaaatgtaactttgggagatgcccagctggtcggctacctctttttgggtgtgctcagtctcacggttcaagccaaagcgcagctccataatgcgccgttcccggggtgtcagccgggccaccgcccggtgcagggcggcatgctcggcgctgcgctccagttcctcgcccacttggggctggtcgctggtaagcacatccatcagcaaaagttcgttgccgtcgttgtcggtgttcagcggctcgtcgatgctggcatcctggcggcggttggaacttttgcgcaggtacattaaaatttcattctcgatgcatcggctggcgtaggtcgccagcttgatgtttttggtgggttcaaaggtattcacggccttgataagcccgatggtgccgatggagatcatgtcctcgatgcccgcagacggtgtctcaaactttttggcaatgtacacgaccagccgcaagttgtgggtgatgagcaggtcacgggcctcggtgctgccgcggcttaaagcctccagcgcctgccgctcctgctgagggtccagcggcgccggcaaagtgtcggccccgttgatgtaatgcagctcccgcacagggactaagtgtaaaagcaatgcgtaaagtgtctggctgagtttcatggttcgtaccgcccttcgtagtagattttataaaaaatcgctgccatacaaagcctcatattggggatcaccgaaagattccggcgcaaatgcaatggcagtacgccccagctgcagcacgccggtcttggtgataagtccgatattgcgcaccgcaaagccgggcagcaggctgcgctgggcggcggtgctgcaaggaatcagccgcagctgcgccccggcgggcgggtcggtcttatcacccccggcgaaccagccggccaaaaactgccgaatttctggcggcagacgggagcctgcatcggtgaggctgaccaccagcacaggcatacaggtgatggggtcggtcaggtggcagccggtatccagcatagcccgcaggtgaatgcaggtaccgcaaagttcaaactccagtccgacggtctcctgtttagcgggtcggcggcggaaaaaacgcagccccacttcaacagccccgcagcacagcccggacagccccaatagcagcagcggcgatacccgcagatagaccgcgaggttacccgtctgcagcagtgtggtgcccgtttggaaaataatcaaaaccaccaaccccgccagcaaaatattcagcgcagcataccagcaggccgccgccagcagtcgcagcttatcccgccagccgaaggtcaaggcggcaatggcaagggctgtagccagcttatacataatttgcacagggtacgaaagttccggtgcaaacagaatcaaggccgaaaccgccgcgcagacgctgcccgtcagcattcgggcaaaggcagcccgctggccggtcagcaccccggcagcttgtagcagtaagtaggccaccagaaaattgacaaggagcagcacatccagatagatgacggtctttatggtgcatccctcctcctgcggcgttttccagtatatgcgccgtgggtggtgaaaatgcgcagaccatgaaacacacaaaaaagcgacctgctgtaccgaaatacagcaggtcgctgaaaagcagcttatgcagttttacttggaagcacaggtggagcaggatgcacagctggcacaatcgggatgttcctcagcccagatgcggtcagcagacggggtccactggtcggcgtagggcttgcagcggcggaagacatcgctggtggattccggctgctgcatatcggtgctatgggcgccgctgcgtttgaccatctcgcccagcagctcggggttttccagcatcgggcagggacgcagatggttgtggttgaaaggctggcccttgtgatattccttgaacaggggctgctgcaggcactccagcaggctcttgtcgtggatgttggcgttggagtagtggataaagacgcagggctccacatcgccggccgggttgatgtgggcgtactgacggccgccggcaatgcaaccgtcgatgtactcgccatcgttctggaagtcgatgcagaagatgggcttgccgccggtgtagccgcggatctcgcgtacacggtggatcatatattcacgctgctcggcgttcagcatcaggttgacgttggccccgtcaccgatgggcatgtagtggaagtaccagttgaagcgcacaccgtggctgatcagcatatccatgaattcatcactggtaacagccttgtagttggcgctggtgtagcagatggaagtaccgaacagcaggccattctccttcatcagatccatggcatgcatgacgcggtcgtaaacaccggcaccacggcgatcatcggtagcatcaccgatgccctcaatggagatgaagaaggccatgttgcccagctgcttgacgcggtcgcagaaggcctggtcaatcagggtgccattggtgaacaggtggaagaccgagctctggtgcttctcagccagcttgaacagatcctccttgcggcaggtgggctcgccgccggtgcacatgtaccagtggatgcccagttcctcgccctcagtgacgatacggtccatgtcctcaaagctcaggttcaggcggttgccgtactcggcagcccagcagcctttgcagtgcaggttgcaggcggaggtggggtcaaacagcaggatccacggcatgttgcaatcgtacttttcgcgcagttccatgacgtagttataaccagcgaacataccctcgtacaccaggttcagggcgttcattttcaggatgtgggggtcgatctcattaatggcgcggtaggcatactgcatccacttgctgttggggtcggatacgaaagcacggacggcgtcccagttggcgtcgggataacgttttgccagcaagggttgtgccaggttgaccagcttaacagcctgctcggccatattttcagggcccttgccacggacggcgttgatggtagtgtcgatggcaacgctgaacgctgcacgctgtgccgcatggaccactttattcattgccataatcgtctgctccttttaactcttgattgtgcaaccattttatgccttttttcgtgctattgtacatgggcaaatgccgttttttgtgcaattgaaagcggcggacatgcgcaaaaaagcgcgaaactgaacaaatttgaaaaaatgtcctaacgaatttagcgctaaatttcggggaaataatccatataagcccccggaaaatttgcaaattgcaggcacattatgctataataacgttgtacgattctatttcgctgtaaggagtatttgccatgccgcgttcaaatcagacaaagcgcctgctggcccagagcctgatggatttgatgacgaccaccccgctggaaaagatctcggtcaacgatattgtggaccacgccggggtcgggcgcaataccttttactatcattttgaggataagtacgatttggtgaactggtacttccaaagcggcgtgacccagtttttggtggaacgctcggcctatgccagctggaatgccctgctggaagctgtggaagattacctgctggaaaataaagtgttttactgcaacgcactggcctataccgggcagaacagcttgcagcagtacatatttgattacctttcctccatctttatgcagcgcgctaaagagctgcgccccggcattggtgctgatgaaaacctgttggcgggccgtttttttgccggtgccctgatgggcattttgcagccgtgggtgctgggcggcatgaagaccaacacgacccgtccatcccaggcagtgccgctgctctctgtcgatgagctggaggtgatcctgcgcggtgagttgggcgaaacgcatgaaccaggcaaactgccccagtgatttggatgacttagcggcagcccttacaagcataacaaaaagccgattccttgtttgtcgcatcgaggcgataaggaatcggcttttgttatacgtatcttgcggctgcggggttactctcctgtgtgcagctgcagcgggaaggtctgcccctcctgcagggcactgccccacacggtgttatcagaaatgcgatggttgaggtaggtaatgtcagcgtcccaatccagcagcagcaccggtttgccggtctcaaggcggccgaccacgatgccgcggcgcagaacctcgctcttctccggcgaaatacctgggcggcgggcatacatgcaaaggcgggcctcctgggctacgctctccatccaatcgtcctgcaaagcttcctcggcacaggtgtcatccaccaggaccgtcagcatatacagcatctgcttggctttcaaagcgcgtgccgcatggcagacatcgggggtcagctccgggctttgcagcagcggcagcaccactacattgagacatcccgccagctgggcaacgcgatctggtgtcagggcttccggcgcggccagcacgccgaacgcacacttggggaacgcctttgccaggctggcagcctcggaagggtcgccctcagtggcatccagtacccagacaaagctgccctttttctcggcggctgctaccagcgccgggagggccgggtcgccgcagtgggcggccgtgatccaggagaagggctttccatccacatcggcctgcttcttcatctcgctggcaccgtagatcagcccgccaaagcccatgttgacgccgaccgtgcaaagccgatcctcgtccacagtgtccagcaggttatgcaccaggctgtagtagcagctgtcggtgcgctgcagggctttttgggcgtaggcaaaaaagtccttctgctgcggccgtttggccagcgaagaacacatatctacgtagttgcgcaactgtcggaatccgccgcggcggatgtcccccaccgcacggtgggccagtgtcatggtaaagctgcgggttgcattataatccaagctcaaagcggttcactcgctttcgtttttctgtgcagggcacattttctatatttaaaagtgtaccatgccagcgcactgcagcgccatgggcaaaaacatgcgtttgtcctataaagtgtctagtattatttcaattctaccacggtcacgccgttttcaccctcgccatagcggccggggcggaaacttttgactgctttgtgggtgcgcaggtgcttttggatggcagtgcgcagtgcaccagtgccgttgccgtggatgatgtacaatgtctgctggccgcgcagcatgccgctgtccagaaacttatccacctcggccaaagcttcatccacggtgtagcccagcaggttgatctccatgctggccttgcgggatttatccagctgcacgcgggtgctggaacggcgcggctcgcgggccgggcgcttgtccattttgtccgggacgcacagaccggagagaggcaccttcgttttcatgatgccggcacgtacttctaccataccgttgcggtcaggccgggcggtaacggtagccagctggttcagctcggcaatcagtacttcctgcccgatctgcacctcttttaggggcacgaactcacgggcgggcttaggcttggaatcggtctttttcagcagtgtttcagtgtcctttcgggcaatctcgcgggcgcggacagcacgctgggcggcgctggtcttttcgtctttctggatgtggcgcagctcatccgtcagggcgtaggcctcgttctggacgttctgcatcaggtcatgggcgcggcggcgggcgtcttccagctcctgctcgcccttcttgatcagctcgtcacgcttcttctcggcgctttccagggcatgctcagcctcatagcgggccttttcggcgtcaccctgagcaaccttcaactgcagctttaaatcatccagctgggccagcacgctgtccaggcgcttatcatcgttggacatatggctgcgggccgcatcgatgatgttctgcgggatgcccaacttggagctgataaggaatgcgttggacttaccgggcacgccgacgctcagcttatacgtaggcatcagcgtttctacgttgaattcacagctggcgttgacgacaccgggcgtttccagcgcgtaaactttcatttcggcgtagtgggtggtagccatcagcagactgccctggcggcgcagctgctccaggatactgacagccagcgcagcgccctcggcggggtcagtaccggcccccagttcatccagcagggtcagcgtgccgtgcccggccagctccaaaatgccgctgatgcgcttcatatggccggagaaggtggacaggctctgttcgatgctctgctcgtcgccgatgtctaccaggtattccctaaagttgcagacaacgctgctctcgtgtgctggaatcaggaagccgtactgcgccatggcgttgagcagacctgccgttttcagtgagacggttttgccgccggtgttggggccggtgatgaccagcgtgtcgtattcgtcgcccagggcaatatccaccggcacgacctttttcttgtcgatgagcgggtggcgggccttattcagcttaaagtggatggtatcgctgacagcgggcatgaaggccccctgctcaatggccagacgggccttggccagtagcagatcgatcttcagcatggcatcatagctgtagctgaactgcggctccagcgagcccacctgcgccgagaaagcggacaggatgcgggtgatctcctcctgttcttgcgcacgcagctgcatgatgcgggcgttggcctcgaccacagcggtaggctctacaaagacggtagcgccggaggaggaaacgtcgtggatgacgccgccgacctcgccgcgatactcagcacgtacaggcacgacataacgaccgttacgcagcgaaaccacagcgtcctgcaaaaatttattggtggtggagtttttgatgatggcatccagtttggtgcggatggaatcctcggtctggcggatcttgcggcgcaggtcggccagcgtggtgctggcggtgtcggccatttcttccggcgagatgatgctgtcggaaatctggcgctccagcaccggctgcggcgccagagaatagaacaggtcatcggtgggcatcatgtcatgctcactcagaccgtaccactggctcaggcctgcaaaattgcgcagcgtggcggcaatttccagcaattcccccatcgagaggatgccgcccttttgggcatgagcgaccacgcgccgcacctcggagacagagccgaagcgcgggctgccgtttttgatcagcaggctgttgatggcgttggtctgctccagagcgtagcgttcgtcctcaggggtctcacagggctgcagatcctgcatcatttccttggtctcccggcaggcgcaaagctgcacggcacgggctaggaccttgtccagttccagtgtttttttatatgcggtatccatgtgggatagtgtttctccttattcgagtacagttttcaaaaaatcaaggcttttcattttgtgttccaggtgggccagcacatactgctcgctcacgcgggacaggtcttttaagctgctatcggaaagcgtaaacgagaacagctttttatcctcggccagacagatatggcgcagcgcatacaacgcgccttcgtccagattgggcagatgccgcgccttgtcagcacatgctgcacacagcaaattgccagcgataggatccaaataaaactctcccccatcgtatttgccgcagccggaacaggccagcacatcgggcatgtacccggccagcgtcatggagcgcagctcatagatcactttcagcatccgcacagggcgcttttgctcgctgagcatgtacaggcagttgagcagcagccgcagctgtgcttccgattccggcggcgcaggcgaaagctcggctgcaatctcggccatataagaggccagccccatgccttccaccgtggcggaaattccatgaaacacgtttttgatctgcgcggtatcgatgaaataatggctgcggccgctggtcaggctgaactctgagtaacagaacagccctgtagcgctgaacagcttattcttcagccgcatgctgcctttggcagaggcggagatgacgcccagatcaggcgtcaggatcgtcaggatgcggtccgcctcccccaccttgatctggcgcaggatcagccccgttgttgcaattggcataagcgtcctcctgcgtcagctgcccagctttatagttgagataatcaaaaatactgccggattgcacgaaccgtgcccaatctgcggcggggtctttcatagcggccgcctcccttcctgtttttgagtatagcatgagaggaggcggaaaagttgtctgaccggggtgtcaggcggcggtcagggcttggcgaatcccaacgaattgagcagctgctcgttatcgcgccaatcctcgcgcaccttgacccagcactgcaggttgaccttgacacccagcagttcttcaatatccatgcgggctgccgaggcaatctttttcagcatctggccgcctttgccgataatcatacccttatggctcttgcgctcgcagtagatgtccacatcgatgtcaatgaggtccttgtcggggcgctctttaaagcgctcgaccaccactgcgatgccgtggggaatttcctcccgcatgaacagcagcgccttttcgcgcaccagttcagccaccagctctttctccggcatatcggtgaaggcgtcatcgtcaaaatagtgcgggccctcgttgccatagggcttcagcagggcaaacagatcgtcgcagcctgtgccgtccttggcagagatggtgacgatgtggtcaaaacagccgaattcttctacctgctttttgcgggcttccagcgcggcaaagttgtccagcaggtccaccttattgatgacagcaatcgctgggccgcccttttgcagcgccttgatcatcgtcaactccgagtcggtcagctccccggccggctcaaacagcatcatggtcacgtctacgtctttcaggctggcggcggcggtctgggtcatacgggcgtccagcttgttgcgggcagcgtggatgccaggggtatccatcagcacgtactgcaccgggcctttggtgataacgccggtgatgcggctacgggtcgtctgcggcttctgggtcacaatagcgactttttcacccacaaggtagttggtcaggctggatttgcccacgttgggccgccccaccagcgccacaaagacactgctgggcatttcaggaatcggttttgccattcggttgttcgcctttctgtgttgaattggaagattggaagataaatttactaaaaatcagcagcgagagcaaaat

SEQ ID NO: 7870 - DNA, 162 bp, Unknown
  gut microbiota DNA sequence
tataaagagtttgatcctggctcaggacgaacgctggcggcgcgcctaacacatgcaagtcgaacggagctgagaggagcttgcttttcttagcttagtggcgaacgggtgagtaacgcgtgagtaacctgccctggagtgggggacaacagttggaaacga

SEQ ID NO: 7871 - DNA, 1484 bp, Unknown
  gut microbiota DNA sequence
agaattatgcggtattgcctaaaactatatccttaccggcagtagaaaaagaaatgtcccgccagtaccaccggtgcgttcacaaccgcactgccgcctgctataataaagtcacagggcccacaaatgataaaggagcaaacaagctatggagatcaaacttgccgaatccatccgcactttccgcaaagagcgcagcctgacccaggagcagctggccgaagtgctgggtgtcaccgtgggtgccgtctacaaatgggaagcaggcctgtccacaccggaattgccgctgattgtggaaatggccgactttttcgatacgtccatcgatgtcctgctgggctacatcttaaaggacaaccgcatcgatgccaccgcccggcgcctgcggcactgccagcgcgtcaaggacttgaacggtctggaagaagccgaaaaggcactgaaaaagtatcccaattcgtttatcatcgtctaccgcagtgccatgctgtatcaggcacttgggctgtacaaacgggacaacgccaaactgcgccgcgccctggaactgctggaaaaagcccgtccgcttctgcaccagaataccaacccccgcatcagtgagcaaacgctctacgttgctatggcggaaatcagccaggacttggaggatgacgaacgcgccctggagcttttccggcagcacaacaccgacggcctctatagcgactgcatcggcatgattctggccaaggatgccaagcgcgcccaggaggccctgccgtacctgtccgaatccctgctcattcacgaggccgcgctggtgcgcaccgtgatgggctacctgaatctattcctgaacagccgcgactatgcccaggcacaggcattgcttgcctgggcgctgccgatcttcaccgccatgccccgcccggaatgcaccagcttcatggataagatcaactcggtcttttacctgttccaggcgcacgtcctgctcaaaacgggccaaccggaggaagccagaacatccgccgaggaagcccaccgcctggccgtgcggtttgatgccgcccccagctacgccgccgataccatccgctttgccatgcccggcgaggattccaccgtcaacgacgatctgggagagaccgctgcccaggccgcccagaacgccctgaagcagatggatgacccgcagacgaccgccctctggcaggaggtgtgcggtgcccgctgataccatcacccgccagctgcgcgggtcgttttaccgcggcaaccggctggcctttgtgctggccgctgccggggcgttgataggggccgtgctcaacctcataatctcctggctgatgcagcagctcatcgatacagccgccggtacaccgggggcactgcctttccgcatccttgtccgggcctgcggcgggttcttccttttacttttctgcggttcggcacttgtctactgcgcaaaacctcgctttctggccacggct

SEQ ID NO: 7872 - DNA, 1940 bp, Unknown
  gut microbiota DNA sequence
ccctccgccgcctacctctcggccctgaccaacgacgccgccaccatcgaggccgactacctgacccagcagtttaccctcatccaaaagctgttctgcttcgccggggcgctggctctgatgctgacctattcgctgcctttaacgctggcagccattgtgttgtcgatgctgccttttgccgtgtcgatggcggcagggaacaggctctcggatgccgcctgccgggtctcggaccgtaaccgggattttatggcgtttttgtcggattacttaaacggctttcccgtcatccgcagtttccgcgccgaggatgagatcaatcagcgctttgcctccgagaatcaccgcttagagcagcagaaatgcacccgcctgaagctgcaaacgctgctggagtccgccggttcttttaccggcatcacggcgcagctgggtatctttctgctgggtacctggctggcgcttaccggccggggcgtcacgccaggcgttgtcatcgcctttgtcaatttgatgaacttcatcatcgagcctatcgccgcattgcccggcctgctggccgcccgcaaggccgcgctggccctggtgcaaaagctggccgacagcctggcggggcaaactgcgcagccgggcggccaacccttgccgcggctgatgcagcaaatcgaattggagcatgccggctaccgctacacaccaggcaagcctgtgctgcaggacctttccgccacgctgaaagcaggcaaagcctatgcggtggtcggtgccagcggcggcggaaaatccacgctgctgcgcctgctgcacatcccggacgacaacaccagcggtcaggtgctttttgacggcatcgacatccgccgccttacgcccgaatcgctgaacggccttgtctccgtcgtccagcagaacgtgtttgtctttaacgcctccatccgggataatattacgatgttccgtgttttcccgcaggagaccctggatgaggtcatccgccgcgcccacctggaagaactcgtggcccggcgcggcctggatgccctttgcggcgaaggcgggtgcgagctttccggcggcgaaaagcagcgcattgccattgctcgtgcactgctcaaacaatcgtccatcctgctggcggacgaagccaccgccgcactggacgctcagaccgcccacgagatcacgcaggacatcctgtccctcaccggcatcacccgcgtggtggtgacccaccggctggaggcctcactgctggaatgttatgatgaaattcttgtcttaaaagacggccgcatcgccgagaccggcaccttttccgagctggtgcagcacggcggctatttcagtgccatgtacaagctggcgcattgacaccgccgcccgaagcgggtatcctatgcttagaaattagaaaggggatgccgccatgcgcaaagtactgcacgaggacctgatttacgagattttggccgccgtaggggagataccccgcggcaaggtggccagctacggtcagattgcccgcctgattggccgtgacaacaatgcgcggctggtaggcaacgtcctcagccatgccgagctgtacggcagctacccctgccaccgcgtagtcaaccacgccggccgccccgcccccaattggcccgaacaacagcacttgttggaacgggaaggcatccaattcaaacccaacgggtgcgtggatatgaaacgattccggtgggagtgctgacccatgggcatttgcattatttcccggtttgcgtttgcgggtcgatttacagggggggcggcgtccctgtaaccctgtctgccttgcattatccccctatgaaacggtgcagcgccgtcgctctgttcgaatcctctccatgtcagcataaaaagcagaccccttgccgggactgaagtgacccccaaaagttagacaatat

SEQ ID NO: 7873 - DNA, 215 bp, Unknown
  gut microbiota DNA sequence
ctcaccaccgatgcgccgccgcccagcaacacggcggggatggcgtgcaaatcgaatcccgcttccatcgtggcagacaggagatgctctgtgtacttgcgaccttgtttgttcacaatgtcgcgcaccgtatcgctgactgtgcagggctgacccgccagcatattttcgatttgggcatccgtgagggacagcccggtttcgcgccgcacctg

SEQ ID NO: 7874 - DNA, 22909 bp, Unknown
  gut microbiota DNA sequence
cgtctattcgcagagcagacaatcctgcgatgaattatttgtgcatgttaaggattgataagtgcatgcccgtggtgctataataaatatgttgggctgctataaccttgaatgggttgcaacctcgctgtaggggcggatgcttgcattgcggggtcgcgtagcgatcaaagccccagtggggctttgaaccgcacgagcgagccagcttttgctggctggcggccatgattttggccgccaagcggacccgcgggtcgatacaagcatcgacccctacatacgggatgccccctactattaatcacaaaaaacaaaaccctcgccgttattccttgcgaacaacagcgggggatatttttatggctgcgccttacttatcttacttatactcatccagcaaattggtcatgctcttcaggctgatggccagggtcgaggcgttgtgcagcagggccgaagtggcaggctgcaaaatgcccatggcgcccagcacgatcagcgtgctattgaagcccatgataaagcggtagttgtcatgggtacgcttctgcaggccgttggcgatgcacttcaggatgaccagctcattcaggctgtcggcggccacggtcacatcggcaatctcgcgggcaatggcagcgccgtcgctgatggcaatgccaacatcagcagcggacagggcgggggagtcgttgatgccgtcgcccagcatgatgacggtgtggcctgcggccttctcctgctctacaaagcgggccttgtcctcgggcagcacctcggcatagtaggcgtccacgcctacctgcttggcaatgacggatgccgtgcggtcgttgtcgccggtcatcatcacagccttgcggatgcctaagccgcgcagggccttcaacacatcggcggcctcctcgcgcagcggatcagcaatgcagatgacaccggccagttcaccgccgatagccagatacaaatgggaatattccggcggcagagcgtcaaatttgtcgctctcgctggtggggatgtagcagccctcatcctcaaatacaaagtgctggctgccgatgacgactttctcaccggctacgctgctggcgatgccgtgggccacgacgtactgcacttcgctgtgcatttcctcgtggttgatgcccttctgggcagcggcctgcacaacggcgttggccatcgagtggggataatgctcctccaggcaggcggcaatgcgcagcacatcgtcggcattgcggccgccaaacggcacaacgtccaccacggtgggggtagcatgggtcagggtgccggtcttgtcgaagacaatggtgtcggccttggccagggcttccagatacttgccgcccttgacggtgatgtggtagctgccgcactcacgcatagcagaaagcaccgccagcggcatggacagcttcagcgcgcaggaaaagtcgaccatcaggatcgagatagcgcgggtggtgttgcgggtcagtgcgtaggtaacggcggtgcccagcaggctgtaaggcaccagtttgtctgccagggcggcggcacgggtctcgctggaagacttcagcttttcggaagcctcgatcatctgcacgatctggtcatagcggccgttgccggcctgctgctccacggtcatcaccagctggccttcctcgaccacggtgccggcatacacaacagcgccggtgctcttgcgcacgggttcagcctcgccggtcagagaggcctggttcacactggcttcaccctccagcacgcggccatccagcgggatgacgctgcccgtgtgtacgaccacggcgtcgccggggcgcacctggctgatgggcaccagtacctcgccctcggcagtctgctgccagacgcggtcgacgttcagtgacatacagcgggccagatcgctcagggacttcttgcgggtccactcctccagcagctcgcccagccgcagcaggaacataacggaccctgctgtggagaagtccccccgcagcattgaaacgccgatggacagcgcatccagcacttccacttccagcttgcggcgcagcaggcaggtaagcccgcgccacaggtagggcaggctgcgcacggcggtgtaggcgatgcacagcggcatcggcaaaaacagcttgcgcgcaaagtggaagatcgtcatattgacgagcttttcctgatactcacggttcacagcgcggggactgttggcgggtacctcggccagggcttccacatcaaaacggaaggcggccaggcccttcaccaggcttgcgcggttctcggtatacacgaccaccacatcacaggtgcgctcatacacggcggcggtgcgcacgccgggcagggccgccaggtaatcctgcagctggtcggcttcggccaggctcatgcgcggcttgttcaggtgcaggcgcatgcggcctttgctttcatgcaaaattttccatttcattgttatactctcccacaaataaaaagctgcccaccgtgcagcgggcagctcttttcagtgaaaattattcggctgccttgtcttcagcggcctcgtcggcaacgacagcggcctcgtcagcggcggcgcgctcctcgttgatctccttggcgtcggccaggatgtcaccgcagttctcctgcagggtggtagcagtctccatgacgctgtccttcatgcgcagcacagcggcggtgcactgggtgtacagcttcttggcgtccttgctggtcagaatttcgataccggcggaaccaaacagtgcgccgcctgcgaacaatgcaactttagcccaattcataatttttgtcctccactctatatatttcacaacagtgttgagatgttgacaacagagttgttgtcggtatacaaaatattctattagggttagttataactgggttatacgcaatcggccggaaaatatgctgtttggatttttgtcaagcgctggcatcgctctcattttcgggcggtgtggggcaggggacacggcgcagttcggtggggcggcagccggtatggcggcggaaggctgccgcaaagcggctggggtcctcgtaccccacgcggtgggcaatctcggccaccggaagatcgctgctgcgcaacaaattggcggcggtgtccatccgcagcccccgcagatagctggccactggtacgccgtacagcgccttaaagcagatcttcagcgagctttgggacaggtggaaccgcgcggccagctcggccagcgtgatgtggctgccctggttggccagcaggtaatcgtgggcctggcgggtgtgctccagttgcaggcggtcaaagtagggggtgggcggtgtttccacttcggtgtagcggctcaccaactcatcccaacagttcatagcggcggccacgacctgtggatcatacattacaccgctgtttttctcgatttcatggtggcagaccgttgcggtcatggccgggcggtagctgcggttgctcatcatggcgtcgatggaatccgccaccgcgatgatgcgcgcccccagcggaatggcggtcccggccagctggtccgggtagccgcggccgtcccaccgctcgtgatggtgccgcacgatgagcgccacccgctggaactggggcaccttgcgaaggatgtcgtaccccgtcacggggcagcggcgcatctcctcccactcggcgtcggtcaacggcccggctttgcgcagcacggcgtcggacatcgaaattttgccgatgtcatgggcgaaagcggcaacctgcaccgtggtggtgtcgtcctcgctcaagtgcaggacccgggccagcaccaccgccatagcggccacccggtcggaatggtgggcagtgtagacatcccgtgcgtccacggcggcaacgatgctctggatcagatcgcggcagatcggcagggaagaacttacaggctccgtcatggaacgcacctccttttataatttacaccgcaaaccccggttggcggatagggcggaaagattcacaaatcctaacagttagcgtagactatcttaccgcctttagggcgaaatgtcaagtgcacggccgcccaaaaaccgccctgctgccagaaaacatgtcaaacgggcaggaataagaccgattgtgaatttattttgggcaaaaacctgttatcttattgacaaagcacccctgtacatggtatcgtatcgctggttagcaaaagctaaccaaaagcgcgcccacatgcctgcgcatgggcatgtttgcacggcacttcacccatactatccctgttcaatattgttatagatagaaaggaacgtgcaccatgagttatctggaaattgaaaaggtcatcggccgtgagatcatcgactcccgcggcaaccccactgtcgaagccgaggtctggctggctgacggcaccatcggccgcggcgctgcccccagcggcgcttccaccggcgagttcgaggccctggagctgcgcgacggcgacaagagccgtttcggcggcaagggcgtcagcaaggctgtcgagaacatcaacaccaccatcaacgaggtgctggtcggcctggatgccgctgacatctatgcggtcgacgctgccatgctgaaggctgacggcaccaaggataagtccaacctgggtgccaacgccatcctggcggtctccatcgctgcggcccgtgcggctgccatctctctggacattcccctgtaccgcttcctgggcggcgtttccggcaacaagctgcccgtccccatgatgaacatcctcaacggcggcgcccatgcagccaacactgttgacgtgcaggaattcatgatcatgcccgccggcgcccccagcttcaaagaaggcctgcgctggtgcaccgaggtcttccacgccctgcaggctctgctgaagagcaagggcctggctacctccgttggcgatgagggcggcttcgctcctgacctggccagcgatgaggaggcgatccagtatatcctcgaggccatcgagaaggccggctacgtgcccggcaaggacttcgtcctggccatggatgccgcttccagcgagtggaagggcagtaagaagggtgagtataaactgcccaagtgcggcaaggtctttaccagcgaggagctggtcgagcactggaagcagctggtcgagaagtatcccatttactccatcgaggacggcctggatgaagaggactgggaaggctggcagcatatgaccaaggagctgggcggcaaggtccagctggtgggcgacgacctgttcgtcaccaacaccgagcgcctgtccaagggcatcagcctgggctgcggcaactccatcctgatcaagctgaaccagatcggttctgtctctgagacgctggaggccattaagatggcccacaaggctggctacaccgccattgcttctcaccgttccggcgagaccgaggacaccaccattgctgacctggccgttgccctgaacacctgccagatcaagaccggtgcccccagccgcagcgagcgcgttgccaagtataaccagctgctccgcatcgaggaagaactcggcggtgctgcccagtaccccggcttcggcgccttcaacatcaagcgctgatttccgcgtaaaggcccccctctgggaggaagccaaaaaagttaaaaatgttgcctggacaacatactaaatccttatcttttggtatgatatacctgccgggtgggaaaatccatccgggtacacaattttccagttgcacagcataccatccatagtgtataatgctactggtaaatcctatatctggtattcctgattttaaaaagaggtgcaatatgacagatttcaaacagtgggaaggctttgaaggccgtatctggaaagaggaagtcaatacccgcgacttcatccagaagaactacaccccctacgacggtgacgaaagcttcctggctggccccaccgatgctaccaacaagctgtggggtgccctgcagaagctgcagaaggaagagcgtgccaagggcggcgtactggacatggagacagaagtcgtctccggcctgaccgcatacggccccggctatattgaccccgagctgaaggacctggaaaaggtcgtcggcctgcagaccgataagcccctgaagcgtgctttcatgccctacggcggcatcaagatggctgagcaggcctgcacgacctacggctatcagcccagcgaaaagctgcacgagatctttaccaagtatacccgtacccataaccaggctgtgtttgatgcctacactcccgagatgaagaaggcccgccacagccacatcgtcaccggtctgcccgacacctacggccgcggccgtatcgtcggcgactaccgccgtgtggccctgtacggtatcgattacctcatcaaagccaagcagaacgacttcgccaactgcggcgacggcactatgaccgaggaggttgtccgtctgcgtgaggagatcgccctgcagatcaacgccctcaagggcatgaaggagatggctgcctcctacggctacgacatctctgagcctgctgccaacgcaaaagaggctgcccagtggctgtacttcggctacctggccgctatcaagacccagaacggcgctgccatgtctgtcggccgcgtttccaccttcctggacatctacattcagcgcgatctggacaacggcaccctgaccgagaccgaggcccaggagctgatcgaccacatggtcatgaagttccgtatggtcaagttcgcccgtatccccagctacaaccagctgttcagcggcgaccccgtctgggccaccctggaagttggcggcatcggcatggacggccgctccatggtcaccaagaacgacttccgtttcctgcacaccctggagaacatgggccccgctccggagccgaacatgacggttctgtactcctccgctctgcccaagaccttcaaggattacgcctccaagatctccatcagcacctcttccgtccagtacgagaacgacgatgtgatgaagcccgtctggggcgatgactactccatctgctgctgcgtgtctgctacccagaccggcaaggagatgcagttcttcggcgcccgcgccaacctggccaagtgcctgctgtacgccatcaacggcggcgtggacgagaagctgggcgagcaggtcggccccgcttacgcccccatcactgccgaatatctggattacaatgaggtcatggccaagtatgatgtcatgatggactggctggccggcctgtacgtcaacatcctgaacctgatccagtatatgcacgacaagtactactacgaagccgccgagatggccctcatcgataccgatgtccgccgcacttttgccaccggcatcgcaggcttcagccatgtggtcgactctctgtccgccatcaagtacgccaaggtcaagtgcatccgcaatgagcagggcctcgtcaccgattacgagatcgagggcgatttcccgaagtacggcaacgatgatgaccgcgccgatgacatcgccgttgagctgctgcgcagcttcctggagaagatcaagcgccgccacacctaccgcaactccgagcccaccacctcgatcctgaccatcacctccaacgttgtctacggcaaggccaccggcgctatgcccgatggccgcaaggcttacaccccgtttgcccccggcggcaacccgtcctatggtgccgagacccacggcctgctggcatccctgaactccgttgccaagctgccctatcactgggcactggacggtatctccaacacccagaccatcaaccccgatgccctgggccacagcgagggtgagcgcatcaacaacctggtgcaggtcatggacggctactttgaccaaggcgcccatcacctgaacgtcaacgtctttggcaccgagaagctgatcgacgctatggagcacccggagaaggaagagtacgccaacttcaccatccgtgtttccggttacgccgttaagttcatcgacctgaccaaggaacagcagctggacgtcatcgcccgtacctgccacaaggtgctgtaagtcctacgggagtttttccacattttttgcaaaaaggaggaaaaactccaaacaaaaaataaaatagcaaaagggcctgtggctgcggctgcaggcctttttatatggtatactaataggcaacccacatacttctggccccccctgggagggctcccgcgaagcgggtgggggagagagccctggtttatatgccgctttctccgacgcaccaacataaaaacaacggaggcaacctatgtccgaaactttgggctacatccattctgtcgaaacctttggcctggtcgatgggccgggcgtgcggtatattatctttatgcagggctgcgccatgcgctgccagtactgccataaccctgagacctgggcctttacccaggacaccgccaagaccccgcaggaggccttctcggccgcctaccgctaccgcaactattggcgcaacaacggcggcatcaccatcagcggcggcgagcccctgcgccagctggatttcgtcagcgaggtgttccgcctggcccacgccaaaaaggtgcagaccgccctggacaccagcgcccagcccttcgcgcccgatgacgccgaatggatggcccgctttgacaagctgctggccaacaccgacctggtgatcttggatttaaaggagatcgacgatgaaaagcacaaaaagctgaccggccacacgaataaaaacattctggctatggcgcagtatgtggcctccaaaggcgtggacctctggatccgccacgtgctggttcccggcctgaccgatgacgccgacagcctgcgccggctggatagctttataaagtcactgcccaccgtgcgccgcgtcgagattttgccttaccacacgctggggcttttcaagtggcagaacctgggtatcccgtatccgctggacggcgtgcgtgtgcctaccgccgaggaagtagctgccgccgaggctctgctgcacgtaaaagactaccccgacgccccgaaagagtaagggcaacaccgcacaattcccgctttacagcttaagcaccgctgctgcggctgcgaagcacaatctgcgtcgcaaaaatgctcgataatacatccagtattatctgcgctttttgcttagcagcttgtacttctcgctcgccgcatcggcacttagaattatgcggtgttgcctaagaatagacgaaattcttttgcagagcagggacgaacatggttcgcccgcctcttaattgccgccgcatgtatgtaggggccgatgcttgcatcggcccgcaggcgctccgacaaatgcctttttgtcaggtttgacacaacaaataacgttacaatggcgaaaagtaaaacacttttctacacggaaaaaatcatacaaaaaatacaggaattattttggaaaaacgcttgacattaaggctttggtatggtaaagtataaccgtggttagcggatactaactataaccaatctcgaaccccatcggcctattgcctcaccggtgcggttcctgccaataacaggctgcgcctccgttatggcgttttgctctgcgccttttttagcggtctgcttattgcgttacgcccgcatcgtttactgctccaaacgatgcgggattttttatgcccgcagcctaaaagggctccctttgcacaagggagcctttagattctacaaaatagcagggtcggcacacgatagaaagtgtatcgaccctgctccttatttaatctcttctcatccgccctaatagcaaataatacccggcccaatccagcttgccgtacaggggggcattggcgcgccgggcttcgtccacacggcacacaaggcccacgttacgccagcggcagggcaggtaataggcgctgtagcagtgttcgatcttcatccgctccagcagcgcccgcagccagggactgcgcagcgcggcctcggccttgtagcctttcagccgctgggtgggggagggatcgcgccgcatgatgtcggccacgccctcggcaaacacctgcaattcggcgcggtgtaaggggcgcatgtcctcggccgggcaggcggcggcatggcaggcggcgttcagcttggcaaagtgtttcggccaaatatcgcagtagttggcgtggtaccgcgtcgagagcgtcccgccgcggctgcaatcataaaaagtcagggggctggtcattacccggtagccgaactccggcaccgtctgccccagcagggcgatgtaatccagcacaaactgcaggtcctcgcccaaggtgtactgcacatcaaactgcagttgcttggccaggtcggcccggtacagcttgttccagggcatagccagcaggcagtccagccacaaccgggcaaggcctgcctgggggcgcggctccgcatcggtagtcacggcggcggggtcttttgcgtcggtggtatagtgccacaccacaaagtcctgcggcgcggcgcgttgggcggtcagggctgcctgcaaagcaccggggcgcagtgcatcgtcggaatccaaaaagacgataaactcactgtccgcggcagccagtccactgttgcgtgcacccgaaacacctaaatcgtcctggtggatgaccgtcacccggtcgtcctttgcggcccaggcgtcgcagagcgcaccgctttcgtcggggctgccgtcatccaccaaaatgcaggtcagcccgccctccacctgctgggccagtacgctttccacgcagcggtccagagtggccatggctttgtatacgggcaccaccacgcaaatagctgctttgctcatggcgtccctccgttctgtgcgatctcgctcacaatgcgcacaaattcatcatagtaacgtgcaacagaaaaatcctgtgcccgcttggccccggcggcgcccatctcggcgcacagggccgggtgctcgtacagcatgcggatgctccacgccagctggtcggcgatgttctcgctccgctccaccagaacggcctgactgccctccagatattcgggcataccgccgctgcgggtagccagcacggggcggccgcaggccatggcctccatggctaccagcccggcggcttcctccaccagggtcggcacacagacaaggtcggccaggcggtagtaatcgggtaggtcctcgttggggatgtagccggtaaactgtacgcggtcgcccagcgccttggcctgctgctccagcttgcgcaaaaagctgctttgctgggtgcggccaaagaacggactgcccacgatcagcagccggatattcggcaccggcagcttgctcagcgcttccatcagcttgtggatgcccttgtccggctccaaccggccgcagaacagcatcacaaaatccctggggccaaagcccagccgggtgcgcagggccatcggcggcggggcagggcggaaacgctcggtatcgatgcagttatataaaatgtaagcgctgcggcggtcaagactgctgttttgcaggtaatcgtcccggatgaactcgcttaatgccagcacgccgccgtaaatagtatccatggcagggctgccgctggtctggccgtgcaggtgggccaggcagcgcttgcggccaaacatgcggctgatggcgctgcactgggtcaggttgccgccctcagccacgatgacatcgggcgggggcagttccagcgccagcgagagctgcactttctggtaccacgggtcgtagggggcagcaatacccacgcaccgttccaaaaagaccatgggccaatagcggcggtggccatgggggcgggcgacgtacagcattttggtgtgctgcaggccctcggcggcacggcgggcggcctcatcaggcacgctggcgcatagcagatccagccggccctgcttctcgttttcacggatcagatgggtcagcagcgtttctaccgcgccgccctgcaccgcaggcaccggcaggtccggcggcgggatcagcagcacgcgggggcgcttgtttgcgtctttctctttgtcgggtttcaggatgggcaaagggggtaactccttgttagggtcacgccgtactgtaggggcggatgcgggcatcgacccctacaaaaaagcacgaaccacaaaaattattttttgatcgggcacaaactctccgcgctcatcatggcccagcgggcggcggaaagtttctcggtcatcttcatctggcggcagttgggcaggtagctgatgagcccctgcatcaaaaactgctccttgctgatggccttcaccagctgcggggtggggttctggcgcaccttggcacacaggaagagataccgccgccagcaggctgcataggcggcatcgatcaccgcgcggtcagcaccgttttccacatagaagcggtagcggtcggccaggccgtccacggcgtcaaaggcttcgggcttggtgttggtgcggcagatgctgccgccgcgcagccggtagtggtacagcaccttatccacgcagacgaccttgtcgcaccgccagaacaggcggtgggccacaaagtcatcctcgtgcaggcggccttcggggtagtgcagcagcttccagacctcggcgcggtagagcttgttccaggcaacggtgtacacggtgccgttgggggtataaaactcattcagcaggtctttgccgcagaaaacgccctcggcgttggggcgggtatagctggcaggatcgcagctcttgccgttctcctgcacgtcctccacggagcaaagcgccatgtaggcgtcatttttctcgcaggcggcgtacagggtgtgcaggtagccggggcagaccacatcgtccgagtccacaaaggcgtagtagcggccgcgggcggcatcgatgccggtgttgcgggcggcggacaggccctggttctcctggtggaaaacccgcacacgcttgtccttggcggcaaactcatcgcacatttcggcgcagccgtcggtggcgccgtcgtccaccagcagcacctcaaagggtacttccacttcctgcttcaggatgctgtccacgcactctttcaggtacggtttggtattgtagatcggtacgatcacgctgattccgatatgttccatcgtttatttccccttcctctttgctgtcaggcgtccccaggccgtggcggccccgtaaaaggccgatggattggcactgaacaggacaagccgtactttttcccccgccgacagcagcgggctgcgcatcaggtccggcacaacggcatccagatgctttttatgtgccataaactggtctttcagatcgttcagattgccagccgcgccggattggcaccagaactggtaaaacagccgccagtagcaggccgtggcccattgctggtattccgtgcggtctggtttggcggcaaaatattgcagccaatcccagtacatgcgcaggtcatccagcttgcgcggcgggaagccgaccgtggtgatctgccccgcgcgggtgcggtaatggtagagcgtatcacccaggcagttgcatttctcaccctcaaacacgcggtgcagcacgctggcgtcgtcgccaaaaagcatcgtttcatcgtaatggatgcctttgtctttaaacagacgcgcatcaaacagcttgttccagctcagcggtccgtaaaagctgccggtcttaaacgcatccagtaaaagctcctgggcgtcatgcacgccccgcaagtcactggtgacgacgcggccctcaattttgctgccgtcctcgtcaatgcaatcgcccgcgcaggcggccagccgcacgccgggggcctgtacagcggcgtagagtttctcatacatatccggcgcgatcaaatcgtcggaatcgacaaagccgatgtagtcgccgcgggcgttgtccagtcccatgttgctggcgctggcagggccgccgttctccttgtggaaaacgcggatgcgggcatcggtcttggccagtgcatcggcaacctcgccgctgttatcggggctgccgtcgtcgaccagcagcagttcaaaatcggtaaacgtctgggccaggatgctttgcacggtcagcggcagataatgcccggttttgtaaaccgtggtgataatgctgattttggggtgatccatcgccatggcggactccttttatcatttacaaaaatcgctgtttggccagcgtgtaggcagccagcaaccccggcgcgcgcagcgccagccccagcttgtagggcagggccagcaggcggttggggtcgttttgcagccgcgcccgcaacgccgcgcgggcatcggcatcagccaaaatgcgggcaaatacatcccgccgttgtttataggtcaaactgcccttgcagccggtcagcagcccgtactggttgatgcaggcacgcacccggctggtttgcaggtagggggcggggtcaatgccgttttgggtcagcagagcttccagcgccgggcgggtgatggcctcggcatccagcaagtctccccgcagtgagcgggaaaggctgccgatccctacatcgttttgtttatagtatacaccatgcaggcaataaatggcagagccattttgtaaaaattgcagattaaacaaaacatcttcgttgatctgtagccgtgggtcgaagcgcagcgcccctatcacggcccggcggaacagtttggggtagggggccgccagcaggccgctggtaaacagcagcggctccagcgcagcgcccaatgcggacagatccgggtaaaagcccggtgccagcaccccggtggtgtcgccgccgctggcccggcacaggtgaaacagtagcaggtcggctttttgggcggtgtcatccagcgcggccagctcgtcccacaggccgggcagcagttcgtcgtcggcgtctaaaaacagcacccagtcgccggtagcggcgtccagcccggtgctgcgggccgcacccgcgccgccgtttgcacggtgcagcgcggtgatgcgggggtcagcggaggccagctcgtcgcaaagcgtgccggtcgaatccgggcttccgtcgtccaccaataatagccgggtatcggctggcgcaccgcacagagtggaatccacagcccggcgcagcgtggcagcggctttataacaggggatgatgatggtgacagcgccgatcctcactgggcatcccccttcaaaatcgtttcgtaaatgcccaccagcgcggcggcgttggcggcagcatcgtgggtgtgcagggcacgggcgcgggctgcctggcccagggccgtgccgccgtcgggggcggtcagcacctgcagcaggcagcgggccagggcatccgcgtcctggctctcgccgtaaagcagcccctcgcggccggcggccagcatatcggggatgcccccggcgttgctggccacgcagggcatgcccagcagcatggcctcgcccaggctgttggggctgttctcgcagctggagggcagcaaaaacacgtctgcctctaagtacgcctggcgcatggcggcggcatccagcgggccggtataatgcagagcatcggccacgcccagctgcgctgccagccgcttgcagtagagtttataggggaacatgcggtcgatgatgggccgcagaagcgggcctttgtccagcggcggccagcccgcaatgtgcagcgtggcaccgggaaactgttggcgcacggcaggcagcgcccggatgacggtgtgcaggtttttcagcgggtagttgccttggggcagaaacagtaccggcgcgcggccaaactcccgcacatgccacagcgccccggtgtaaaacagggggcgcagcgtctcgttgcaggggtagtagcgggcggcgggggccagggcggcggcggcgcggcggtcaaagccggtgcggccggtaacgcagcgggctttgcccagaacggcggcttctttctgcgccagaacgtcaaaattggcttgcatgttgtccagcagttcgccgggaatgaccttatcaatggcgtgccacagtccgccggaatggcggtaggcgtcgggcacgccgtcgcacaggtgcgccgcgcagtcccgcatcacgccctggatgctgatgagcaccggcaggttcgccgcagcggcggcatcctgcatggcggcggcttcggggtactcggtgccccagatatgcacaaggtcgggctgctcggtttgcagcagggcggcaaaaccatcggcaccgggcaggatgcggtagcttacgccgtcctgctccccctgcaaggatgctttctggcgggcatcggtgcaggctacggtcaggcgcagttccccgtgggggcgcagcgctgccagctggccggtgagccaactgccgcttacatcgctggcacctgccagcccgcaggcagccgccgcctgcggcaatacagtttttacaagccagaggatgtgcataaaggttgaggtcctttcatggagttgaggtacgaccccctctgcgagggggctcccgcgcagagggaaccaaagagagatgcggcttactaaatccgcccaataaacgtctgtgccactactcccggcgtaaactccgggtagagggcggccacctgcgcatagggcaagcactgcccctgcacgtcagtcagccagcgtcgcagcgtgtctactacttccggcgttacgccgttctttttgtgcagcaccagcgccagcggatacttcgccaggtaaggcagggtggggtcggtgtcggtcacggccaggtgcagcagcggcttgccggtgcccaagtaactgaacagcttgctgggcatctggttgtcaaaggcgttgccaaggctgagcaaaatgtcagctccgatttccagctctgccgccttttccggcggcagcaaaccggggcggacgaaccgtgcccccaaaacgcccagtgctctttgcgccgccgcttcaaacggttcccacccacggccggccatcgtcagagtcaggtcgggggcgttcagcgcggtaaacaattccagcgtaaaatccggctcccgtaacgtggggtacaaactgccgcaaaatacgcaccgcaccccctcgtgcgcaggcaccggcccgcccggcagtaaaaccgggaagcccagcacctgcaccttgccgcgccaggaggaaagcggcccgccctcataatccggcagggcctggggcgtgatgaacgctgtatcaatggtttgcaacaactgcccttcccgcgcgtaaccacccggggccgtgtagtctttgttgctggcgtaggggtccagctgccacagcaactttttgccgccgatctgcgcggtctccagcgcaaaggcggtgcggtagggggcacagacggcacacaccgcgtcaaagtgaaattctgcgtccagccgttccatttcccggcggctgtccaccgtgcggcggggtgcatgcagcaccaattggcggaacgccgccgctatggccgtggggtgggccgccagccgcagcagccgcaggggcactgggctgccggccttggcaccgttttccagcgcatggttcatcagccgctcatcggcaaaggccagtgtgtgctggctggccccggcgggcggtgcggggggcggattctcgccgtcccacaattccaacaggtggatctcgtgtccctgggccaaaagctgctctgccaggcggcaggccagctgtgcgttggcgctggcggggttctctacccggtctaacacaaataaaatacgcattactgtcgatctttcaaatatttgcggcacaccttgcgccacagtttgggcgcgtgtacggtggcccaggccgatactttaatggcaaagggcagctgtggattgcagcctagctggcggtcgttcagtccggcggtgatgccaatgcgcagctcacccagctgcacgcggtaaggctcaatgtcggcacggcgcaggatcatgctggccaggtacaccagcttttcatagtagaaagcgttggcgctttgctgcagcacgggccactgcccgggcacgctgccgcgaatcagcgcagccgcgcggcgctggtcatcgagactttggggcggcaggccccggcggctggcgctgtcggcatgctggcggtagtggtagcccggccaatcgcaaaaggcgcagccgggcgcggcgcaaaacgcctgccagttggccagcaggtcttcgttgtaggccaggtcattgtccagcatggcgggggtcagcagcgtggcggagtacagcttgttccacaggccgtagtccacggcgtggtcatgcagcagcgcgtccagatgcgccgggccgtccagccgctttacggcggcagggggggcggcctcggcgggcagggcgtcggcaaaggtatcgtaccggcagcaggccagcggcaggtgggtctcctgcaccgccttatataaggtggacaaaaacgcagggtggtacagatcatccgcatcgcagaacgcgatccactcggccccgatctccagtgcccggcgcagcccggcggtgcgggcggcactcaccccgcgctggggctggtggatgacggtaaaccgcgcatccccggcggccatattgtcgcacagcagcggcgattcgtcccgggagccatcgtccaccagcacgcagcaaaaggcgtcaaactgctgggccgcgatggcgtccaggcaatccggcaaatatttggccgcgttgtgtacgggcacgatcaccgcaatggtgcagaccggggcgctcatcgggtcacctcggcatagcggcgcaggtagaactcctgcaaaatttcggcgctgtggtggatgtcatacccggcctccacggccttgcggcgggcgtccgggtcgcggcgcaggctggccccggcgatggtgttcgcccaggcggcttcatcctgcagcggcaaaaaatgcacgcggtcggtaaaggcggcgcccttgtccacggtgtcggccacaaagcagggcagtccggcggtctgggcctctaccagcaccacgggcaggccctcaaacaggctgggcagcaaaaaggcgtccatggcgtcgtaaaagccctgcatgttgctgcgcactccggcaaagatcacgctgtcgccaaggcccaaactacgggccaggttttgtatctcttctatgtagccaggctcgccgccgcccagcagcaccaggcgggctttgggcagacgggcgcgcacagcggcaaaaattttcaacagcccagggtggtttttctgcgccgagaaccgccctacatggccaaacaaaatttcgttatccgctacgcccagttccccgcgcagcaaggcgcggcgctgcgggtcgcgggcggcaaagcgggccgtgtcaatgccgttgggcagcacggtgaaggggcttttgccaaacagcatctccccggccttctggctgcaggcgaagcggtcggtcaggcctgcgttgaagcggctgctcatcagcttgtccagccggcccaccaggttaggctcataggcagtgttgtggctgtggcccacccgcacagggatgcccgcccggcgtgccacggggttgtaaaacatgccaaagccgctgtaatggccgtggataatgcgccactccgggtgggcggcgaataactcgcgcagttcacgcagatagcggggcaggttattgtcctgccgcacggtcattttgtagatattgccgcctaatgtgcagatctcatcgtcaaaaaagcacggcttatcgtaatgatacaaaaagtcgaactgcaccttgtcccggtcgatggtgcgatagacgttcatcacaaaagtctccatgccgccggcgtccatggcgggcatgatctgtaaaacgcggatgggtgccatcagctgttctcggcctccaatcgggtgcggcagtcctgcaagttctgctgcgcttcggtgctcaaaacggggtagttgtggctggtatgctccagcgcgtctactacgatttcactcacgagataccgcgtgtaccatttctggtcggcgggcagggcgtaccacggggcctccttagcggcggtggcatcgataacctgctcgtacaggcgttgataatcgtcgaaataggcgcgctcggccaggtcgctggcggagaacttccagtttttagcggggttatcgatgcgctccaaaaagcgctttttctgctcgtttttggacacatgcaggaagatcttcaccacgcggtagctgttctcataaagatactgctcgtaatggcggatctggcggtagcgctgggcgaaaaactcgtccttgtcctgctccagcacacgcggggccatctggtagcctttttgcaggtcgtgcagctggaccaccagcacatcctcgtagtagctgcggttgaaaatggcgatggacccgcgggcgggcagcgccttgttgacccgccacaggaagtcgtgtttcaactcttcgctgttgggttgtttaaaactggtcacctgcacgccttgggggttcaggccggacatcacatgtttgatggtgctgtccttgccggcggcgtccatggcctgcaaaacgaagatcagtccttcgcggccgtcggcataaaaggcgtcctgcaaagcggccattttttgtaggttttcggcggtcattgccagaattttctctttgtcgatcccgtcggccttgctgttggtagccagtttgtccagtcggcacttgccgctgccgtcaaaacgataggaatccgctttcattcaggtgccctccccgcaaagtatacttatttatagtatacccgtttttgcagaaagacgcaaccatgcgggcataaaaaaggctccccatgcaaaggggagccgtagcgcaaagccttccttgtgtaaagggaggtgccccgaaggggcggagggatcgtcccgtttgtcgggcaagccggtttacaagacaaggccacaatcccccagtcagcttcgctgacaccgcttacgcggccgaacctctctgtcgctgcgcgacatctccccgcgctgcggggagtcaccctttacataagggggcctttggcggctgcttattcaaacccatccaatacttgccttaacaccgcccggtcatcttccaggtcgctgttaaaatatccggcaaccggcgtgcagccaagctggtacaaaatgccgtccttttcaaaaaaggcccatgtgctgtagtaggtgtagctgttgggattgctggtgcaaagcggcagcagggccatgcagccgttgggcatctcataggtctcgcagctccaggtcagaccagcacgcttgttgaaataatttatggcggtggtatcggtgggagcatcgcccaggtaggcaagcgccatcagctctatttcatagcggcggccctccgggtcgtacagatagtccatccgtttcagatacagcttttcgggagcttcgttgccgacggggataaaaccgacctgggccagggagctttcttcccaatagtcgttgtctgcggtgattcggataaacaactgcacggcgggttctggttcgcctgcatccagcacgctgtttcccgccagcggcaggccggtggcttcggccatggcagaccaggtttcgtacccgcgggcggctttgctgtagatgttctgcttatcgtggttgttgggataaatgcgtccgtgcatgattcccccggcggggcgggtcccgtccgcagctgcttccaaattatggttggcctgcatcccggcccacaggtcggcgggcagggtgtaatactgccgctcatagctgatagcatacccggcggtggcgtcaggggcaaagctggggcgggggttcgtgcgcaggtcggtgaactgtgcgcccgtggcggccaccccggcggcaatcagcagcggcgcggccaggcacagccacaaatggcggcggtgcggcttggcgggtaaattttcggccaccgcaggccacaggtccaccggggcagggtgcaggtcagtggagagtttttcgtgcagaaattgttcatcgcggtcaaaggtcatcgtgttcaccctcctttaaaatggcggccagtttggctttggcccggctgtagcgggtgcgtaagtagggcgcgggcagcccgtggatgcgcgccagcgcggcgtagtccatgccgtccagcacccgctccagcatcagggcacggtccaggggggacagcgcgtttaaggcggcgcgcagttcgtcgctgatgccggggtcctgctccaacggctgcggagtggggtagttggcggcgcgtttggctgcccgcagcatgtccagcgccgtacggtaggcaatgcggtacagccaggcgcggatgttattttcaccctcgcgcagggtgtggcggcgctgccaggccttgataaaggtttgctgcacggcgtcctgggcgtcatgctcactgcccaggatgccggtgcagtagcgcagcagcgccggggtgtaggtgcggacaagtttttccagatcctgctctgtctgcatggcgggcctcctttctttgggtttcacccttataacgccgatgggggaaggtttgtatcaactttttatgattttgttgaaggcggtggctttcggtgtccgtcaccttgtggcggacacctcggaacgagcgggacttttccggtactcttttggtcatgaaatagtacgcatagcggccggatgccgttaaaaaagtggctcaccgcaaggtggtgagccacgtaaaagctgctattaaaaactaaggcaataccgcataattctaagtgccgatacggcgagcgaggtacggcagctgctaagccaaaagcgcagataatactttgtgtattatcgagcattttggcaacgcagat

SEQ ID NO: 7875 - DNA, 12000 bp, Unknown
  gut microbiota DNA sequence
gccagcagtgccagcaggttgggcacggccatcaggccgttgaagaagtccgccatggcccacacaaggtccactttcagcgtagagccgaccaaaatgaacaccaccacgatgacgctgtacaccggcagggctttctcaccaaatagggccttgaagttggactggccgaagaagtaccacccaatgatggtggagaacgcgaagaagaacatgcagatggcgataaacaccgggccgaacccgccgaacgcctggctgaacgctgcctgggtcagggcggtgccggtcagcccctcggggatcaggccggaggtgatgagcaccaggccggtcagggtcagcaccacaaaggtgtcgatgaacacgcccaggatggccacggcgccctgctcacgcgggtggttgaccttagccagcgcgtgggcgtgcggggtcgagcccatgccggcctcattggagaacaggccgcgggccacgccaaagcgcatcgcctgctgcacggtcacaccggccacgccgccggccatcgcctgcgggttgaacgccagcacaaagatctgcgtaaaggcattgggcagcgtcttgtagttcatgaccaggatcaccacgcagcccacaatgtaaaacgccgccatgatgggcacgatcttttcggtcacagcggcaatgcgctgcacgccgcccaggaagatgaacgctgcgatcacggctacgacaatgcccacggccagatggctcatgccaaaggcgttatggaacgcatcaccgatggagttggactgtaccatgttgcccatgaagcccagcgccagaataataagtaccgagaatacgcctgccagcaccttgccaaaggtgcccttgaacgccgcgcggatgtagtacgccgggccgccggtgactttgccgttgacggtggtgcgatatcgctgggccagcacggcctcggcgtaaatcgtcgccatgccgaagaacgccgatacccacacccagaacaacgcgcccgggccgccgctgaccagtgccgtggcgcagccggtgatgttgccggtgcccacctgggccgcaatggccgtggccaatgcctggaagctgctcattccctggtcatcggcctttttgccccgcagggtgaagttgccgaaaacgcggtggaacccctcgccaaagcggcgtagctgtacgccccgcagccggatggtgaaaaacacgccggtgccgaccagcaggaacaacagcagtgaattccacagaatatcgctggcctgctcaatggccgccgtaaaaattgtcatgcaaaatacccctcttcttacatcttgtcttttatacacttacctctgcccgctttgcgcggacaatgtaactactatactatgctttctcaataaagtcaagtgtatttatatagtgaacataccagagaaaaaagttgtaaattctcccgaaaaagtgcagaattgaaacaactctgtcacaactgtggggtatcctgcagctaaaccaaacgcgaaaggagaacacatcatgaacaagctgctgccctttgccctggctttggcgctggccctgcccggctgcgccgcaggcaataccgcgccccagcccccggagacacccaccaccaccaccgagaccgccgcagaggcccaggccgagagcaccctgcccggtcttgcgggccgcctgcgccaaacgagttatgataccgccgtggggcagacgttctacggcatgatgagcacctacgatgaggagaccttgaccagcgtctacaccataattgcaaccgacaccacggccaacacccagcagaaagcggccgagctggagacccagggttactataccagtctggccgcctggcaggacggcttggaactgtacattgacgattggttggatgagaccggccagcccgtgacgaacagttaccagaatggcgatataaccagctggcgctataagatcgaccccgccaccggccagatggagcggctggaagtggaaggtgcgccgtattccccgcaatggcaggatgacgcggctgtgtacgccgagcggagcgtgggccagtggatcgaatgtatcaaccggctggatcacgccaccggccagcaggtggacctgcctctgccgtcccagacgcagaacgtatatgatgccatcgggcagcgctggctgatcggccgtatcatcagccccggccccatgccggattacaccaccgaccgggatgccttttttgccatgtggcagaactctcagctggagatcgacctgtacgaccctgccacccgtgcctgcgaaaaactgttcgagaccccctgctacgacggggaaaagtggatgtacagcggccagcgggacggcgtaccgtactttatccactataccgcgacggaggaccagagctacaccatggcggtggggctggacaagctggaaaacggcaccatgacgaccgtgtacaccccgcaaagcgatcaatggccggagtttgaaagttacggtcaggacgaagaagaacgctgggtcgtggaatatctgcgggacagcattgcaatttatgatttggcagatggccagacctacaccccgacggttgaccacgataattatataggctatcccatacagctgctgcccgatgaccgtgtggtcgtgaccaacggctggtacgagacgaccgccgccaccgacagacagcccgccctggtgaccatcgacatgaccgcctacctcaacggcagtaccgactacaccccgatagaaatgtacacgagcaagtaaatgcaagcgcgaaaggagaacaccctatgaaaaaagccattgcctgcctgctggtcctgcccctggccctcgccgcctgcggggcgcaaaccacccagcctgcgcccaccactgccccggagatgaccaccgaagcgaccaccgagaacgggaaaagcaccccggcggaagtcaaccagccgggcatcacgggcaggatgcggccatgcagtaccgaggtggaaaccgccgcaggtctgtataccctgcatgagcttttcaacgaagctgcaaatgaggatgtctactgtgtcgtcaaaacggacatcgagacagccacgcaggaaaaggtggcaagcatcacgttggatggcggctactacggtatggccgtctgggatgatgcggtagacctgtacctgcaggaaaacacggctgagggcgagcggcccagcctgcgctataccattgacacggccaccggtggcgtggaaaagcagcagatggatggcgcgtttgccccaacctggtacgatgacgctgccctttaccaggaaaaccgctcaaacctttgggtcgaaagccttacccggctggaccgcaccaccggtgaagtgaccttgcagaacctgccgggccagacctatactgtatgcggttcggtggatggctgctggctgttggtgcgcgtcagcagcccgtctcctatgccagatccgaccagcgagaaggacgctttcgacgccacctggcagaactccacggcggaaattatcctgtacgagcccgccagcggtgagatggaaaaactttacgaatttcctacgataggtgatggttatgactactgcggtcagcgggacggcagcctttactttatacattggcaaacgaacgggaacggcatcggtgacacagctccggccacggtggacaaactggaaaacggcgcaatgactcccgtatggacgctgcccgtcagcagtatcagtgtatccaccgtacagcagcagggcgaactgcgctgggtcacccagctgacagaaaagggcgaagcagccatcaaaatctatgatctggcagacggccagacctacacgcgggcaattgattgggataaagtggaaggatggaacgcaggataccccgaaaaactgctggcaaacgataaaattttggtcagcaatggtacctacaccaatgtctatggcatcgaccgcaaagcctacgccgtaatggattgcgccgcctacctggcgggcagtaccgactataccccgattgcaatgtatacaggagactaaataataaacgtgaaaggagaacaccctatgaaaaaagccatcgcctgcctgctggccctgtccctaagcctcgccgcctgcggagcgcagggtgcggatagcgcccaaagccagccggccacggaaaccgaacagaccaccgagaccgcccaggaaacgaccgccccggcggttggcactgcgggcaagctgcgcggcacagcgtacaggctttataccaacaccggcctgtacagcatgaaccagaaatacgatgaagccaccaacaccaatacgttttacctgataaaaaccgactgcgacaccgccacgcagcaaaagctggcggagatcgagctgcaaggcggagagacctgtggcatggccgcctgggacgacatggtagagctgtactgctttgaaaatatggacaagggcaaccccaccgaatggtgttacatcgtggatacttccaccggcagtgtggagcgcctgcctgtggaagaggaattctaccctgcatggtatgatgatgccgcgctgtacgagctggactatgccagcggcaagcgcatcatccggcgggaccgcaccacgaacgaggtaagctatatcaacctgccggaacagaccataaatgtatatggcgcgggcgataaatgggtcatccaccgtattgtcagccccagcccgctgcccagcaatgtcgacggggatgagtacaatgccgtttttcagaactcagagtatgagtatgacctttttgatactgccaccggcgaaatgaaaaaactctacagctatcccacaagtgaggatttttattggtatcgcggccaacgcgacggcacactgtatttcgacctgtatggggaggatggctacccaaccggtgtgggtaagctggaaaacggcgaaatggtacaagtgctggcacgggacgacccgtacacaagtgagcagatgttggagaacgaacagggcgagctgcaatggatcgttttggatgagggcgaatcggtacaggtatatgacctgaacgatgggcaaagttaccgcccggcgtttgtaaatgaatcgagccagtatgcctccacaggctacccggaaatgctgctgcccggtgggaaggtattcgtcacccacggcagcatggatgccccggactttttggataagaacgcctacgccacccaggaccgcgccgcctacctttccggcagcaccgactataccccgattgcaatgtatacaggagactaaataataaacgtgaaagggaaacaccctatgaaaaaagccatcgcctgcctgctggccctgcccctggctctcgcagcctgcggggtacagaatgtgccagcgcagaccgcccagcccaccgataccccggtcgagacaccggcacccacgactgcaagtactgcgccggtagaggaacccgcggcatcgtctgaaccagcgcccgaaagtacaccggcgcaaggcgaacagatgcctgcggcccctgaccaggcggcgcaggaatccgagcttgcatcgtatacccaaacgctgggctgtttctttaatacgcccctgcaaagcacgaaagaacttccgcaggattactatttatcgttctttttgctgtaccaaacctttgaaagcaagggcgaaggcagtacctatacacaaaatgataattacttttgggaaattccggaaagtgatctgctgcaaacggctacgatatatttggggctttcggacctttctatttcggatataaccgaatggccttttggcgagccgcaaaacgggatctgctattatagtcaggagacatctctcccgtatggtgatattacggtaacgaatgtgaaaattgataccgcgacgtcaaaagcacaggtgtttgcggaagcaggggatacccaatttgaggattccacccggcaaagcagggtcttggtttaccacttcacctgcacagccggcccggatggcagaacggtttacaggctggagtccattgccgtccagtaaattatacatacacacaaaaaatgctccccgtgaggggagcatttttatgcgctggttacttcttcttttcctgtttctctttatcgctgcaatgctggtgacagctggcgcagttgccgccgcagccaccctgccagccgccgttctggcagataaacaggatcgccagcgccagcagcacaaaaattaccactacaatgatcgcacttgccatagtcaattacctccgggacaagggttcacacaaaccccagcagtgtacctatacagtgtaccacaaaggcaaccacccatgcaataccgcactgcatcacaaccaccccggcggcggcttttgcactgccaagttcgcgcttggcggcggccacagcggctacgcagggggtatacagcagggtaaacaccaaaaataccacggcggtaaacggggtaaacatcgtggaaagtgctgccgtatcgccgcccagcagcaccgtcaaggtggaaacaacgctctccttggcggtaaagccggtgatcagcgcggtagaaacacgccagtcgccaaagccaagcggcttaaagatcggcgctacccagctgccgatcaatgccagcaggctggtatccggcgctgcaacattcagccgtgtatcaaaagtctgcaggaaccagatcaacacggtggctacaaaaataatggtaaaggctttctgcaaaaagtccttggccttctcccaaatcagctggcccacgctgcgggccgagggaaagcggtagttgggcagctccatgacgaagggaacaggctcgcccttatagcgggtcagtttcagcaccagcgcgtacaaaataccgcatacgatgccggtcaggtacagccccaccattacaacggcccgccactgccgcgggaaaaacgcggtggtaaacagtgcgtagatcggcagcttagccgagcagctcatgaacggtgtcagcagaatggtcatcttgcggtcgcggtcactggacaaagtacgagtggccatgatagcaggcaccgagcagccaaagccgatcagcatcggcacaaaactgcggcccgaaagacccacccggcgcagcagctggtccatcacaaacgccacgcgggccatatagccggtatcctccaggatggaaaggaagaagaacaaagtgacgataacgggcaaaaagctcagcacgctgcccacgccggcaaaaatgccgtcgatgacaaggctgtgcaccaccgggttgatgccgtaggcggtcagcgcatggtcagcggcgttggtcacggcgtcgatacccaaagtcagcaggtcagacagcgccgcgccgatgaccccaaaggtcagccagaacaccagcgccataatgccgataaagcagggcagggcggtgtacttgccggtcaggaccttatccatagccacgctgcgcttgtgctcgcggctttcaccggggcgcaccacggtcttgtcgcacaggcgctcgataaaagtaaagcgcatgtcagccagggcagcctcgcggtccaggccggtctcgttttccagctcggcgatggtatggcccagcagttcggtctcgttttcgtccagctgcaaagcagcttcgatcagctgatcaccctccaccagcttggtggcggaaaaccgcagcggcagaccggcgtgctgggcgtggtcctcgatcaggtgggccacggcgtggatgcagcggtgtaccgcgccgtccttgccatcggtggcatcgcaaaaatcgatgcggccggggacctcgcggtggcgggccacatgcagggcatgctccaccagctcgtcgatgccctcgttcttggcggccgagatgggcaccaccggcacacccagcagttcctccagttcgttgaccatgatggtgccgccattggcgcgcacttcgtccatcatattcagcgccaacaccatcggaatctccagttccatcagctgcatggttaagtaaaggttgcgctcaatattcgtggcatcaacgatattgatgatgccgtctgggtgggtgttcagcaggaagtcccgggtgacgatctcctcgctggaatagggcgacagggaatagatgcccggcaggtcggtgacggtggcctcggcatggccgcggatcatgccgtccttgcggtctaccgtgacaccgggaaagttgcccacatgctggttggagccggtcagctgattgaacagcgtcgttttgccgcagttctggttgccggccagggcaaaacgcagcggctgtcctttggcaatctcactgcccgccttgcggtcgtggtagctggcggccttgcgcagttcgcccacgccggggtggggcacaggcgcgtgccgtgtctcgctgcgggcagcgcggtccgtttcgtggacattgtccacctcgatcttggcggcatcagccagccgcagggtcagctcgtagccgcgcagctctacttcgatggggtcgcccatgggggcaaccttgcgcagggtcacctcggtgcccggggtcaggcccatatccaacaggtggtggcgcagctcgccctggccgccgatggtgcgcagtaccgcatcctgcccaactttgatttctgccagtgtcattttttccagtcctcttataaaaaagtttgattattctaacttttatctgccgccagtatagcacaaagctttccgctgtgcaagatggaacttcgtttgcgcattgcacgcaccccggctttgtgctatactttactatatgttcacataaagaggggacgcgctgctatgcagcctttacaaagggaaaaactttttgccaatcacgaattgctcacgctgctttggccgctgattatcgaacagacgctcagcgtgctggtgggcatggcggatacggtcatggtctcgtcggtaggcgaggccgccatctccggcgtttcgttggtggatatgatcaaccagctcatcattacggtgtttgcggcgctggccaccggcggcgctgtggttaccagccagtatctgggcgccaaaaagcccgagcaggccgcccgcagtgccggacagctggtggggttaagtgccctgctgggtctggcggtggcggcgttctgcctgctgacccgccgcccgatgctgcgcctgctgtttggctccatcaccgatgacgttatggacgcggcggtgatctactttaccatcacggcgctgtccttcccgtttttagcgctgtataacgcaggtgcggccattttccgctccaccagcaacagcgctgtgtccatgaaggtgtcagtcatcgttaacgccatcaactttggcggcaatgccatctgcatctacctgctgggcatgggcgtcgagggcgtggccatccccacgctgatctcccgtgcggtgggcgcgtttatcatcctggcgctggccgctcagcatgagtatgtgctgcacattacgccgcggtcggtcacccacctggagcgggggaccgtgcaaagcattttgcgcatcggcatcccctcggcctgtgaaaacagcctgttccagttgggccgcgtgctggtggtgtcgatgatctcgctgttcggcacggtgcacatctcggccaacgcggtggccaataacctggacgccgtgggcgctatcatcggccaggccatgggcctggcgatcattaccgtagtgggccgctgcgtgggcgcacaggacatgcagcaggtggtgtactacaccaaaaaactgatgctgtgggactacattgcccagggcattgccaatgcggcggtcatcctgtcgctgggggtggtgctgaatatgtacaccctatcgccggagacccgcagcctggcggcggaactggtcatcatccactgcgccatgggtatcctgatctggccggcggcctttgtgctgcccaacgctctgcgcgccgccaacgacgtaaagtttacgatggtcgcatcggtggtctcgatgctcgtctggcgtttggcgttcagctggatcttgtgcgtcaacatgggctggggcgccgtcggcgtctggtgggccatggtcattgactgggtctgccgcagcatttgctttgtcggccgcttcgtcagcggcgtctggaagaaaaaagcggttaagatgccgaattgatttttggctttggcggatgccgccccggccccgccgcaaggcggcggaacaccgaaagccgcccatacacccacataaaacaaaagaaaggcttacctcatgaaattcatcagttggaacgtcaacggcctgcgggcttgcctgaaaaagggttttgaggataccttcaacgccctggatgccgactttttctgcgtgcaggagaccaaaatgcaacccggccaggcggacttcgccccggcaggctatacagagtatatttacagcgccgagaaaaaaggctactccggcacggccatctgggccaagactccggcattgtcggtcaactatggcatcgactgcgaagcccacagccatgagggccgcgccatcacgctggaatacccgaacttttacctggtcaacctctatgtgcccaactcccaaaacgagctggcccgcatcgattatcgcatgcagtgggaggatgacctgcgtacttatttaaagaagctggacgccgttaaacctgtcatcctctgcggcgatctcaacgtcgcacatgaggacatcgacctgaagaaccccggccccaaccgcggcgcggcgggcttcagcgaccaggaacgcggcaagctggacgaactgctggccgccggtttcaccgacagcttccgctgcctgcaccccgccgacaccggcatgtacagctggtggagcatgcgcttccgcgcccgtgagcggaacgcaggatggcgtatcgactatttcctcgtcagcgaccgcgtggcccccaacatcaaagaggccggtatcttaatggacatcatgggcagcgaccattgccctgtaagcctggacatcgaaatttgagagaaatcttaaaagaaatttaaaaaatatcccccgcgttgcaaaatccggcgcgggggattcgttttagtaaacagaaagacaaaacaaaggaggtgtgggaactgacaaacggagaatttaccgaactgatgcagcaatatcagcggctgatctacacggtctgcctgcagtttgttcacgacccccacaccgccgaggacctgacccaggataccttcctctccgccttttcggccattgaccggtgcgagccccagtattacaaggcctggctggtgcgtgtggccgccaacaaatgcaaggaccacttaaaaagcagctgggtgcgccgggtggaagccccaggggacgatgccctgcccgaaccacggggagcacccctcggtgacgcgcaggaccccatcgagcagctgaccgagcgggccggtgccgccgaagtggaaactatggtgcgcagcctgcgcgaaccctacggcagaattgccgtgttgtactttctggaacataagaccaccgcagagatcgcggccgcagtaggccgcccgcctgccacggtcaataaccagctctggcgcgccaagaacatcctgcgccagcagatcatcgagaggaggcagaaggaatgagcctttactttgataacgaaaaattgtttgacgccgaaggccacctgaccgacgagggtctgtatgccctgaaggacggaaccctcgacgatctgggggcgctggaagcggccgagcacctgacattttgcgattactgcctgctgcggtacaccaaaatgatcgataacgcgccggaatgcctgcagcagccgatgcgcgacctgatcccgcaggtgcagaacctcatgcggctgcgcagcttccgcattatgaccaaccgctacgtttccacggcggccgcggtggcgctgg

SEQ ID NO: 7876 - DNA, 9526 bp, Unknown
  gut microbiota DNA sequence
aaagcctgaacaatacctttaaaaactttaccctgaccgccgaaagcggcctggaacagctgaaaacagaaccaatcggcggcggtaccgccaagggggaataaactatgaaaaagaacgcatttctgacatttatttttgcctgcatccccggcgcgggccagatgtactacggttatatgaagcgcggcctgtcgatgatcacgttcttctgcctgtttatcatggcaggcacgctggtggatgttctggtcgttggctcagtcatcgtgtggatgtacagcttttttgacacctatgacctcatccgtcatctggcggcaggggaacccaaggacgacgacctgcttctgcccgccaactgggacaatattagggccatactgccccagcataacaagctgctgggctggggcctgatcgcctttggcgtctgggcgctgtatgatatcctcatcgcggactggatgaccaccgtgttggagcatttcttcggctacggttatgcgtatgatatcatccacggcatccccaatatcctggtgggcatcctgctggtggtggccggcatcaagctgctgggcctgcacccggccaagaagactgaccccaacgaggccgacacccttccgccgtatccgaatgagaagcagtaaggaagcagaccataaaaaggccccctctgggaggggactcccgcgaagcggatgggggagagagcctacgattcagcggcagctaatggggcggtctctccctccgtctgcgcttcgcgcagccacctccctcgcagagggaggcgctgctctgctgcgtcttaatactaatacaatctgtataatacaaagcgaggcattacaaaatggatgaaattaaaaccaacccgccggtgcaaaattccccggcggaaccgcctaaaaaagtccgccgcgtgggcacgatggcctttgcggtgctgctcatcgcgggtggtgtactgctgctggcccagcagttcatgcccaaggcaaacctgctggctgtgttaaaattcgcgccggtcatcctcatcgtgctgggcatcgaggtgctggtctacagcaccaagccaaacgtaaagctcaagtttgattggctaggcattttgggctgcgcgttcgtcctggtcgtggtgggcacggcgtccctgataccgctggcctggcgctggctgggcggcgcggaccgcaacgccgaaaaacgcatcgagcagcaggtcgtggacagcatgtacgagcagctttccgccgatccggagctgaaagccagcgtgacctcgatgtacgccagcgttgattttaaccacaccgatacggaaaacgtggacaacacgctggagccgggcgacaccctgatcctgtacctgaacttccgccaggacgccgccggcaatgagccggagtttgccgccaactgtgccgccattgtgcaggccgccaaagccgcaggctggaactttaccaccatgaattttggcaccgaggaaaatgtcggcggcgtgtatgatacttaccgtgccgagttctcccaatcctttgccgacggcttgaccaccgagcagctggccaggcgggtgcagaagggctactactatgactacgattgctacgacagcaaagaagcccgcgacaacgccatcaaggctgacctgcgggaacagatcagcaatcgctatgccgatgaacacgacgacgtttaccccagcgatgattacctgaatgaggaaacggaacgccagttcaacgccctctacggcagccagaccaccgaaattgccaccccggaaagcgcggagtaaataaaggcaataccgcataattctaagtgccgatacggcgagcgaggtgcggcagctgctaagctaaaagcgcagataatactttgtgtattatcgagcattttggcaacgcagatgccgtgccgcacaccgagccgcagcgaggcgcttcggagcgcaaccgccgcttgcggcggctcttggcgcggagatccgccggagcggtgcttaagccgtcaggcgggaattgtgcggtattgcctaaagcaaaaacacccccggatgcacgaaccaatgtgcatccgggggtgttttatttcggattttaacggttattcgtatctcaaagcctcaatcgggtccagcttggcggctttgttggcggggtaatacccgaagaacacgccaatggccatactgaaaccaacggccactacgatggaagaaatcgtaggcttgcccggcactttcatcagggtgctcaatcccacaccggccgcgatacccagcaccacgccgatgacaccgccgatcaggcagaggatcacgctctcggtgataaactgcatgcggatggccgacgccggggcgcccagcgccttgcgggtgccgatctcacgggtgcgctcggtgaccgagaccatcatgatgttcataacgccgatgccgcccaccagcagcgagatggcggcaatggccgagatgcccagagacacggtgttcagcatttcggtcatgctttctaccaggttggaaatgctggacgcgctgaccgtccagctgtcgttgtaggtgtagtagctggcgaagaaatcgcctacggtgttcacaaaactggtcacgtccacgccgttggcggccaccaacgtaaagctctggtagccgctggcgatgccggtgatggtgcgggccacgtccagcgggatgtagatgtccgtctggatgtcatcatcgctggtggaaccgaacatgctggaatagctgtcctcggtgtatttatatacacctacgatgaaataggtgtacaaagtgccgtcgctgccctgcagagtgaaggacttgccgatggcatcctgcgggctgccgccgatggcctgggtgacgaacttctccgagacgcaggccagcatacggcccgcgtctttggcatcgtccagccagcggccgtataagatctgcgagtcatcgtccttgttggccagcgtgtcgtggtttacgccgctgactgaggctttgatggtcgtggtggggtcgccgtatttagaaatcgtctcctggccgacgtccaccgtgtattcaaagtggtctaccttgtcaggaaaagctgcataaaaatcatggatcatcgcatcggtaatgcggtcgctttcgccgggggtctcgtccataaagcggcgcagcgtcacaccctgggccgtgccctgggtatcgccggaggttttctgcttgaccgttaccgtaatgttgcttacgcccatgccggacattgagtcagtgaccgagccggtcatgctgttgcccaccgtgacaatggcaatgaccgccgcaatgccgatgatgatgcccagcatggtcagcaggctgcgcatcttgttgctgcgcacgctggcaaaggccatgctgatattctcaaagagctgcacgtttgccactcccctttctttcgcccacgatcagcccgtcccgcagggtcagcacacgctcacattcgtcggccagctcggggttgtgggtgatgagcacgatggttttgtggtaggtgttgtgcatttcatggaacagatccatgacggtgcggcttgtctggctgtccagcgcgccggtgggctcatcggccaaaatcagcgccggttcgttgaccatggcgcgggcgatggctacacgctgcttctggccgccggaaagctcgttgggctggtgcttcatgcgctcgcccatgcctacgcgctccagccattccttggcgcggcgggtgcgctcaccgccgggcacaccggcgtacagcatcggcagctcgacgtttttcaaggcgctctgccggccgatcagattgtaggtctggaacacaaagccgatcttgcggttacggatatcggccaactggttatctttggcgtcatggatgtttatgccgtccagcgtgtactcaccggaggtgggcttatccagcacgccgatgatgttcatcagggtggatttgccggagccggactcgcccacgatggccacaaattcaccggggtagaccgtcagatcgatgccgtgcagaatttccaactcattgggcttgccgatgtagtagcttttgcggatgccgtgcatctcgatcagcggctttttggtttccgggacaggggagacaggctgcggggcatcattctgggtcagcaggcttgcagcgatctgtttggcaaaggcttcggtatcgcgggcgtcggcgccgcggcggatgggggtagggctctggctcattgtccgcctcccggcccgccgtcagggccgcctgccggggcatcgccgccgcccatcacaacagtgccctcgggcatgttgctggggtcgcctacatacaggtcgccgttttccatctgctgcacgccgtcgggcagggtggagtcgctgctggtctcaataccctgggtcaggtcagcgctggagcggatcacatcgccctcctgcaggtcgctgccggtgatctccacatagaaatcgttggtgtcgccggtggtcacggtcacctgctcaaaggtcatatccacgccttcaccgccggtcttgcgcagcacgtagctgctgccgtcgtcggcggtgcccacagcgtcgcggggcacgataaagacgttgtctttctcgctgataacgatctccaccttggcggaaatgccgatcagcaggccgtccgcatcgccattgaccacgaccttggcgccgaagctgcccttgtcgttggcaacagggtcgatctgggtcagggtgccgtcgatcacagcgtcaccggtggcatcgctggtgatgtggcaggtcatgccggtagaaagtttaggcacgctgttggcgggaatggtcacgtccaccaccagtgcatcggtattctggatggtagccacggtgccgctgcagaccgaaccaacggtagcattcagcgccgtgatggtgccatccatcgtggcagtcagggtgcagtcctccagggtgctgcgcagtgtttccagattgtccggggtacgctgggcctgctccagcttggtagcgctgtcctccacattctgggatttgttcagcaggttggagtagttcttctcctggtcgtagctgtcgtgggctgctttgacctgctgctcgcaggtactgatctgggtattggcagtgtcgacagcgttcttagcggagtccagggcggattccgcctgattcttggtgctgtcggcgtttttcagggcgtccgaaatattgttgaaaccgtacaggcccaaagagggagcagagcagctgttctgggcatccgtcagggaagcttgtgcgctttggtaggcttcctgcgcggacttcaagttgtcgttggcggcgttcattgcgtccttgttggcgtcgctggggtcagcgttgtaagccgcaatggcgctgtttacagcggagatagcctgattctgggcatcggcagcggcgttcagcgcggcggtgtaggtgctgatgctggctgaagcgctgtcataggcggatttcagcgtgttatagtcagataccgcagtatcgtaggtgctctgggtcttgcgctcgttctcctgcgccttggtcagggcatccttggcatcctgcaaattctggtcagcctggtcgatcttggcctgcaggtcgatgaggctattctcgtgctgcacggtggaagtttccaggtcggcggtagcacggtcataactggtctgggccgatttcagtgtgtcgccgtagctttcttcggcactttcgatctgcttttccaggtcggaggtgtccagcgtggcaatgacgtcaccctttttcacggtatcgcccacggccaccttgacctcgctgaccttgtacagcttggccgagtcggccacagtcacactggcctcgtagccggatttgacggtgccgttcacactcaccgagtcggtcaggcttgtcttttgcagggtggaggtgcgcacgaactggtaggtggaaccggcggcctttttgccgcccagcacagcgcgcagcaccagcacagctgcgatcagcaccaccagcagcagggcagtcagctttttatgcttgctgaaccatgccagcggattgcgccgggtctttacggtatcttccatttggtattccttcctctttaacggggtggtaaattttgactttggcattatagcatgaatttgtgtaaaagttttgtatgaggtgtgaaaaaaggccccgcaagtgggggccttccaaaaaattattttccaaacagcgcactaattccgctgaacgtattcgtgatcgtctccacctgctgctgcagtttattcacgttgtccatcaaggtaggcaaaccttgcagcacggtgttcaggctgtccacatccagctgcttcagctgctcggtgatggcaggcaggtcctgcatcatgttgttcagttcatcggggtccagcgtgtccaggctgctttgcagggtgtcggctagttcgtttacctgtgtgcaggcggtcatgacctctttataggcctggtccatgtggttccagaacagccccagcaccaccagcagcactaccgtgatgatgatggtcagcagcatgcgcaggcgctggtttttcataatgctgcggttctgctcgtcctgcagttccagctgggcttcaatgcggttcagctgggctttcaggtcggcggcgtccagtttgccgtcgccggtctcgtcgttatgggcatccagttcggccacgcggctggccagctgttcgtccatcttgcggttcagtttctcgtccatacggggtctcctttcaggcttgcggcccggtgcggacgtcccgcatcacgaaccagaaggtggagccctgccctacggcgctgtttacgccaaaggcaaagccgtgctgctgtaaaattgctttggtaatggaaagcccaagcccggtgcccactttgccggaatcctgccgtgcgcggtagtagcggtcaaagatatagggcagatcctccggcgggatgccggggccgtgatcctcgatctccacgcggcagccgtccgcctggggcagcacccgcagcatcacctggccgtccgcaccgatgtggtggaaggcgttgcccaagaggttatgcagcacccgctccatcatggcggggtcggcccgcaccggggcggcctcatcggcctgcaactccagatgccagtggttctggtcgcacagggcgtcgtagcggcccgcaacttcaaagcaaagttcgcccatgtcaaaatcaatgaggttgggcttttcggcaccgctctgcaccttgctcagctccatcacgctgttgaccagtgccgacagtcggtcggtctcgtccacaatgatgttgcactgctcggtgcgcttttcggcgtcggtgccggtcaggtcgcgcacagtctcggcgtagccctttatcagggtcagcggggtgcgcaggtcgtggctgacattggccagaatgtccttttccagctgggcgctgcgcttgacctcagcggccatgtggttgaagtcctcggccagctggccgatctcgtcatggtgtacaacgggcagctggatatcatagttgccggcagcaatctcttttgcaccgctggaaagctgctgcaccggccgggtgaaccaccggctgaacagcatggcaaacagcagatccagcaccagcaagatcagcgccaccggccacaggatgctgcgcagcacctcggcggctgtggtgatctgtgccatgccggtggacacgatgatgccgtacttgccgtccgccgaaagctggcccaccagcatctgccgggtggagccgatctgcacgatcttgtacagtgagccttcctcgaacaattcctgcctaaaggtgatgagctggcgggtgttgaggttgtacccgaactccccgctgaacgagccgctgctctcgtgcagcaggcaggggaacatgctctcgtaggctttcaggcagcgcagcgtcgaatcgctgaagtcgacgcagtagccgtccatattgatctttttgtcggaaaaggtctggcctaaagcagtccaaaaatcatcgtccagctgcaaaacaccgaaatcccggctggaaatttcggagtcggtctggtcaaaaatggccgtgatggcgctggctttgtcgatcaggttctggcggatggtggcgttatatttcggggccagcgcgtaggtgatgatgccccagatcagccccacggtcagcagggtcatggctccgatgaagaacatcagctgccagcggatgctgatggacggggcgcgctttttagcgtttttcaaagcgcggcacttcccttacgataagacttcggggtcgaatttatacccgatgccccacacggtaacgatgaatttgcggcaggggcccagatggccgcgcagcattttgatgtgggtgtccacggtgcggtcctcgccgtaataatcgtagttccacacctgctgcaaaattttctcgcggctcagggcaatgcccttgttgttgaccaaaaagaccagcaggtcgaactctttgggggtcagcggggcttcctgcccggctaccttgacgctgtggctggcggtatcaatgaccaggtcgccaaaggtgaacacgccggagttctcgaccggtttgggcatggtgcgggccagcacggccttgacgcgggccaccagctcccgcggggagaagggcttgacgacgtagtcgtcggcgccgccctcgaggccggccagtttatcgtattcctcgctgcgggcagtcagcatgatgacgggggtcatgatcttgcgggtgcgcatctcgcgcaggcaggtcatgccgtccataaagggcatcatgatgtccaggatcaccaggtcgatgcccccctgggccagcacggccagcgccgcgccgccgtccccggcttcctcacacacaaaaccggcgtactgcagatgctcccggatcaggtcccggatacgcggttcatcgtcaacgatcaatatttttgccataaggatgacctcctcatttacctctatctataataataacacaatacaatgtgatgatggaagaattgtgaaaacttttgggaaaaagttttaaaacttctttttgattggtggccacccggccctgcctgccctgcggcagggccttttataacggatagccctgttagcgcttcctttttgcgaccaaaaaaggaagcaaaaaagtcccgctgttgcgaggcagcagacttctttacgggacggcggcgctcgttgtgcgtcgccaggcgcgcactatcggaagcagccagagaccttttcggtttcctttgggcctccaaaagaacacataacggcaatatgccattagcagaaaatctctccgctgtgctataatacagttgcaaagagagaacagtattccggaactgctccctttcctttggacaatgactgattcaggcaaggaaggcctcagtgcatcttacaccggggcctgcggtgtatagataagtaaaaacagcttgcattt

SEQ ID NO: 7877 - DNA, 28820 bp, Unknown
  gut microbiota DNA sequence
ggagcgtgaaagattatgatttttctagtaatactggtgattttggctgcgctggtgctgtttgccgtctggcccggcgctaagcgcgaggacctgcgggccccgttctatggccgcaactatgcccaccgcggctacttcggcaaggaccagcgcccgccggaaaacagcctgcccgcttttgccgccgcggcccgccacggctacggcattgaactggacgtacagtttacgtctgaccataagctggtggttttccacgatgatacgctggaccgcatgacccccggcaagggctttgtccacgatgccgcctgggcggagttctccgccatgccgctggcgggcagcgatgaccacccgccgctgtttgccgacatgctgcgcactgtggccgaggccaatcccgccacgccgctgatcgtcgagatcaagagccgccacgagtacaccaagccctacctggaggacctttgccgcgccaccctggccgcactgaaagcctaccccggcccctactgcatcgagagcttcgacccccgcgtggtgggcatcatccgccaccaggcgcccggcgtgctgcgcggtcagctgtccgacagttaccgcagctaccgccatgacggcacccatcccgtcccggcgtatgtgttgtcccactgctttggcaactttttgggccggccggattttattgcctggtgccccgataagcgcaactgggctgtccgcctggccgacgccctgggcgcgatgccggtgatgtggaccgccctgccggaacataacaccaagcagctggaagccgagaacgatgctgtgatcttccagtggtacgagccggtggaaaaatacaaataacatacaaaacgcagcccccgcataccattatgtgaaaacgaatggcaggggggctgcgtatgtttttatttacggtaacaaaacccggcttgcggcaggcgggggcgcttgccctgtgcgcggtatgcctgtgcggcacggtggcggcagcggtgcatttctccggcgacgcggtggctgcggctgcaccggtgacggccacggtggagaccacccaggacatcggcacctactttacgggctacgggttcgagacggacctgtccagcgcggcggtggataaggtgaagatccccaaaaagtgggacgacagctttaccgctttcaaccaggtggtgcaggaaagcggcctggacctgggcggctacaaaggcaaaacggtggaaaagtggacgctgctttgcccgcagctttccaccggcgacgaggatacctactgcgttttgctggtgtacaaaaccaaaccggtaggggcgtacctgctggagaagccctccggcgaggtaagcgggctggttacggcggcgaagaccgccgcggaagccgacggcgtggagatcgaataccctgaggattaaggtacagccctgcgggcgtcaccatcatgcggtgacgcccttttatcatgggctgcatccataagggcctccctttttggtcacaaaagagtacgcataacggttagatgccgttaaaaaagtggctcaccgcaaggtggtgagccacgtaagccagctgcgacaagcgggccaaaatcaatctgaaagcgaatccccaaacactgctggtaccagcagcaacagcgccgggtcgctggtgatgtggatgacctgcgtctccatatacccataaaacagcaccaccagcaaacaggccgccgcctgccagcggccgtgccgggccagccggtacagcgtcacggccatcaggatgcccgccaacaccaccagtaccggtccaaactggtacaggaaatacacaaaaatattgtcgatcgccggccagtccatcagcatctggccagcaatttttatgtcgtacatgcggtacgccgcccacgccagcgagatgcggcaggtcagcaggctgtccagctttgccagccacgcggggccgatctcgtccgcccagggaccaatttttaccacgaacagcggaaaaatatagctgatggcccccaccaccggcaccatggcggcgcacagcccggcggtgagcttgcgccctttgcgtgcgcccaccggtttggcgcagaccagcagcactgccagcaaaaaagcgcacagcgcaggcgaccgcgacgccgggcccttatataaaaacagccccacgcccgctacggcggcaatctcggcccaggtgatctttgcctggcgcagcagcacccaggccagcaccagcccaagcacgatgccgccaaaggtgttggggtgcccgtacccgaacatcagccggtagctgccgctgcgctcgctcagcgcgtcgggggcgataatgcccgcaaaatgcagcacttccaccagcgccagcgtgggcacgccgcagcctaaaaacgcctgcaaactgcgccgcagcggcacagctttggctgccaacagcaccatcacaaggcccaaaaaccagatgttctgcccgttgaaatatacccaccgcgccacaaaatacagcacaccggcgcagatcagctcccgccaggtgtagcgggtgcccagcaaaatcttgccgcacaccagcgtgtacataatcatgtctaacaccggggcaagctgcccctgcaaaaagggccagttctcccgcgccatgctgttgcagaacaccaccgtgaactcatacagcatcagcgccagcaaaaaggcacgctgcccccaccgggcacgggcctcgccgccccaatccccaaacagatagtgcggcacggtaaacagctgcccaactgccttgcggcgcagcgccaaaaccaaatcaacacccgctgcggcaaacagggccagcagcagcgcatttgcaaaaccaaacaaaacaggatcctcctatttttacgttacacctattatattgtgtgccgctgcgtttgacaacccttttgcgcggtgttatgcttatgctgtactattttacactagggaggtctacccatgaacgaacagcaatatcgcacggtgatcggctggttcaacgcccgcccggcggcaaaaaaggcgctgcgggctgtcagcacgggggctgcggtggcggtgtatctgctgtatctgggcctgctggcctggttggcctggcatgccatgtgggtgccgctgggggttactgccgtggtgcctgcggcggcgtttgtggtgggtacggctctgcgtgcggccattaaccgtccgcgcccttatacgaaatatggctttgtaccattgtttccaaaagataagaccggccagagcatgcccagccgccactgcttctcagccgcggccattgcagcgacggtgtggtacgtgctgccgccgttgggggcagtgttggcggttctggccgtcatcatagcggtctcccgcgttgtcacgggcgtacactttgtcagcgacgtgctggccgggctggcctttgggttggtgtttgccgtggccgggcgtgtggcctatatcgcggcggcttcggcgctgggattttacgccatcatggtaatttaatttgtacccataaaaaaaggagccgccgcgcggctcctttcaaaaacagcttatcaacggataaaattcgtccgcttgccgccctcggcggtggggacttccacaccggcggccttgccggcctcgatgcacttcagcagccaggccatgttggtgcccaggttgcgcatgatctggcagccctcctcgtccagggccacctgatcgccgctggtgccgtggaccatcggccagtaggtggagctgaccagcggcatctcgtagaactgcgggatcttttccatagcctcaatggcggtggtggtgccggcgcggcgtgcgctggtcacgatggccgccggtttgtgccgcagataccgcccggcgctgtaggccagccggtgcataaagcccagcatgctgcccgccgccgtggcatagtgtaccggcgcaccaaacacgatgccgtcggccttttccaccagtggcagcacatccaccaccggcccgccgaacacacagtgcccagccttggcgcagccgccgcagcctacacagccgcccaccggcgcagggccgatgtggtagatcgttgtctcaatgcccgcggcgttcagcgttttggcaacctcacacagggcatggtaggtgcagccctccttgtgggggctgccgttgatcagcagtacgttcatacaaagtccctccgtttgtacaatatgcggcacacgccgcaaaaaatgctctagctttattgtagcataccgcgcaagcccttgcaattttaaaggagatgccccatggccaagacctgtgttaattttagtaaaaagtgcggcggctgcccgctgctggcactgccctatccgcgccagaccgccgaaaagcagcagcgcctgcaaaagctgctgggcggttttgctccggtggccccgctgcgcaccatggccgagccgtggcattaccgcaataaagccatcgccagctttgccacccagcagggcaagctggtctgcggtttgtacgccgagggcacccataaggtgctgccctctgccgactgcctgctgcaaaacaaggtgctgaaccgcacgctggccgccgtgcaggacgccgcccgcgcctgccgctacacggcttttgacgaggacaagcgcaccggcctgctgcgccacgtggtgctgcgctgctcccgcaaggggcaggtgctggtcacactggtcacgccggggccggagctgcccggcagccgtaatttctgcgcggctctgcgcaaaaaagcgccgtgggtcgtcagtattgtgcaaaatatcaaccccactttaagcagcgctgtgctgggcaaccgggagaaaacgctctacggccccggctttgtgctggacacgctgtgcgggctgcagtttgccatttcctcccgcagtttttaccaggtcaacccccggcagaccgaggtgctgtaccgcgccgcgctggacgccgccaagctgaccggcaaggagaccgtggtggatgcctattgcggcatcggcaccatcggcctgtgcgccgcgtcccacgcagggcaggtcatcggcgtggagcgcaaccccgccgccgtgaaagatgccgccgccaacgcccggcataataaactgtccaacgctaaatttgtatgcgccgacgctaccgagtggatggccgccgccgcagacgagggcctgcatccggacgtggtcttcctggacccgccccgcgccggcagcacgcccgagtgcatcaccgccgtggccaaaatggccccccgccgggtagtctacgtcagctgcgaccccgagaccttggcgcgggatgtagcgatttttgcccgccatgggtataaggcaaagggcttcaccccggtggacctcttcccccagactcggcatgtggagacggtggtaggactacacagaaaggatatgtagaaatccttgaatttacgcactttgtagagtttttcagcttcaacaggattgctgaaaatcacaaggaaaaagagcttgtgaggaaggtgactgttgttgtagcgttagacctcggttgtgggaacacaaagaattctgaatatgaaagtaaatatacaacaaaatttacaataaaggttaatgctagaaccataagtgcggatgcaacaaactttaataattttgctaaaagtacagttacgcatgaatttggacacgttttttggctatgtggataatccaaatacatcaaaatcatcaattatgaaatatagcagaaacagaaatggtatgacagcaccacaaacatttgatgttgacaatgttaatgcgaaatatgattaataattttaatattaaatatggaggatgatgatatgaaaaaaagagcgtttatgctagttggcatattattgatttcaattgttatgagtgcttgtagttcaaattcaaaatccacaacaaatgaaaatgaaactactattattcaagcggaatatcctgtatatgatactgcggaagaaattgttgatgcttcagatttagtttttagtggtacagttacggaaattaattatgaatcactgaatgttaaatcagaaacaggcgccgattctaaaactggattagttgaagctacagaaattccatatacaatttttgatattagtattgaaaaggtgtataaaggaaatgtagaatcaagttcaatttcaataaaacgaccaggtggaaagatagatggtcaattttttgttgtagaaggtgcttcaacaattgaagtgggagaaacatatctgtttattacacaaacatatgaaaatgcttatcctagtctgttaaatgtgacgcaagcctcattcgatatgagcaaacctgaagttttaaatagtgaacaaggcaatgcgagaatcactttatccgaagttttagaatatttggattcaatcaattagaaggtaagattagaatagctcagttgttgataattgtaccaatttatgctgatagggtaatcaagaggacgatagttcagagaactatcgttcttttgattttgtaatatgccagttttatgttattatatttgtaatgttatagaaaagttatatatgaaaaagaacataaagttataaataaaaatagaacaatacggagaaaatcatggcacagaataattcaacaaatctcgtggcggcagcggtcacaacggctgtgtttatggcgaagtttaatgggatattggagaagaagagataagagtttggaataaaattgtggaggtgaacactttgagagctttggcagaggttatagcagacacatctgaactatatgcagaggatgtccagctgatttctaagaatggaaagctgtactatcttccagaaaataaagaagaataagagaccatcccaataattgtgtaaacctccggagaggtgtaaaatagaagcatcaggatggagaaaaaagatatgtcccgaaagaatcgaagcccggaagaaaacgcccgtagagcaaaaatccgtgaattgctgcagatggcaaacatcgacagcatggatgacattcagaacttgttcaaggaacgccggattggacatatatggctgattatatgaggctggagctgaaaaccgcagaggcagattttggtgctatgcggttgttgggctaaatgaagagaaaatttaattatgtgcacttaaaagtgaaatttttgcgccctattgtagccgagaaaacaccgcggtataatggggatacccaacagagaaaggagtgctcgccgatggtttgccaactgacgccggcgcaggaagcacgtatgtacgagatcctgcgcggcattgccgatgacccctatgcgctggagatgcagcagttcatccagcacggcaccgtcaccacctacgagcattgcctgcgggtgacccgcatcgcttactggctcaacctgcactggcattgccatgccgatgaagccagcctggtgcgcggcgcgtttttgcacgatttttatctgtacgattggcacaactgttccaacatcacccactggcatggctttaagcaccccctaattgcacgctacaacgccgatgcggtgtttcaactcaacaacaaggagcgcaatatcatccagacccacatgtggccgctgaccatcacccagctgccccgctgccgcgaggcctgccttgtctgcctggcggacaagatgtcctccagttgggagacgttgatggagcgccgcgccaagcgggaagccagccacgccgcccgcagctgaatatgccccacagaccccgccgtacaaaaacggtggggtctttttgcataacaatacaaatatatcgaaaaacgataaaaaacacttgcaaaacgataatacatatgctatactgcagctataccgaaaaccgggaggagacatgaccatgaaattttgggacgacgaaaaaagcatcacgctgacacggtgcgtggtggtggccgcactcatcggcagcattgccatgacgctgggcgggccgtgggtgacggcgtggttcattgcagtggcagggctgcgccccagcacaggcctgaccgccacactgctggtgctgggctatgcctgcgcggctctggctatcggcatgctggtcagcctgtacaaattcttgcgccgtatcgagaaaggcgaggtctttgtgcccgagaacgtcgcggcgctgcggcgcatcagctggtgctgtgccggggcggcggtgctctgcctggcagcggttttcatctgctaccggccctttgcggtgctggccgcggccgctggatttatggcgctgctggtgcgggtgctgaaaaacgcctttgctcaggccgtgcgcatgaaaaacgaactggactatacaatttaagggggacacatcatgccgattgtcgtaaacctggatgtgatgatggcccgccgccacaaaggcgcgggggagttggccgaggaaatcggcatcaccccggcgaacctgtccatcctgaaaaacaacaaagccaaagccgtgcggttctccacgctggaagccctgtgtaaggcgctggattgccagccgggcgagctgctggagtacgtggaagaggaaccatgatgccttttatgcaggggcgaatgcttgcatctgcccgcaagtcgatgcgatcatcgacccctacaaagtgcatggctcaagaatgaaataaggagcaaccctatgaaatactcccatcaagagggcgagatccgtcccctttattcaagtgtacccaaaaatcaatgcttttggccctgggcggtggtgggcagttatccgctggcctacttttacctgcgctgcatcctgtttggggaggctggccgttaccgcggctgggccatgaccgcctttgccgtggtctttctgctggccgtcgaggctgccgcccgcgtctgccgccgcaccgctgccagggagacgccactttgggccgcgtgctggctggcactgtcggtcacgttggcggtgccggggcacttttacttcctcggtcttgtgcaggagctggcgtggcatctgctggccatctggtgcgtgctggcccgcttcggcatgctggcccaggggcacaccggggtgttggccccgctggatgccttggccgggtgcttcaccctgccgtttggcagcttttttgcgcgggcgggtaccgttttctccgccctgcgcgggctggccgtgcggcgcatcggggccaaaaagtggctggcggcgatgggtacgctggtgctgacggcggtgttgtgcagctttgccgtcgcccagctggccgccgccgatgtccactttgccgccctgggcacctggcttaccgcgatgtggcaaaatttctggagcgcccgcctgctgagtgagctgttcaacatcctgctgtcgctgcccgtgggcgcgtggctgttcgggttggtctacggcgccgcccggcgggacggcccgccctgcgacggccccactttttataaagcactggccccttacaagcgcctgccccggttaacctgcggcattgccacgggtgccttatgcgcgctgtacagtctgttttttgccctgcaattggctgagtggaccgccgccatgggcggcccgggcctgaccgcgcccgaagcctcggcctttgcggtggacggattctgggagctgctgcgcatccaactgctggacattgccgtgctggcgggggtgcatttcctcgcaaagaggccgctgcctaaagcgctggcggcactgttctgcggtttcggcgtggcgtttgcactgctggccggggccaagctggcggcgtatatccggctgttcggcttcacgccgcgcagggtcgcggccgggtggttcctgacagtgctgctggtgtggggcgtgctgctgttggtgcgggtgttcaagcctatcccggcggcgcgcatcggcattgcggtgctggccgtcagctttgtggtgctgggctgcaccgaccccgaccgccgcattgctgaggcgaccctgacccgctgggagcagggcacagaccccatgctggataccggcgtgctgtccgcctgtggggccacccagtacagcggcgaggaaaaggaacctctgctgatgtccaccaccacccgcctggtgcaggacggctggttcatcgggcgcagcctggacgatatataccaactgtatgattgttacggagataaccaaactgtatatacaacccaactggattccacccacacattgcgcctgactgtgcagggcaatacctgcaccgccgccgaactgctgaccgcataaaaccaccccctgcccgcatacaaaagggcagggggtgttgctatgtggggcattttgggcgtatttttgcaggcggcagccgggcagattttatatttggcgctgcatctcgaaagcggcagcttcccgcggccactttccccggcggccgagcgtgcagcctttgcagccctgcgcacgggcggtgcggccgggcgggatgcccgcgaccagctggtgcggcacaacctgcggctggtggcccatgtgtgcaagaaatactacgctgccacgtccaaccaagatgacctgatctccatcggcaccatcgggcttatcaaggcggtggatacctttgatcccgcccgcgccagcaagtttgccagctacgcgagccggtgcatcgagaacgagctacgaatggaactgagaaaaattcggcgtgaaggtgcggctgtttcgctgcaggagccactggaatccggcagcgggcagctgactttggccgacaccctgcccgatgacaccgtgatggaagacgattgcgagcgccgcgccgatgccgcccgcctgcgccgcctggtggataccctgcctgcgcgggaacgggcgctgctgcagctgcgctacggcctgggcggggagcgtccggctacccagcagcagactgccgacaagctgggcatcagccgcagctatgtttcccggttggaaaaacgcgccctgactcggttgatgaacgcctggcgccgatgaacgaaaaatccatgtgaaaattatgctaaacttgccgaaatgcatgactgacatgacagaaaaaccagcagagaaagcaggtgaatcacaaagcggacacagtgtgacaaaatttgccacggatttgccacaccttatgaatcgcgcgatgagccgtcaaaacgaaaacaaagtgtggcagaagtgtggcaacgttgtacaaatacgtcgcgttatattataacaaaggaaaaatctaaaaaattactgttaaagtattgacaattgattcatttacctatattatggtaatagatttgcaactatgcagtaagggagagttcaagcgtgcacctgacaaaaagtgaacagcagattatggaaattttctggcaggcagaccaccccatggcccagaccgaggtcatccacacctgcgaggaccgcaagtggaaagaacgctcgatcttttcgatgctgaacagcctgatggcgaaaggcgtcttgcgggaggtcggcttcgtgcgcagcggtaaaacctacgcccgcacctttgagcctgccatctcccatgccgagtatctggcccttgtggtagctgagcagctgcctgccaaacagttccccgaactgttggcatctttgctgcagcgggtggagatcaccccggccatccagaaggccctgcgtgccgccgtgcgtgaaaacggaccccaggcccgcgaagctgccgcggcagaggctgctgagaccgagagagagcagtaagctgcaacaagcggctgaaagcggaaaagtccataatagcatataacaaagtccccgcctgtttaacgcaggcgggggcttttctatatatgaggtacgctataaaagatttagcggatcatcccgctgacggcgatggacgcgaccgcctcgcggatgcgctctaccggcagggtcagggcaaaacggacgtacccctcaccgctggggccaaagctgaagcccggcgtgcagataacgcctgccttgtcgatcagctccaggcagaaggccatgctgtcggtgtagccggtgggcagcggagcccacacaaacatgctgccgtggctgtcgggtacgttccagccgatgctgcgcaggccgccgcacagggcgtcgcggcgggcctgatactcgccgcactggcgttttacgctgtccagcgggccggtcagggcggcgatggcggctttctgcaccggcaggaacatgccaaagtcgatctgggtgcgcagctttttgcaggcggcgatcacatctggacggcccaccaaaaagctgatgcgcgcgccggtcacgttgaagctcttgctcagggagaagaactccaccgcgcactcctcggctcccggcgtattgaaaatgctgccgccgtgggcgccgtcaaagatgatgtcgctgtaagcgttgtcatgcaccagcaaaatatcgtacttacggcagaaatcaaccaaccgagcgtacagctccggcgtgccgatgctgcctaccgggttggccggcaggctgaccagcataaactttgccttgcgggccacttcctcggggatggcggtcacatcgggcaagaagtggttttcttttgtcagtttgtagtaccagggggcggcgccgcccagcttgctgccggtcataaaaacggggtagcaggggtcgggcagcagcaccacgtcaccgtcgttgcacagcgccaggcctaagtggccgatgccgtcctgggagccagaaaaactcatcaccttgttcggggtgatggtgtctacgtcaaagcggcgcttgtagtagctgcacacggcgtccagcagctcgggcaggtcccgcaggctgtacttccagttttcgttgtctctggcggcatcgatcagcgcctgtttgatgtggtcggccggggcaaaatccggcgttcccacgcttaaattgaacagatggcggccctcggcctccagcgcgacctttttatcgttcagcgcggcaaagatttccggcccgaacaggtccaaacgatgggaaaattccatattgcacaacttcctctccatacatgtctgccgctttaaatcgcacacacggcagaatggttttattatacgccgtgcggctttcccttgcaagtcctcacggttcatggtatgataaaatgataatatttgttgaaaaatcggaggatttacccctatggataaacgcaatcgtcccgccctggcctacctgctggtgggggtagcatccgccggccgtgctatgctggctatgcccgatgccgtcgctttgcaggaagtctcgctgactgtgctggcgctggtgggctacctgctgctgggccgccgcgccctgcccgtgctggcctgcggcaccgtgcagttggtgctggaactggtgctgtgcggcactctggccggtcccgcctggctggccccgctgctgcgagccgcggccctgtggctgctgtgggccactgtgacgcagatgttgaaaattgccggctatacgacgggaaaaaacgccaagatgccgattgtggctgccgtgccgctggccgtgtactgcgttgcacacttttctgccggggcggccaccgtggcgtcctttgccttcatcgtgttcagcatcatgctgctgtggtacgccgtgctgctgctgcgcgcctacaacaccacccgcgtgaaaaagtgagcccgcgccttgtgaaaacaggcatagtgtgctatactatttaataagtatcgaattttgtaaggaaagagggcttttgccatgatcccttttaatgtgcccccctgcgttggggatgaattggagtatgtcaaacaggcgattgatgcccataagatctgcggtgatggtgcgtttaccaagaagtgcaatgcgtggattgaggaacgcttccacgcccagaaggtactgctgaccaccagcggcaccaccgctctggatatggccatgctgctgtgcgatattcaccccggtgacgaggtcatcctgcccagcttcaccttctccagcaccgccaccgctgccgtgctggccggggctaagctggtgtttgtggatgtgcgtcccgacacgatgaacattgatgaaaccaagatcgaagccgccatcaccgacaagaccaaggtcattgtggccatgcactacgccggtgtcgcctgcgagatggacaccatcatggacatcgcccgccgccacaacctgatggtggtcgaggatgcggcccagggtgtcatgagcagctacaagggaaaagcgctgggcaccattggcgactttggctgctactctttccatgagacgaaaaactactcgatgggcgagggcggcgctctcgtcatcaacaaccccgattataacgagcgcgccgagatcctgcgcgaaaagggcaccaaccgcgccaagttcttccgcggccaggtggacaagtacacctgggtggattttggtgacagctacctgcccagcgagttgaacgctgcctacctgtgggctcagttgctgcatgctgacgagatcaacgagaaccgcctgaccagctggcaccgctaccgtgaggcattcatgcctttggctgaagccggcaagatcgagctgcagcatatcccggctgagtgtacccacaacgctcatatgttctatctgaagtgcaagaatttggaagaacgtaccgagttcatccgctttttgaaagagaacgatattctggcggtgttccactacatcccgctgcactccgccccggcgggcgagaagttcggccgctttgacggcgaggacgtctacaccaccgccgagagcgagcgcctggtgcgcctgcccatgtactacggcctgaccgaggacgaccagaacaaggtcatcgccaaagtgctggagttctatgaaaagtaagaccctgcccgcctgggcaaggctggtctgcacggcggccgccgcgctggtgtttttgctggtgtatgagtgggctgtctacggcgtgccgctgggcaggatttacctgcccgccagcgcgtggagcgacgaggtctactacgccaagcagctttcggcggtggtgacccacggcgtaccgcaagggtactttggttttaacgagtcccacgccgagatcggccgttttgccgcctgggggcctgcggcgttctatctgtacgccatcccggggctgattttccgcggacagaacgcctttttatactgcaacctgttttgggtgctggcgggctggctctgctttgtgtggggtacccgcctggactggaagcgccagctgctgttcggcgtcggcatcgccgcgctgaacgccccggtgcggtatgtgttctccgccatgcaggagccgctgcactacgcgctggtgctggccgtgctgggcctggccgcaggcatccgccgcgggtgcaggcacgcgggagcggtctgggcggcgctgtttgtgctgtgcgctgccgccacgctggtgcggccctataacgctgtgctgtggctgttcccgctggtactggcctggccccgccgtaaggcggtgggcggcacggtgatcggggcagctgcttccgccgccggtacgctggtgctgatgaaaaagttctatgcaccgtacctttttgccaatgtggatctgggcgctgtggaggaactgctccacggtcacttctgggccgctgtccgcagcgtttactataagctgttgggtgcgtggcagcaattggggcaagagatcgccgacggcacccgcgtgggcagttgctatctgctgctgtttgcgttgctgctggtcacgctggcctgtgtgatttggaacgctgcgcataagcagccggtgttctggaaagtatgcgcactggtagtcacgctggtggtgtttttggcgctgatgctgatgtaccgccctggcgaggcctcccgccataccatcgtgtatgacctgctgctgttggcggcgcttgtggccgagcagccgcccctgaccgccgctgcggccccggtgctgctggcggtgcttagcgtggcgggcatccgcatgaccacggcaagaggggacagcgatacctccacctttacgatgcctgtgtataatgcaggattatcgcaggaagttgccgacctgcaaacggcgctgaccgagagccagacccgcctgacaagcgacgacccgtgggaccatgtgtgcgcctacgccctgggcggcggcagccactttggcatgctgtacgctgtgcccgatggcatgggcctgcaatttgatgaagacacgtatcttctggaccctgccaacgaaattcattcccgttatgttatggcaaataccgacagcgacgtggcccaatatctggaagaaaacggctgggccctgctgtacgagggcacgtctgctgctgtgtacgagtgcggctaaccgccggatcttagaaaacgcgaaaggaacctgtatggaaaagcttcctatcctgaccggtgaaaaggtcgttctgcggcccatcaccgatgccgacaccgacaacatcgtgcgctggcgcaacaccccctcggtgcgcgataactttatcttccgccagaccttcacccccgaaatgcaccgcaactggctgaaaaccaaggtcgccaccggcgaggtcgtgcagtacatcatcgtggataaggccgccgatacggcggtggggtcggtgtactaccgggatgtggaccatacttttaacagtgccgagtacggcatctttgtcggcgaggagagcgcccgcggtaagggctttggaaccgagactgcccgcctgttcaccgatttcggcttcaccgcgctgcacttgcaccgcatcagtctgcgcgtgcttgccgagaacacccctgcccgccgcagctacgccgccgccggctttgtggaggaaggcaccttccgtgacatggtccgtctggacggcgtctaccgcgacgtggtctttatggcaaaaattgcacaataacgtacaaaagcagacggagaatacctgtatggataagttgaaacgactgctgaaaaagacgcccccggtgccctttggcatcgcgggcgcgttgctgtttctgctgctgttttacacgctggcgttccgcaccccgctgtggcaggtgtggatgccgcccaatatcgataacgacgaagtgatctacaaccgccaggtggtcagtgttattgcccacggcggcccgctgggctactttggctataacgaaggcaccgccgacatcggccgctacggtgcctggggcccggtgcttatctgggtctacggcctggccggacgcctgttcggcgccagcgttaacacgatgttctggtgcaatgtgctgtttctggcattgggcgtggtggtgtttacggtcgccgcgcggctgaacattggtcagcagattttgtgctacggcggcttggtctgcctgtggatgccgctggtgggcagcttttgcggctcgtccgaagcgttgcattatatgcttgcactggtcattgccggttccacagcggccttgctgcggggcggctcccattggtggctggtgcccgcggcactggcctgcgggctggagaccatcttccgcccctacgcgcttttgttctgggcgttcccgctggtggctgtctgggccgataaaaagcggcgcaatttctgcctgggcgaggcaatcttcagcttttgtgttgcccttttctctatgacgaaactttccgcctcctatttcagcggcggcggtatggatttcggcggtctggaactgctggcccacggcaaaattggcgaagccatcgtgtatgagatgaaccatgccgccaaagaattggtaaccgttggtcaggatattccgcgtacctttgtggaaaagacatacttcggccgcggctgcattatctttttgatgattttggcggtaacactggtctgctttgtgctggaccgccgtgcccaccgccccagcccactgaaagcctgcgccctgggctgcaccggcattattgcgctggtgctggtgttcctgtataacatcgcgccccgccacctgatgctgctgtccatcctgctgctggcgtcggtggtggtcgaggatgccgcccgcagccttgtctggctgccggtgctggcggtcgtgctgctgcccatcaacgccgagcgcagcaccctgtccacctattttgacgagatgggcagccagatcacggccgtggagactgccctgcaggagcgcatggacgcccgcgccagcgccgatccctgggacaacaccctggcttacgcttacgcggacgatgtgttccacggctacctgtacgctcttcccgcaggtatgggcattgagttcgatatgaacacctacatcgccgacccggaggagacaatctactcccgctatgccatggtcaaccacggcactgacgccgaggcccgtctgctggcggacggctggcagcccctcatctccaccgaggacctgatcgtgtatgaacggctttgaggaagaaggtaaaaatgcggtttgaatatataaaggaaaaacgctggataaggctgctgttttttgccttctgtgcggtcgtctttctgttggcagcatttgtcattgcacactgtgattcctttacgacgggaatatggttcccgaccagcaccaacagcgacgaggtaatttataaccgccagttggttggcgtgttgaaggtcgggagcccgcaggggtacttcggctataacgagagccatgcggtaatcgggaccttctctacctggggaccgctggtgatctggctgtatgccatcccgggctttttgtttggggcagggtataacaccatgttctggtgcaacctgttttttgctgtgctggcctgggtcgtgctggcaggccgtatgaacaggaaacagcagcttgcctttgcggctgtgctgctttgcctgtggataccgctgcggcagatttttacagcaacgtcggagccgctgcatttctttttgttagcctgcgtggtcagcggctcactggcagcggcaaagagcagcaaaaagggtgaagtggcggctgtgctggcctgcgcgttggatactatgatccgcccttatggtgtgattcttttcctgtttcctatcgtatgcggctggaaaaatccgaaacgtggccgccgcgtagcaggaatggctgcgttggcagtagcggcgactgtgctttcactgtggtcgatgaatcaactgtcggctccctacggcgaacaatctttggattttgccatctttaaaaaagcggcacacctagatattttgggggccatcagctacttttttgaaaagctgcacagcgcttgtaaaatcctgtacaatgactatatccgccccacaaaatggggtggaacagagcagtatattgcagatgtgacccatggtttcttgcgcgtattggcattaacggcagttacgattgggctgtgcatatatgacattgtaaaaaagcggcccatccgctgcaaattgtgtggcgttgtctgcgcactgacggtgctttttgccatcctggtgctatacgaccctgtgcagctgcggcgctatgctgcctttatgtgcatgattttgctgatggcttcggcggcggagaatggtgcaatcgtggttgcctgtgttccgctggcgttgctgcttatctacccgtctggctttgcccacagtgacggcctgcctgcttacaatgcagctatggatgcacagttgcagcaggtcacaacagtactggaagaaagccaggcgcagttcaatcaggaaaatgcaacggcctgggatcacacgctgacctttggctacggcgatgtctattacggttatctctacgcagtgcccgcaggtatgggcattgagtttgattggaacacctacatcgccgacccggaggagacaatctactcccgctatgccatggtcaaccatggtaccgacgccgaggcccgcctggtggcggacggctggcagcccctcatctccaccgaggacctgatcgtgtatgaacggcccgatacgcaataaaaggacgaaaataacatgcagaaaatttcttttgtgatcccgtgctaccgctcggagcatacgctggcggcggtgcacgaggaactgacggcgacgatgcagactttgccccagtatgactacgaggtcgtgctgatcaacgactgctcgcccgatgacaccatcggcaccatccgcaggctggtggcggcagacgcccatgtgcagggcgtggatctggcgaaaaacttcggccagcacgccgcgctgatggctggtttccaccagtgtaccggcgatattatcgtctgtctggacgatgacggccagacccccgccaatgaggtgggcaagctgctgaacaagatcaacgaaggttacgacgtcgtttacgccagctacgataacaagcgccaggcaggctggcgcaatctgggcagctgggtcaacagcaaaatgaccgaggtcatgttgggcaagccgccggaactggtggtcaacagctactttgccgcccggcggttcatcgtggacgaaatgctgcggtacgagcattgctacccctacgtcatcggcctggtgctgcgctccaccaagcgcattgccaatgtgtcggtgcatcaccgcgcccgggaggagggacgctccggctacaccatcagcaagctgctgaatctttggatgaacggttttacgtccttttctgtcaagccgctgcgcctggccacctacgcaggcacggtgtttgcgggctttggttttttgtatctgatctacatcatcatcgaccacttcgtccgcggcgccgcccccatgggctgggcgtctaccacggcgctgctgctgttgttgggcggcatgatcctgctggtgctgggcctgatcggcgagtacgtcggccgcatctacatgtgcgccaacgccgccccgcagtatgtggcaagggagtatatcaagcatgagtgagccaacaactgtcagaaaatattacgtagggccggatttttgaaggcttttgccgcaatcttcatcgtgctgcaccattaccagcagtacaccggcacctactaggaggacttcttcaacttttttccgctgatggattcccagctgcatgtgggctacttgacgattctgtatttcatgatctccggcttttttgccgagagccaggaattgcgcgaggacgccagaggtcagtttaaatccctgccgggtaagttctggcataaatgcctgcgcatctacccggtggcgatcgtggcctgcgggcggcggtgttcgtggtcgttgtggagctactggccatcccgttgtatctgtttgtggaaaagccgctggctaagtatatgaaaaaatatgagtggcaaaacctgcgtcctgtggacccgctgtgatgccatatccgataaaaagtaaggagggctaccatgcgcaacagcgctaaatggttcctgttgctgcacttgattttgggggtgtatgccagcagcagcgtgtgcagcaaattggcggcgcagcagccgtttttgagcgtgggattcatcctgctgtacggcggcatgctggcggcgctggtggtgtatgcctttggctggcagcaggtcatcaagcacctgccgctgaccaccgcctacgccaataaggccatcaccgtggtgtgggggatcctgctgggctttttgctgtttggggaaagcatcaccctgcgccagtttatcggtgcagcggttattattgtgggcatcgtgctgtttgtgcgggccgacaacgaaggggagggcggccaatgaaccaggcacagctgccctacgtggcactttatctgctcagcacctttttggcgtcggtgtctcaggtgctgctgaaaaaagccgccctgcgggagcataagtccctgctggcagagtacaccgattggcgcgtggtcctgggctacggcctgtttgtgggctgctcgctgctgacgatgctggcctacaagggcgtgccgctgaacgtcggccccgtgctggaggccaccggctatatttatgtgaccttctttggcgtggtgatcttccatgagaagatgaaccctaaaaagatcggcgcgctggtgctgattattctgggcattttgatttatgcattataacgcaaaaaataaaagtctgcacggcgttaaaaccgtgcagacttttatctttataagcggcctcctctgtgagagggaggctcaagaagtagttacaaccattcaggctggcgttcacggcggttgtggcggctgggctgaggattgcgctgcacctcggtggcaatggcatccagggcaaaagccagcagcatgccaaacaccacgtcaatgacgctgtgctgtttcaacaacatggtggaaagtgcgatggacacgcacagcacggcggctgcggggcgcatccaacgcaggcgcggggcatcgaagcagcgggtgcggtagtaagccagcatcagcgtgaccgagttgaacacgtgaatcgacgggcagacgttcatcggcgtatcggtgcgatacagtgaccgcaccgatttggaaaagatgtcattgccgggcacgtaacgggggcgcagggccaggccgttgggtacgatagcgtaaaacaggagcgccatcgtcatgccggcaaacagcggcaggcataaccgccagaagtccgaccgttcccccttatacaggatgaaaaagagggtaaacgggatccacggaaaccacagcgaataggggatgatcgcgtacttgcagaacgggatcaaatcatccagccgacagtgaacccacagatcgggggtctggatcgtgcgctccagcagggcgaagaaggttaagtaaaacaatgcgtacagccccataaagtagatggggtgacgcgcacaccagttgcgcatagaaaactcctttggaacaccgcagggcaaaggcctttccgcggattctatgatatagcattatacgccgggaaacccggcgaaaacaagacaaaaagacaccaagaaactctcgacattcgcaggggaatttgtgtgttttttcgcttgctttacagggcagtatttcagaagcttctatagttataaacgacggatgtgtcagaattgttgcaggaagaggggaatttttttaaattttttgcgggaaatgaaaaggcccccttgtgtaaagggggcagaatgccgtttgtgcggccccctctgggaggggggctccccccttctggcacttcgtgccacctcccccgtgccgggggagtctgtctcgcagagggaggcgttaaaggttgtgcttattccccaatcgaagccggatggtcggtgggggtatgctcgttctggtacttcagggaagcggcaatgaaacccttgaacagcgggtgagcgcggttcgggcggctcttgaactcggggtggaactgggcgcccaggtggaagtcccggcccggaatctccacagcttctaccaggcggccgtcggggctggtgccggcaatgaccaggcccttctcctcgaactcggcgcggaactcgttgttgaattcatagcggtggcggtggcgctcgtcgatctccagcgtgccgtagcactcggccatcttggtgccgggggtgatggtgcaggggtacttgcccaggcgcatcgtgccgcccttggtttccacgccctgctggtccggcatcaggtcaattacattgtgctggccctcgggggcaaactcgctggagttggcatcggcgtagcccagcacgttgcgggcgtactccatcaccatgatctgcatgcccaggcagatgccaaagtagggcatacggttctcacgggcgtactgggcggcctggatcataccctcgatgccgcggtcgccgaagccgccgggcacgatgatgccgtccacatcggcaaattcttcggcgcagcggtcctggtccaccagagtttcgctgtctacccacttgatctcgaccttgctctcgttctcgaagccggcgtggtacaggctctccatcacgctcaggtaggcatcgtgcagcttaacgtacttgcccaccagggcaaccttgcagttgcggctgcgggtggcaatgcggctgatcagttccttccactcagtcaggtcggtgggcggggtctgcaggtgcagctggcgggccaccacattggtcaggccggcggcctccagcatcagcgggcattcgtacaggctgggcatggtcaggttctcaataacgcagtccgggcggacattgcagaacatgctgatcttgcgcttgatgtcgctgccaacagggccgtcggcacgcagcacgatgacgttgggggtgatacccatgccctgcagctccttgcaggagtgctgggccggcttggacttgtactcgtcggaaccggaaatatagggaaccagcaccacgtggatgtagcagcagttctcggggccctgctcaatgcccacctggcggatggcctccaggaagggctggctctcgatgtcgccggtggtgccgccgatctcggtgatgacaacgtcggcctcggtgctcttggccaggttgtagatgtagctcttgatctcgttggtaatgtgggggatgatctggacagtctggcccaggtaggcaccctggcgctctttgttcagcacattccagtagaccttgccggtagtcaggttggagtatttgttcaggttttcatcggtaaaacgctcgtaatggcccaggtccaggtcagtctcggtgccgtcgtcagtcacaaagacctcgccgtgctgcaacgggctcatcgtgccggggtccacgttgatatacgggtccagcttctggcttgccactttcaggccgcgggtcttcagcaggcggcccaggctggcggcggtaatgcccttgcccaacccggaaacgacgccgccggtaacaaaaatatacttcgttgccatgatacatcctccctctacacataaagacaatgtcgcacaatccttagcgccgagacggcgggaattgtgcggcgctgattacaacaataatcaacttattatacgcttgtcagatgccggattgcaataggaaagcgccaactttttaatttcctaattttgtaaagtctgcgctctccagcagggcggtgtggcgccgtatctggcggcagatctccgccgccaatacctgcatatccagcggttttcctacgtgggagttcatgcccgcttccaggcaggctttcacgtcgtcggcaaaaacgttggcgatcatggcgataatggggatgccgctctccggcgggcaatgctcgaaggcgcggatggcgcgggtggcctccaggccgttcatctcgggcatcatcacgtccattagcacggcgtcaaaggtgccctggggcgcgttctggaacaactccacagcctcgcggccgttctcggcggtggtgatggcggcaccccgttcttccagcagggtcacggcgatctcccggttcagctcgttgtcctcggccatcagcaggtgcaggccgtgcaggtcggcgggcggctcctcctcgggggtgtcgtaggcggtctcggccaggggcagactcaggcgcacggtgaaggtggaacccttgcccggtgtgctttccacatccagcgagccgtgcatctggtccaccagctttttggtgatggccatgcccaggccggtgcccttgtaggtagtgcggctggtctgctgctcctgagtgaaaggctcaaagatgtgctgcaaaaattcctcgctcatgccgatgccggtgtcggcaatctcgatgcgcaggtgtaccagcccttcctcgaacagggtctcgcgggcatagaagttgatggtgccgctgtcgggagtgtatttgacagcgttggacagaatgtttaacaacacctggcggatgtgcagctcactgccccgcaggcggggatgccagaaggggccgatctgcttggtcagggtcacgtcgcggtcgttgagctgcccctcgatgatgccgcagcaggagttcagcaattcgcgcaggtcaaagtcggcgtccagcatctgcatggtgccgctttccaccttggccatgtccagcacatcgttgatgagggacagcaggtggctggccgcaccgcgcatcttgaccaggcagtctttcacgcgggcctggtcgtcaaagttggcttcggcaatatccagcatgcccataatgccgttgatgggggtgcggatatcgtgggacatattggagaggaactcggtcttggcttggctggcttcctcggccttgtgcagggcggaggccatcttgaggcggaagctgcgtgcccgcaccagcaggatggcacaggccgccacaaacacagcgcatacgcacaaaaataccatgaccagagggtattggtagagcaggcgcaccagagagaaaggctgctcggccagcgtggtatagctgcgggtggcttcgtcgatctcctcatcactcaggctgtggacgcccttgttcaggatgctcaacagctgcacatccacatcctgcgagacaccgatggcaaaatccacggtgccgccggtcagggtggtggtcagatcgttgcgcaggttatcgtacagcaggcgctcggcctggtaggtgtaggtgtaataggcatcaatcttacccgcgcgcagggcggtcaggcaatcggcaaaggaggggtaggtctggcagacggtgtttttgctgggcaggatgatgcccgtggcttccttggccagcaggtctaccgtgccgatggtctgcatctcggtatccctgcgcagccgcacccaggagaagcccgccgaaaggtacgggtcggtgagcttgtagcccagctgctcggcgtgggacaggtcgttgaagaacgccaggctcagatcggccttgccgttctgcagcaggtccatatagtcgtcgcgggtgtcggcatccagcagtcggtagcagatgcccgcgcgccgggccagcaggtcgaacagcttgaccgagatgcctgtccagctgcctttttggtctttgtaggagtaggggtagcggtcggggttgacggctaccgtccacaccttgctgcctgcgttggtatcgtacaggtaggcctgctcctccgcggtcagggccagcgtggagctgcggctggtgttggagtacctctcgtgcaggtcgacctgccaggagggttccggccggtccatctctgccagggcgccgttcagcagggccagtgtttgggtgtcgcccttgcgcaccgccatataaaacggcgtttcatcgaaggtttccagcacccattcatcggtggtaatgcggttggcgttggtcagtgccgcggtgatttcccctttgtgcagggcctcggccagctcatcgtccgtgtcgtaaaacaccgcggtataggtaaagttatggtcggcggcaaactcaataaagctctggttgcggccgttgccgtcgtgggagaagcccaccgtcatgccgttgtaggtgctgtactccccggcaatgacggtgcggttgccggcacgcaccgtcagcatgctggtgatggtgcccacagggctggtggtaaaatcaaaccgatcctcgcggtcaggcgtgatgcgcaggtcggggatcacgtcgatctcgccgtcctccagcatctgcatcacgtcgttcacgtcgctgtcgtaaccgtcgtattcgtagataacgttgcgataccgcgcaattttttgcagcagctcatagctgtagccgctgtagctgccgtcagcgtcgatcatattaaagccggtgtaggcatagtaacccacccgcagcttttgggtagaggaaatctcctcagcctgcgcatgcaggccaagggcaggggagaggaacaggccgcccagcagcaacagcgccgccgccagggccaggacccggtgcagaaggcagggacgttctgcagcattcatcgtggcaacactcctgacagagaggaatggccccctctgggagggggctcccgcgaagcgggtgaggagagagcctaaggcaacaccgcacaattcccgccttacggcttaagcaccgctccggcggctgcggcacggcaactgcgttgccaaaatgctcgataatacacaaagtattatctgcgcttttggcttagcagctgccgcacctcgctcgccgtatcggcacttagaattatgcggtattgccctaaaataattgcctctccctcagtcggcttcgctgacaccgcttacgcggccaggctcctctgtcgcttcgcgacatctccccacactgtggggtgtcaccctcgcagagggagccttataggtgcttacagttcctggatcgctgccaacacctgggcatgggcctcctctacgggaggccacagggcagggtcggtcaggggcttggagccgcgcacagcctcgcacagggccgaggatacctgatacagatgctccatccccaaattctgggccacgcccttcagcgtgtgggaagcccggaacgcggtctcccaatcttgggcggtcagggcgtctttcagctggccaaagctggggtcgttggggtacttcagcacaaacttgcgcacgagggcttcgctggggatgcggcggagggtgtcatcgtaattgccgccaatgcgggtgtaaaattcctgcagggtcatgatcgtgaatactccttttaaacttccttattctacatcaaaatcccgttgtggggggggg

SEQ ID NO: 7878 - DNA, 7409 bp, Unknown
  gut microbiota DNA sequence
gcacggtggatggcatcggccagcgggtgggcaccgtacacgccgccaatgctgacggtgggcttgaagttcgggcagcccggcacggtgatgctctccatccggcggcgaatctcctccaggcgggaagcaaaaatgtccgaggggatgctggggaagaacagcaaaaactcgtccccgccgtagcggatgaggatgtcgctgctccggatgcagtcgataatgccgcgcacgatcaggcgcagcgtttcgtcgccggcctggtggccgtaggtgtcgttgacggccttaaaattgtccacgtcgatcatcgctacgccctcggcattggcgaaagcctcgctctgctcggtgtaatagcggcggttgtaggcgttggtcagggggtcgcggtagagggcctggctgtaggcgctcatgttatcgctcagcaggttgcggccgtccacggtcagcagcgggttttctttcagcttacttaccagttccagtacgcagggggtgccgtccacctcaatatacttggaaagcacctgataggccttgccgtcgttgaactccagcttggagatctggttatgctgggtaaaggcgcggaaggacgaacagttgctgcagggcaggttcttgttccacaccgcatggcaggggtgattggtgggtttcaacttgccggcttcatcaaaagtccatacagtattctttttcacatccaccaggcgcactacgtcaaagatctgttccatgccgcgcatcatggcctgcacgccctcggtggtgaccaggttgacattctcgcccttgtccggcagctctgtgctctgcacagggtgacattcacccactgcgccgagatagaccgggttggtatcgtccaaccagatggcccgggcgtaaacgcggaaccagcggtacttgccgtccaccggcagctgggcgcgcatttttacctcgggattctgcggggtggtggcatgcaacagtttttgcagcttgcgcatatcatcctgcgagaagaaatactgcgaggtcgcctcggtcagctgctgggtctgggggccatgcagatgccgcgccgcgtagtccgacagggtcagcacattggtggcggcgctgtagtcgaactgcaccgagtgggtgtggtggaggaagaaatccgtcttgatggaggatgccgacagcgcacggctggtgttgtcctgctcgggcaggttgctgttgtgcagcaccttggcggagatctgctgggcttcggccaggtagtcgtggtccaccgcgccgctgtgcagtttgctgcgcagatcctcgctgatctccaccaggcactccatcagcaggggattgaaggcgccgcactcgccgtttaagatcatgtgcagcgcggtatcatggtcaaaggcttttttgtagcagcgctcgctggtcagggcgtcgtagacatcggccagcgccacggcctgggcaccgatggggatgtcgtcgcccttcagcccgttggggtagccgcggccgtcgtagcgctcgtggtgccagtggcagatctgacgcgcggtcttgaccagcggcgcgtcctgctcgaacggcagctcgtgcaaaatcttatcaccgatggtggtgtgggtcttcatgatctcgaactcttcctgcgtgagcttgccgggcttgttcaggatggtttcgggaatgttgatcttgccgatgtcgtgcagggcggatgccatggagatgaggctgatctccgtctcggtcagcgggtacttgtcggtcatcgtgatgagcttgcgcaggatcatctcggtgaaggtgcggatgtgcagcacgtgcatgccgctctcgccattgcggaactcgacaatatggctgaggatggtaatcatcagcgagttggatttttcgttttcgtagatctggtcggccaccagctgcatcaggcgcttctgcttgccgtacagcatcagggtgttgaccacacggcggtgcaccaccgccatatcaaaggggcggctgatatagtcggtcgcgcccagattgtaggcgcgctctacgaaagaggtggcgttttcggccgagatcatgatgaccggcagttcgtcgatccagtgatattgattcatggcagtcagcacatcgaagccgtcttttaccggcatcatgatgtccagcagcagcagatcaatgccgctgtttttctcgatcatttcgatggcctgctgtccgttttctgcttccaggatctcgtattcctcgcccagcatttcggtaaggatggcgcggttcatctctgaatcgtcagctattaagatccgttgtttatcgctcattcagtaccccagtttctcttgcggtaaatataaggcaacaccgcacaattcccgcctaacggcttaagcaccgctccggcggctgcggcacggcatctgcgttgccaaaatgctcgataatacacaaagtattatctgcgcttttggcttagcatctgccgcacctcgctcgccgtatcggcacttagaattatgcggtattgccttaacagttttataccttattatagtatacgatatgacaaaaaagcaatagaaaccgataaataaaagtcgaaaactgtcaaatgagacaaaaaaggggggattggatgccgataaaaaaggccccctctgggagggggttcccgcgaagcgggtggggggaggctatctcgcagagggagcctttcaatatcaaataacgtaatcgttccccacctgatccgtgtccatcaggtcggccagggtgatgccgtcgaaaaagtcctggatcatcgtgttcagcttgcgccacatgggcagggtgcggcagtccgccatgcgggggcagtccacatgctcctgctccaggcaggccacgggggccaggctgccctcggtaatgcgcaggatggcgcccacggtgtaatcctcgggcgcacgggtcaaccgataaccgccggacttgccccgcaggccggtgaggtaacgctccttcaccagcccttttacgatggcctccagatatttttccgagatgtcctgccgataggcgatctcttttaaggggatatagccatcgcgctggttctcggcaatatcgaccatgacccgcagcgcataacggcccttcgttgaaatcatcatgtgtggtactcctttgttctatattcctattatacaggtcggtaaatgggaatgcaacaggggcgggcaaaatatttctgcaaaaattccctcaaaccctattgacaaatagggaattgtgcggtacaatccaatcaacctacaagtgaggtatgaatatatgaaaacgaattccatgtttcgatgttgatagcagccgcttagccaaaggcccctctgtcgcttcgcggcatctccccgcactgtggggagtcaccctcgcagagggagcctttaagaacgtacaataacataaacaattaccttatataaattaggaggacaccaccatgagcaaaatctacacttccgctgaccagctgatcggccatactccgctgctggaactcactcatatcgaggctgccgagggcctgcaggccaagatcctggctaagctggagtacttcaacccggccggctctgtcaaggaccgtatcgccaaggccatgatcgatgacgccgaggccaagggcgtcctcaagcccggctctgtcatcatcgagcctacctccggcaacaccggcatcggcctggcctccgtggctgctgcccgcggctaccgcatcatcatcgtcatgcccgagaccatgagcgtggagcgccgccagctgatgaaggcctatggcgctgagctggtcctgaccgacggcgccaagggcatgaagggtgccatcgccaaggctgacgagctggctaaggagatccccaacgcctttgtgcccggccagttcgtcaatccggccaaccccgccgcccacaaggcaaccaccggccccgagatctgggaggacaccgacggtaaggtcgatatcttcgttgccggtgtcggcaccggcggcaccgtgaccggtgtcggcgactacctcaagagccagaaccccaacgtcaaggtcgtggctgttgagcctgccacctctcctgtgctgagcaagggtgttgccggcgcccacaagatccagggcatcggcgctggctttgtgcccgacgtgctggacaccaggatctacgacgaggtcatccccgttgccaacgaggacgctttcaccaccggcaagctggtcggccacaaggagggcgtcctggtgggcatctcctccggcgctgctgtctgggctgccatcgagctggccaagcgccccgagaacgccggcaagaccatcgtggccctgctgcccgataccggcgaccgctacttgtccaccccgttgtttgcagactgattgcatctaactgaataatttgctataatgcaaggggcagacccatgtctgccccttttttgcatgatttaggagggttccctatggaaaacacacccggcgcgctgatcgccatgagcggcggcgtggacagctctgttgctgcctacctgatgaagcaggcgggctaccgctgcatgggcgctaccatgcgcctgtaccagaatgaggacctgggccaatgcagcttccacacctgctgctcagccaaagatgtggaggacgccgccgacgtggctttccagctggatattccctttgaggtcatcaactacaccgatgaattccgcgagaaggtcataaaaaagttcatagctacgtatgaaacgggcggaacacccaacccctgcatcgattgcaaccgctacatgaagtttgataaaatgctggccttcgcccgggagcacggcctggattatgtcgttaccggccactatgcccgcatcgagcaggaccccgacaccggccgctggctgctgaaaaaggcgctgtacggtgaaaaagaccagagctacgtgctgtatgtcctcacccaggacgagctggcccacaccaggtttcccttaggcggcatggacaagcccagcatccgtgcgctggccgagagggccggcttctgcaacgcccacaagcacgacagccaggacatctgctttgtgccggacggtgattatgtcggttttatggaacgatacaccggcaaattttacccggacggcgattttatcgataccaccggcaaggtagtgggccgccaccacggcgcggtgcgctacaccaacggccagcgcaagggcctggggttggctctgggtgcgccggtttacgtctgtgataaggacatggagaaaaacaccgtcactgtcggccccgagagcgaactgttcaccaccacgctggtagccggggacttcaactggatctctatccccgaactgaccgcccccatgcgggtaaaggccaaggcccgctaccgccagcccgagcagcccgccaccgtgcgcccgctgccggacggcaaggtggaagtggaattcgatgagccccagcgcgccatcacccgcggccaggccgtagtgctgtacgatggcgacatcgtagtcggcggcggcacgattttgtgaatataaataggtatcgcagggagggggcaagtcccctcctttttgcgtggcagattcaacagaggccggagctttaacacatcccccgccccacctctgggttaacgttagttgttaaatgagccgtgaaagcccccctccggcactgccattttttgcgtaaaaatcctattttcctattgacaaggcggtttatccatgatatgatacaaacaacctacaaatcacataggtttgttcttgcgagaaccctgtatgtgcttacaaaaaggaggtgcaaagcgtatgactactgtgttcggcagcctgctgcggcagaatttccgttgtggccgaatgtgctgctcccgggcggaacaggtcgggtgcagggcgcggtacgctttgcattgtcggtaaaaacggcgctgtcctgttattctgtccgggagctatacccatcgggagccccggctttttctttatcaaaaataacaaataacagaaatgaggattttatcatgagcgagcgtaaataccattttgagaccctgcagctgcatgttggccaggagcaggctgaccccgtcaccgattcccgcgccgtgcctatttaccagaccacttcctacgtgttccataacgcccagcacgccgctgaccgcttcgacctgaaggacgccggcaacatttacggccgtctgaccaacaccaccgaggatgtgttcgagaagcgcatcgcagcccttgagggcggtgttgccgctctggccgttgcctccggcgctgccgccatcaactacaccatccaggccctggcccagaacggcggtcacatcgttgcccagaaaaccatctacggcggcacctccaacctgttggagcacaccctgcccgctttcggcgtgaccaccacctttgtggatgcccacaatctggccgaggtcgaggacgccatccaggagaacacccgcgccatctacctggagaccctgggtaaccccaactctgacattcccgacattgacgccattgccgagattgcccacaagcacggcctgcccctggtcatcgacaacaccttcggcaccccgtacctgatccgccccattgagcacggcgctgacattgttgttcactccgccaccaagttcatcggcggccacggcaccaccctgggcggcatcatcgttgattccggcaagttcgactggaaggccagcggcaagttccctgctttctccgagccgaaccccagctatcacggcgtcagcttcgtggacgctgccggccccgccgcctttgttacctacgtccgcgccatcatcctgcgtgacaccggtgcctgcatcagtccgttcaacgcctggctgctgctgcagggcaccgagaccctgtctctgcgcctggaccgccacaacgagaacaccaagaaggtcgtggagttcctgaaccatcacccgaaggtggcccacgtcaatcatcccagcctgccggaccatcccgaccacgccctgtacgagaagtacttccccaacggcggtgcgtccatcttcaccttcgacatcaagggcggccagaaggaagcctttgagttcatcgaccacctgaagatcttctcgctgctggccaacgtcgctgacgtgaagagcctggtcatccatccggccaccaccacccacgcccagctgtcccccgaggagctggaggatgtgggcatccacgagaacaccatccgcctgtccatcggcaccgagcatatcgacgacatcctcgccgatctggaccaggctttgaacgcggttgagtaatttgtaaacagtttttagagggaatagggatttaatagccgccgc

SEQ ID NO: 7879 - DNA, 10523 bp, Unknown
  gut microbiota DNA sequence
cgttacaaacatggctgccagccaaaaggcgctggcggcggcaaactgcacgccctgcccggcgagaatatcctcgctgcggttggcgttcatgccagcctgcatcaggcagtagggccaaaagagggaataccccttgctgcccagcagcatgcccacgatgccgccgacaatggcaaggaagatcggcaccgcaaagctgcggaggaccatggccagcagcaattgcgctgcaatcaccgccagcgcccctactgtgccccgcagcccaaacaaaatcagttccaccggcggccaatcgggaaaccgggcaaacagcttgccgcaggcaacaaacagtgtcagttcccagacttgggtgaacagcgccagcttaaacaccacgcagaacttggccaaaaacagatccagcggcggcacgggggcggccataattaaattccagttgtggcccatatgctccagccgccacaggtaggccgcataggccgccaccatggcagggaagaacagcatcgagtaaaacagcgtgtgctgggtccacaagctgtaccagcgctcgtgcaggatttcgagattttgcaggtagttgaaggtgccgtaactggccgagatcagcggcatcacaaaaaacagtagccagatcggcgagcggtgcagcttgcggttttcggctgcaatacagcgtttcagcatggttcatacctccttattgcacattacgcgccagcaaacgccaaacaaaaagaccgccagcccaaaggtaaataccaacagcccccagttgcagggccgcgtgccgtaaagtacggtgcggctggcctggtcccagaccttgacctcgtagctgcacagcggcacaaagtagccccagggcacaaaatagctggcgatctgcggcataaaagccgagaacagacccagcagcgcaccgatgacgcccacgcacaccgcaggcaggggattgctgaaccacagcgccagcagcagctccgaaaagtaaagcatggtgcagaccgtcagcgtgcagaggttgaggtaggcaaactgcccggcaggaaaggcctcggtgtagccttgcgtgtgccccagcagcaggaggacggcggcttccagcgcgaccatcagcacaatttcccccagtccaaacaccgccttgccgaagaacaaactgcggcggctttgcagggtgtaaagcagtttggctgtatagcctttgacctccacatcccacaaccggctggccagtacggccatcagcaccggcagcaaaatggtattgatgatgggcgcgccgaaaaacagggcgctgtaggcgttggccagttcatcctgcccggtgggcgcggtgctgcccagccagagatagaggatgaccgcaaaggtaaggcacagcacaagatcgtggcgtcggcgggctttctgccattcggcatgcagggcttgcagcatctcagcccacctccttcggcgcggtcagcgtcaggaaaatttcctccagcgtcctggtgtgctgggtcaggcccaccaccccggcgccgctgtccgctaaggcctgcaccaggcccgccagcaggtcgtcccgcaggggcggcagggcgatggtgttatcctcgcccactgcggcggtgggcagcccgttggcctgcagcaccggcaaagccttggcagggtgcagcagccgcagggtcagcgcacccttgctgtggcgctgcagttcagtcagcgggccttcaaacagcatccgcccatggtcgatgatgcccacatgctccaccatctgctccatctcgcccagcagatggctggagatcagcacagtggctctggtggcggcgggcatggtgcggatgagttcccgcatctcctggataccggcggggtccaggccgttggtgggttcgtccagcaccagcagcttggggctgcccagcagggccatggcgatgcccagccgctgcttcatgcccagcgaatactgccccaccttgcggtgctggtcattggtcagctgtacaatgtccagcacacgggcaatgtccttgtggggcacaccttttaagtcggccacgatctccagattctcccgcgcggtcagatgcaggtagccggagggcgattcgatcagactgccggtctgccgcagcagagccaggcggttggcgtcggtcatctcccggcccagcagccgcaccgtgccgccggtggggtgcaccagacccagcagcatcttcatcgtggtggatttgcccgcaccgttggggcctaaaaagccgtagacacagccctccggcacggtcaacgccagatgatccaccaccagatggctgccatagcgcttgcacagggcgtcggtttcaatcacgttttgcatagtcacacgctccttactcgtatcttaagtacaagcccagtataaatgccaaatcttatctgccccgtaagctcagcttaattttgccttaagattttccacgaacgctggcagcggtgcgcggggcgtgtataataaaggtaggagttgagactatgcagacgatttacgaagcatcgattttattggtggatgataaccccgatctactggtgctggtgggggacagcctgcgcacggcggggtatacctgcatccgcaccgctgccacatgtgccgaggcccgggcactgtttgccgctgctgcgccggagttgatgatcttggacatcaacctgccggacggcgacggctttaccctattgcgccagctgcacgccaaggctgatgtgcccgcgctgttcctttcggctcgggacgctgacgctgaccgcttgctggggctgggccttggcgcggacgactacctgaccaagccctttttgatgcaggaattgcttttgcgggtgcagcgtattttgcagcgcgcctaccgggcagaactgtgccgcgccgccccgcctgccctggagctgggggactgccaggtcgatctggccgatgctgccgtgtaccgccctgacggcgtgaccctgcctctgaccgccaccgagcgcgccctgctgcaaaaactggccgataaccgcgggcacatcgtgacctacgacgccctgtgcgaggccgtctggggcgcggattattacggctgcgagaacgcgctgaacgtgcatatccgccacctgcgggaaaagctggaggaaaacgccagccgcccccaatggctgttgacggtgcggggcatcggctacaagctggcaggggaggtgcggcgatgaaaacttttgcgcggctcatccgccgctatgtactgaccacggcgggtatcattttggtggtggtggcgctgctgctgggcatgacgatctacgccggcgtgcggtacaatggcgcatccgacagtgtgcaaaaagtgggtgccctggccgaggccctgcaccccaccgccgacggcctgcaatgggacgccgcccacaccccggccgagtggatgcacggctatgcctgggccatggtgctggacgaggacggcaacgttatctggcagcaagacctgcccgaggcgctgaaccaccgctacaccgccagcgacattgcagtgttctcccgctggtatctggccgattaccccgtgcagtgctgggcggcggattatggcctgtttgtggcagcagagccagtcggcagccaatggaaatacaacatcaccgccccgcaggcacgcatggaggcaatggtcggcgggctgctgccggtagcagtgctgctgctggccgtggtgctggggtgctgcctgtggttcagctggcgcggggcacgccatttgcaggcggtggccgacgggctggacactttagcccagggcggcgcggtgcagctgcccaccaccggctttgccggggagctggccgaaaagctgaacgagaccggcgagcagctgcgccgccgcaatgagatcatcgcccggagggacaccgcccgcaccgattggatcgcaggtgtcagccatgacatccgcacgccgctggcgctgatcctgggctggggcgagcagctgcagcaggatgaggccctgcctgccgcagcccggcagaaagccgcgggcatctgcacccaaagcgagaagatacggtcgctcatcggcgatttgaacttgaccagcaagctgcaatacggcgcacagcctttgcgccgcaaggctgtgacggtcggcccgttcctgcgccggtgtgccgccgaattttacgaaagccccgccgcaggtgacagcacccttgaactggaactgacccaggcggcagaacacacggtggtgcaggcggacgaagccctgctgctgcgggccatcgaaaaccttttgcacaacactgtcggccacaatgcagcccccgtgcatgtcaccatccgggcggatgcggcggacggcatgctgaccatccaggtgaccgacgacggccagggctacccgcccgccgtgctggccgtattgcaggctggcgaaacaggggagaatcccccgcacattttaggcctgcatgtggtagagcagatcctagccgcccacggcggcaccgccgcttttgcccaagccctgccccacggcgcggccgctgctttgaccctgccgctgtaaaaacaaaacgccccctgccggaaagctccggcagggggcgtgctatttataagctgggtgcggtggggtaaacttacttcatcaggccgcagaccagctgtgcgtaggccacgggatcctcgatgggcaggccggcgatcagcagagactggtcatacagcagctcggcatattggtccaccttggcagtgtcgccagcctcgtgggcggctttcagcgcagcgaacacagtgtggttggggttcagctccagcaccttggtgctttccacatcaccggaaccaggcatcttgcgcaggaccttctccatctccatcgagatgccgccctcgctggacaaggtaacaggatgctcctgcagggtggggttgaccttgacttccttgaccttgccgttcagggccttcttgatctcctcaaacaggtccttgttctcgttggcggtctcctcggcggctttcttttcctcctcggtctccaggcccagatcaccggcgttgatgttcttgaattccttctctttgtaatcgtgcatcatctgcaggcagaattcatccacatcctcggtgcacagcagcaggtcgtagcccttgctcagcaccagctgggcgttgggcagcttgcccaggcggtcagtgtcgtcaccggcagcaaagtagatgcacttctggccctcggacatcttctcgatgtactcgtccagcgtgaccatcttctgctccttggcggagtagaacatcagcaggtcgcccagcaggtctttgtgcatgccgtaatcgccgtagacgccaaacttgatctggcggccgaagctcttccagaaggtctcgtatttctcgcggtcgttgaccagcatggcgtgcagctcgttcttgatcttcttctccaggctgttgcggatgagcttgagctggctgtccttctgcagggtctcacggctgatgttcaggctcagatcctcgctgtcgacaacgcctttgatgaagctgaaatagtcgggcagcaggtcagcgcacttttccatgatcatcacgccggaagcgtagagggccaggcccttctcgtactccttggtgtagtagtcgtaaggcgtgcggccgggcacaaacagcagagccgtgtaggtggcggtgccctcagtgcggctggtaatgacccgcagcgggtcagagtagtccatgaacttgttcttatagaactcgttgtagtcctcgtccttgacctcgctcttcgggcgcttccagatggggaccatgctgttcagggtctccagctcggtgtaggtctcgtactctggcttgtagtcgtcgccggcgtcttccggcttcggcttctggcgagatttctcacgatacatcgtgatgggaaagcggatgtaatcgctgtatttcttgacaaggttggcgatggtgtaatcgtccagatactcgctgtaattctcggagtcggtatcgtctttcagcaccaggatgatctcggtgccgacatcgtccttgtcggcctcggtgatggtgtagccttccacgcccttggactcccacttccaggcggtgtcagcgccctgggcacgggaaatgacggtgactttctgggccaccataaaggcagagtagaagcccacgccgaactgaccgatgatgtcgatgttatcgctctggttctcggtcttgaaatcgagggagccggacttggcgatggtgcccaggttcttttccagatcttccttggtcatgccgataccgttatcggtgatggtcagggtgcgggcttccttatcgggctggatatggatcttcaggtcatctttcgtaatgccgatgctggtgtcggtcaggctcttgaaatagcgcttatcgcaggcatcggatgcgttggaaatcagctcacgcaggaagatatcgcggttggtgtagatggagttgatcatcaagtccatcagttttttgctttcggctttgaattggtgcatagccataataaaaggacctcactttatttatgtgaattagcactcttttgatttaactgctaatgctagtttagcactcttgcaagcaaactgcaaccccttacggcggatttaacagaaattttaaaatcctcttttcaaatggggatttttgcggtatgcttactttatatataaaatataataaggaaagaagaagccctatgcaattatacacccacactttccccagcggggccaaacttaccggctacctgcgggacgaaaccaacgagatgcctgccttcaatatccgcccggcgatgctgattttgcccggtggcgggtatgccttttgcagcgcgcgggaggcagaccccatcgccatgcagtttttgcaggcgggctatcagacctttgtgctggaatacacctgtgcccacacgccggagcaggccccgctgcgctggcagccgttgatcgacgccgccggcgccatcctgcatctgcgccgcaacgccgccaaactgcggctggacccgttcaagatcgcggtctgcggcttctcggctggcgggcacctggccgcgtccaccgccattttgtgggacgccgcccccgtgcagaaagccctgggtatcaccgccgaggaagcccgccccgacgctgttgtgctgggctacccggtcattacgtcgggcatcaagacccacggcgggtccatcgccaacctggccggggacgataccgccctgcaggcgatcttcagcctggaaaaccaggtgcgcggcgatctgccgccgttcttcatctggcacaccgtggccgaccaggctgtgccggtggaaaactcgctgctgctggccagcgccctgaccgaaaaccacgtgccctacgagctgcaccttttcacccacggcgggcatggctccagcacctgcacgcaggaggtcaacacccccaaccgccacaacgccgcctgggtgtccctgtgcaccgattggctggctgaaaccttacattttcatctgtaacagggaggggagtatatgaagattgcattttaccaaatgcgccccttcgacgagcaggcgtacatcgagcagttcagcagggagttcggcatcgactacgtgacgatccccggcgcaccctgcccggaaaatctggacaaggccgcaggctgcgatgctgtcagccagaatccctgcgaaattctgcccgagtacgtcgaggcctgggccaggatgggcgtaaagtacctgctttgccgcagcatcggctacgatcatatcccgctggagactgccaaaaagctgggcatgcgggtagcccacagccactacccgccggaaggtgtggccaactacgccatcatgctgatgctgatgtgtacccgcaagatgaaccagaccatgctgcgtgccgccgcccaggattacacgctgcccggcaagatgggcaaggatctgtccaactgcacggtaggcgtcatcggcaccggcaaaatcggccgcactgtcattgcccatttgcagggcttcggctgcaaaattttggcctacgacctgtaccagagcgacgaggtggcccaaatggccgagtatgtcccgctggacgagttgtacgcccgcagcgacgtcatcaccctgcacaccaatgccaccgccgagaaccaccacctcatcaatgccgagtcgctggccaagatgaaggacggcgtgctcatcgtcaacaccgcccgcggtgcgctgatcgacgaagaggcgttgattgctgcgctggaaagcggcaaggtcggcggcgccgggctggatgtggtcgagggggagaacgacctcgtctacttcaaccgcgccggcgctgcgctgccccaccgcacgatgaacatcttgcgcagtatgcccaacgtcatcgtcagtccccataacgccttttataccgacgtgaacgtggccagcatggtgcgcagcggctttgaggaactgacagactttgccgcgggccgctccaacccctgcgaggtgacgctgtgaccgtggaacccggccgcagcggcgagaactgggatgacctgccgcgcattgcggcaggggacagctttgactttgcctgcgccgggtgcggcggctgctgccgcggacggcgggatctggtgctgtccgggtacgatctgtaccgcatcgcccggcggctggggttgtcgccccgcatcgtggcgggagcgttctgcaaaagctacctggccccgcaaacgctgctgcccgccctgcgcctgacccccgaccccaggaccggaaactgccgcttttttgagggcagcgcctgcgccatccatgcggcgcggccgctggcctgtgcgctgtacccgctggggcagagcatcgaccctgtgacggcgaagatcgaatattacgtgcagacgccgctttgcggggcgcggacagacggtggccgtgtgctgaacgattacctgacagattccgccattttggaccgtgcgggcatcgacgcccgctgggccgtggtgtgtacccgcttgtccgagcagctgcaggctgccgctgaccacccgcattttgccgctgccgtaaagcgtgtggagcgggcactgtattatgactacgaactgggggacgatttttacccgcagttccaacagaatattgagattttgcagccgcttttggagaagctgctggcataaaaaatacccggaccttataaaaaggttcgggctttttgtttagatgaacattgaacgaaaatagaggtgtaggggtggatgcttgcatcgacccctacagatagggttcgagtcaatcagcagaagaaaaatccgcccggccgcccggtgcagcagcagcttagcagctggcagaacatcatatacagccagaaggacaggcagaaccggcccggattgccgctgggctgggcgtagggctgctgagacccagcgtagctttggccgggattttgcagctggtccagcaggttttggtaggcgtagttgttgggctccatgttcacggcggtgcgggcttcgtcccgggcgcggatgttgttgcccaggccctggttggccagcgcggcgtagtagtgccactgggcggtgcgctcgttctgggcgataccgttcagggtgttcagggcttcttcataaaatccgctgcggatgtagttggctgcggcgcgcagttcggggctttcctggccggtggtgtaggtctggcgcgccccgccggaggtgctgtaatacccaaacccgaacggcccaaagccaaacccgccggttccgccgccaaaggggttgccgtactgctggttgtagccgctttgctggccgtatccctgctggctgtagctgccctggggattgccgtagctgccatagttctggccgccgctctgcttcatccgcatgatttcgctgtaggcggcctgtacttctttaaaatgctcctcggcggttgggtcgttggggtgcaggtcgggatggtactgcttgcatttctggcggtaggcttttttgatggtctcgtcgtcggcaccgggggtgatgcccaaaacgctgtacggatcggtcatttctgcttcccctctctgtgcttacggattggcgcatacttgctccacacgccggaataaatggtattgtacaatagtttcccctccggggtctcttttaatatgggcaaaagttcaaactgctgggcgcacagccccatctgctgggtcagcaggtcgtggcagcggtcctcaaattcagtggggagcagggtgtcgtgcagctcttgcagcgcgttgaactgccccttgcgggcgtccttgggcaggtcgtcgtaggcgtccattaaataaatgaatccgcccaacccccggcccatagcctgcagggtgggtgcccagatgtcctcccggcaggcgaacaccgcgcccagcaggtcgccaaaggcgcggcataaagc

SEQ ID NO: 7880 - DNA, 228 bp, Unknown
  gut microbiota DNA sequence
tcttgagtagtgcagaggtaggcggaattcccggtgtagcggtggaatgcgtagatatcgggaggaacaccagtggcgaaggcggcctactgggcaccaactgacgctgaggctcgaaagtgtgggtagcaaacaggattagataccctggtagtccacaccgtaaacgatgattactaggtgttggaggattgaccccttcagtgccgcagttaacacaataagtaa

SEQ ID NO: 7881 - DNA, 7008 bp, Unknown
  gut microbiota DNA sequence
aaaactttgctgtacccaggcataatatacccccctcaattatccactcatcattattatataatatttcttgtaataacgctttccgttcatcaagcgttctctttttgccatattctttggcgttattatcccattgaatatcatctaagtcgaaatgggaaatattatacttttttgaaagtgcatttgctaaataggtttttccagaaccactgcaaccaataatatgtattttcataagtcagtattctccacgaatcccgatttatcacaccagcttttccatccgctccaccgctttcctggcccggtcatgcccggcctcggcggcttttttgtaccaggccagggcctgggcggcatctttggggccgcagcggccgtcctcgtaccagacgcccagctcgtacatggcgtcgggcaggccctctttggcggcgcgctcgtaccattgctgggccagaggcaggtcttttttcacgccggtgccgttctcaaaacagcaggcgtagttgtacattccccgggaatacccaccctcggcggagcggcggtaccactcggcggcggctgcggggtcggcctcggtgccgatgcctttctcggtgcagtagcccaggcagcactgggcgcggggcaggccctgctcggcggcggcgcgatacagctctaccgcccgggcctcgtccaactccacgcctttgccgaactcatagcaccagcccaggcagcactgcgcccgagcgaagccctgggcggcggacttgccgtaccatgcggcagccagggtcagatcctccggcacgccctggccgtactcgtaacaccagccaaggttgcactgggcgggggcgtagttggcctcggcggcgcggcggtaatgggccgtggcggtgggccagctctgctccacgccgtcgccccgctcatacagggcaccgatgcggttctcggcggcgggcaggccaagccgggctgcgcggcggtacaggtgcagggcttcctcggggttgcggcgcacgccggcgccccgctcgtaacagaggcccagattcaacaatgcctggggcagctcctgtgcggcggccatgctgtaccagcggatggcatccccccagctttggggcgtgccggtgccctgctcgcagcagacggccagggcaaactgcgcctgggtgtccccctgcctggcggcgcgggtgtaccactccacggcctcggtggggttggcgggtacgccgcggccgtactccaggcagatggcatagcaggcctgggccggggcatagccctgcctggcggcgcgcaggtaaaagtcggcagccagcggtgcgttgcactccacgccaaagcctttctcataaaactggccgcacataaacagggcacgggcgtcgtcctgggcagcggccttttggtaccaggccagggcagcttcgtcgtttttggcggtgccgcgtcctaaatggatcatctgtgcaaggttgcgcatggcaggcacaaaccccgcctgggcggatagggtatacagctgcacggcgcgcacggggtccgctgccacgccggtgccgttggtgtagcagatggccaggcagcactcggcccgggggtcgtgctgcagggcggcttcgccgtaccagcgggccgcagccttggcgtcctggggcacgcccttgccgaactcataacaccagcctaaattgcactgggcctgggcgtggccctggcccgcggcggcgcggtagagcagcacggcatccggccagctttgggccacgccctcgccggtctcgtaggccaggcccagcatgcactgcccggcagcgtcaccctcggcggcggctttttcaaagtcagaaaaggcgtcatcaaaacggccgtcggttttggactcgatgcccagcgccacccaatcggcggcgactaagtcgctgccatcgctgggcagaaagaacgccccgccgcacagcgggcacatgtcggggaccgcatggcgggtcacaaaccggcagaccgggttctcgcaatgatggatctccataaaacgcttcctttccctcaattataaacattgtagcatagctgtgcgccgaaaaaaaggcttcgcggcgctttttcggcgcggcgtgtcccagcggcggtaattattgctgtttgcaaagctttatcgggtttccccgctctgcggcaaaaacaaacgtccgggcgtggtatggtaatggcaccgatcggcatatagataaagggggacatgctgctatggctacttatttaggagaaaaactgcatacaaacgtacaactgcctgctatcttgcccggtgcccgcggggcggcgctgctgtggcagggggcggcggccgccacggggctggtgctgggggccgggcaggtctacggcggggctgcaccctttgggctggccttcacgatggtctgtccgccgctctacctgtttgccgcggcaggtggcgtgctcatcagcagtttggcgtttcagcctgcggtgctgggggtcaaggtcattgcggcgctcacggccactgtggcggtgcggcggctgctgcaggacaagcccaacacgaaaaacgcgggcatctgggccgggtgtctggcgctggcgttggtccaggcggccgtactttttttcgcgggcggctacgtcgacctgtcccaggcggcggccaccggcaccacggcgctgctggcggcggggtctgcctggctgatgcgccgtttcccttaccgggagccgcgggggctgtgcctgtggctggccatcgcggccgcctgcctgcagcggtgtgcccgcgggccgttggctccgggcctggcggtggccgcagcagccgggctgtgcgccgcctttgccggcacgttggaggagaccgctgtggtcagcatcacgctggcggcggccatcacggcggccagcccgaacctttgctacgcggcgctggcggtggcactgggaagcctggcggcagcctgtctttaccccggcgagcgcctgcgctgtgctggcgtttttgcggcgggctgcgtgctgggagccttggccgcccccgatgccgccggtgtgctgccgctgtttgtggccggggctgtgggccttggcgcggcgctggctgtgccgggggcgtggctgcgggtggtgtttccgccgcccgccccgccggtgcagacccaggggttaagcggtgccgcccgccgcctggccggtgtggcggataccttaagcgacatcgctgacacggtcaacgccgtctgcacccgccagatgccgcccaaaggggaaaacttcgacttcgtggtggagcacatcgcccgcaccacctgccagacctgcacccgccgcagccggtgctgggtgcggggctatgccacagccatggacgggctgtaccaactcaagcccacgctggagagccggggccgcgtggaggtggaggacctgcccgggcagctgtcggtgtgcatccacccggcggacctgtgtacggcggccaatcatgggtatcggctgtggcgcagccgccgccagacgcgggcgcgggcctccatgctgcgcaccgccctgactgagcagtacagcgccatggcgggggcgctggcgcagctggcgggcaaactgggccaggctggcctgcccgatccccggcgggaggaaaaagtcgcccagctttttgcggggctggggctggacgcgctggaatgcagcgttacctccgacctggcaggccgtctgactgccgccgtgaccatcgcccgcacccggtttaccgaggaggagatcaaggccctgaccgccgaggtgagccgcatctgccgccgggacatggacctgccggaagttacccactgccgcacggtcacaatgctgacctttggcgaacggccgttgtttacggcgacatttggcaccgcaggacgcccggctaaggggcagaacgtcagcggtgacgcgctggattgcttttgcgataccagcggccgcgcccaactgctgctgtgcgacggcatgggcaccggccgcgccgccgccgtggacggccagatggccgcccgcctgacgggccagctgttgcgggcaggctttgccgccgagagcgctgcgcggctggtcaacgtggcgctgggcctaaagagcgccgagcaggaatccggcgccacgctggacctgctgacggtggatctttacacaggccgggcggggttgttcaaggctggggccgcgcccagctttttggtgcggggcggcctgccccgcatgctggagggcgccagcctgcccatgggcgtgttggaaagtctcgtgggccgcagcaccacctttgcgctggacagcggggactgggtggtgctggtcagcgacggtgcgctgaccgatggtaccgaatggctgacgcagcaattgcagctctgcgcccgcctgggccacaccccgcagcaggccgccgaaaccatagccgatgccgccgcccgacgggccggggaaaaacaggatgacatcaccgtagcggtgtttgcgcttggcaaagccgggtgaacaggcagcagcccggccctgccgcaaggtaggcggggccggcatccgcgcgcaccccccacaaaaatacattcaatatctgttttcacaaaatattttcagaaatttcaaaaaaactgtttaaaattctgcaaatctgtggtaaagtagtatcaatcggtgagatgtgttcaaattcaccacttagagagcctgctctctgtaaaatttaaaacgccgcagcgggcacgcagcgcatggcgggcccccggcgcgaaaagaggtttgattgttccatggactatgcaagcaaagacatccgcaacattctggtcgccggccacgctggctgcggcaaaaccacgctgaccgaagccctgctgtacatgagcggcgcgaccgagcgcatgggccgtgttgaggacggcaccaccgccagcgacttcgaccccgaagaggtccgccgcaaggcatcgctgaactccagcattgtccccgttgagtacgagggcatcaaatataacctcatcgacgtgcccggcctgttcgatttcgagaccggcgcagccgagggtatcatggccgccgaaagcgtgctgatctgcgtgtccggccgttccggcgtcaccgtcggcgccgagaaagcctaccagctggcccttaaacacaacaaggcgcggatggtctttgtcaccaaagccgacctggaaaacgccgactacttcaagatcctggagcagatgaagatcaagttcggccccagcgtctgcccctgtgtcgtgccggtccgcctggacgacggcaccgtcgcctacatcaatctgttcagccagaaagcctttaagtacgagggcggcaagcaggtccagatcgacctgcccgacatcggccaccgcttcgagggtctgatccaggccatgagcgaggccatcgccgagaccgacgaagccctgatggaaaagttcttcgagggtgagcctttcaccaccgaggagatcgtccagggcatggccgcgggcgtccgcagcggccagatcacccccgtattctgcggcagcgccgtcaacaaccaggcgttggatatgctgctgtacaacatgaacgtcctgctgcccggcgctgacaccgccgctgccgtgggcgaggataaggacggtaaccctgtcgacatcactgccgatcccgctgccccgctgtgcgcctacgtctttaagaccgtggccgacccgttcgtgggcaagatgagctttatcaaggtgctgtccggcaagctgaccgccgccagcaacactgtcaacgcccgcaccggccagccggagcgcatgggcaagaccctcatcgtctgcggcaaaaagcagaccgacactgctgccatcaccaccggcgacattggcgttgtctccaagctggccaccgccaagaccggtgataccctgtgcgaccccgcccgcgtggtggcgctgcccgcacccgcctaccccaccggctgctaccgcatggccgtcaaggtcgccaagaagggtgacgagggcaaggtcagcggcgcgctggcccgcctgattgaggaagatcccgccatcaccttcgtggtcgatcccgagaccaagcagcagatcatcagcggcctgggcacccagcatttggaagtcgcccttgccaagttgaagaataagttcggtgtcgagatcacgctggaaaccccgcgcgtaccctaccgcgaatccatccgcaagagttgcaaggcccagggccgccacaagaagcagaccggcggccacggccagttcggtgatgtctggatccagttcgagcctatcgagggcgaggacatcgagtttgccgagaacgtgttcggcggcagcgtaccgaagaacttcttccccgctgttgaaaagggtgtccgccaggcggccgagcacggcgtgctggccggttacccgatggtcggcctgaaagccaccctgctggacggcagctatcaccctgtggattccagtgaaatggcgttcattatggccgccaagctggcctacaaggccgctgttcctgaagctggccctgttctgctggagcccatcgggtccctgcaggcccatgtcccggcagacaacaccggcgatatcatgggtgaggtcaccaagcgccgcggccgtgtgctgggcatgaacccggatgaggacggcctgcaggtcgtggaggccgaggtgcccatcgccgagatgcaggatttcaccaccttcctgcgtcagctgacccagggccgcggctggtacaccttcgatttcgtccgctacgagactctgccccagatgctggaggccaaggtcatcgagcaggccaaagccctcggcaacttcgccgacgaggactaacctactttctttggaaaagaaagtaggcaaagaaacttttaatatttcctaaaacaaagagcgatgcagtgggaaactgcatcgctcttttgtgttgggatgaacg

SEQ ID NO: 7882 - DNA, 748 bp, Unknown
  gut microbiota DNA sequence
ccctgtgtctatgactgcctgtctgcccgctgcgccgagttggtcggccacaatgccgtgctggtcagcagctgcgagctggagtatgccatgaacggcatccccgccggtatgtataactgggaggagtacatctacgccgctgagcgtatctgcaactccaccaagctgcccgtcatcatcgatggcgagaacggtggcggcaccccgatgcaggtctaccgcaacgtcaagcgccttgctgaggttggcgcgatggctatctctatcgaggataccaacagtggtgccttcgccaccggctatacctacgccagtggttacggctatatggatgccgagcgctgggctgccaacgtccaggctgccgttgaggccaccaaaggcaccgactgcatgattatcgcccgtaccgattgcaagggtggcggtgcaccacagaccggtgctattgccaagtttggcggtatgggcctggaagaagccatccgccgtgccgagatgggctaccaggcaggcgctgagatcaccatgatccagaacatctgccatgctgactgcgaggacgagtgccgcgagatcagccgccgcctgtccaagccggggcgctacctgttctatcccgatgtccacgctaccgatggcaagcccgatgctacgctggagcagatgcaggaatggggcttccacctggtcagcaaccatgtcgccatgaagggcgctgcccgcggtatgctggaattcttcc

SEQ ID NO: 7883 - DNA, 2557 bp, Unknown
  gut microbiota DNA sequence
gcagggcgacctgcggatgttttgcgccgccgggccggagcagggaaaatatgattttgctgcctgcaacccgccctattttacggcaggaccccaaagtcccgacccggtgcgggccgccgcccgccacactgtgacctgcaccaccgaggatgtggcccagtgcgcccgccgcgctctgcgggatggcggccgctttgtgctgtgccaacgtcccgaccaactggtggaagtgctgtgtgccctgcgcgccgcccggctggaacccaagcgactggcctttgtgcgccagcgcaccggcagcacgccctggctgtttttggtcgaagcccaaaaaggccgcaagcccggcctgaagctggaaccggatattttgatcgaatccggcgtggcgcggtacggaaaataaatctataaaataaaaacctccccgtgaatctgtaggggtcgatgctcgaatcgacccgcgggcggatgctcgcatccgcccctacggcttcaggggaggtttcgtttttattttacagccttacttcatccaatccttggccgcatctgccatggcggtgttgatggcatcggcggctccctcgctgttagccacagcagacaggtaaactttgatcttcggctcggtgccgctgggacggaccatcagcttggcaccgttgaccaggcggtattccagcacgtcggcgcggggcaggccggtgccgtcagcgtcgtaatccaccacttcggcgacctcgtacccggcaatggttttgggggcgctggtgcgcagcccggccatgatgccctgcatcttgtgcatgccggtctcgccctcaaaggtaaagctttccagtgcgttgcggtagaaaccgaactccctgtacagtgcgttcacagcgtccagcaggctcatgccctgggcggcgtagtaggcggcggtctcgcaggccagcattacggcgttgacggcgtccttgtcgcggacgtgtgcgccggacaggtagccgtagctttcctcaaagccgaagatgtagcgttcggggtggccctcggcctccaggaagccgatctgctcaccgatgaacttgaagccggtcagggtacggcgcagctccacgccgtactttttggcgatgggggtggccatgtcggtggacacgatggtagtcacggccacggggtccttgggcattgtgccgttgccaatgcgggtgcggcagatgtagtcaaacagcagcacacccatctcgttgccggtgatgagccgatagccgcccttgccatccggcacggcggaacccatgcggtcgcagtccgggtcggtgccgagcatcaggtcgggctttacggtgtcgcacagcttcaggccggtctccattgcctcgcggatctctgggttggggtaggggcaggtggggaaggagccgtccggcttctcctgctcgggcaccacggtgacctgggtcacgcccatgcggtccaacagcatcttgacaggttccagaccggagccgttcagcggcgtgtagaccagtttgagtttggagacatcgttgccggggcgcagggccagtacggcatccacgaagtcgcgcagacacttgtcgtcgatccagacaatcttgcctgcggccacggcggcgtcaaagtcggtcagctcgatggaatcgaaataatcgtgcttgtcgatagcagccagcacggcagcggcggcttccagcgtgatctggcagccgtcggcaccatagaccttgtagccgttgtacttggcggggttgtggctggcggtcacgcagatgcccgcgccgcagcccagataacgcacagcccaggacaacgccggggtaggctccagccgggggtacaggtaggcggtgatgccgttggcggccagcacacgggcggcctcgcggctgaacagctcgcccttatggcggctgtcgtggccgatggctacttttttaggcaggcctgcggcgttgatgtagtccgccaggccttgggtagcgcggcggatggtgtagatattcatgcggttgctgcctgcgccgatgacgccgcgcagaccgcctgtgccaaaggccaggtcgcggtaaaagcggtcgttgatggcatcggcatcaccccggatgccgtccagttcggtgagcaggtcaggatcctccactgcgcgggcgcgccagaggtcaaacagttctgtattggtcatggtagaatgtcctttcccgggccggcgccgcaatcttgcagcgccggcagatgcgattcaaaatcggcatagtggttgttataaatttatcacgtttacccccgaattgcaagcatacggccccgaaatcggccctgccgcccaatttaaaaaagtaaaaactttttttgaaaaaacgcttgacatttgggggaacggatggtattataatacacgttccgcgccggtagctcagctggatagagtgtctgactacgaatcagaaggtcgggagttcgagtctcttccggcgcaccaaaagcctgtgacataaaggatgtcacaggcttttttctttgttgcatcgcacaaaat

SEQ ID NO: 7884 - DNA, 15886 bp, Unknown
  gut microbiota DNA sequence
agataggagtaaccgcctttccccttgccaagcagccgcgttaccgtataggggtgcccgtttacctgtaatgtatccatgctgcacctccgttacaactgctgcatccagatgcgctttttgaacagccgcagcgagagcgccaggcggacacattcttccagcgagagcaaaaagtacaccggcgcgacgggcagtttcagcacaaaggccgccaggaaccccagcggcacaccgaagccccaggtaccaatgaggtcgatggccagggtgtagttggtcttgccgccgctttttaaaatgccgccgcccaggatcatgttctgcaccttgaccggcgagatgacggcgaacactaccagcaataagtaggccgtggctcgcacctccggctcgacacggtaaatcgtggtgtacagccgcccgaacaccaacagcagcgccgacaacaccagcgaggccgccagcccgcagcgcatcaaccgctgggcgtcgcggtaggcgcggtcgtactcctgcgtgcccagcgacttgccaataaggatggccgccgccttggacagacccgacagtgcgcccaccatcaggcattggatgggcgtggtcatcgtcatagcggcgcaggcctgggtgccgatgttgccgtagatggcggagtagacgttctcgcccaggctccacaaaaattcactggccagcagtggcagcagaattttggcgtaggtaagcagttccggccgggtgaagcccagcgtgaaccgcagccgccactgcttttgccgcagccgcacggccaaaaacaggtagacaagtaagcaggacaccacctgcgcagctacgctggctactgccgcgccctgcacccccagtgcgggcagcccgccgtggccgaagataagcaggtagttcagccccgtgttgatgcacagcgaggtcatgctggcaatgagcgggaagacggcggcctccatgcagcagagcagtgtctccgccatgccggacagcgccgccgggaagaacgaccaggcgtaagtctgcaaatatgtctgccccagcgcgcgggtggcatcgtcctgggtgtagaggcccaaaatcggcgcggcaaaccgggtggagaccagcgtaaacaccgccgcaatggccagcgacaccagcaggttgacgctgtagctgcgggccgcgtttttacggttgccctgccccagatattgggaaatgaggatggcccccgccgctgtgacggcgctgagcaccacattatgaatagatgcaaacttgccgcccagcccgatgcccgaaatgctggcgctgcccagctggccgatcatgacctggtcaatgatgctgaaggaggcccgcagcatactttgcagcgtgaccggcaaagcaatgtgcatcaggctgcgggcaaaggcgcggtcgccaaaaaagccggtaatcccgcccccggaaacagaagaagaacgaaaacccatacagacacctcttacaaattactacactgtcattatactatgattttccttgcatttcatccataaaaatcttatacttataacagaatcctatgtttttgcaaacgaggtgccgcctatgtcctatctgcccccaaaccctgccattctgcccgatgggcaggaggtaaaagtccacggcagcgaagccttcccttttgctgtctactgcggtatcatccccacgtttatcccggcctatcccctgcactaccacgaggaaatggagctgatttactgcgaaaccggcagcggcagcatcaccattgaccgggcaacggttaccctgcacaccggcgatgtggcagtgattttgcccgggcagatccacgccatcgcggcagcgggggccgggacgttccgctattacaacatcctgttccgcttctcgctgctggagccgccggacagcgagacctaccgccgctttttggccccgctggcggacggccgcatggaagtgcctgcccatatacaaaaagacagccccctgggtagggagctgcctgtaaacgtaaaaatgctgattgaaaaccgcaaagaaaacacggcactgcgcataaaagcctgcctgtacggcgtgatggatgcgctgtgcaaagctgccacgcccgcccggcacccggccggggccgagcaccgggacacccgccttctgcgccagactgtgcagtacgtggaccgtcactatgcggagaaaattacggtggcggccatcagcgcccagtgcggctacagcagcagccactttatgaagcggttccacgacctgaccggcaccagctttgcgcagtacctcatccactttcggctggaaaaggccgctaccctgctgcggggcagccggtacaccgtgctggagatcgccgcacggtgcgggttcagcaatgcatcctactttacgcgggcgttcacccggcagtatggggtgtcccccaccgcttatcggcagggcggcgatagaacagacgattagccaatcttttctaccttgataaccgtaacggcgatgggcgtatcgttcagcgcgtggacggcggtgcgccagtagtagagcggctcgccggtggaaaactcaaacaccatctcatccggggcaatgccggtaaagttgacctccatcttgtaggtctcctggttgataagcccgtggcgggcatagatataactatggtcgaacccactgcccgtcagggtgacgcggtagctgccggggaagagcatccaggcttcggtcagcagttcgccgccctcgttcagggtcacggtgtcggcgtccgccgtgccgttgatgacgctggatttttgcagcgccatcgtgtgggcggggatgtcaacagcaggctcctcggtcaggccatggatcggctccacgctgcccagcaggatgccgtccagccggtaatagtgcagcgcgtagtcgctgcgggccagctcgtcctcatcgataaaggcgtagagcgtgtccggcgcgagggtgttcatctcccctgccagcgtcaccgccgccaggttgccgtccatgtggcccatgtagaagctgttggaggtccagccgtggtcggcggcaaaggcaacgaggtcccagaagtcgtcgtgttcaaagtcgaagctggcaaaggccaggcggctgaactgcccgctggcagccagctgctcccaggccgggtcggtcagttgggtggtgtcctcgtaataagcggcatcgtggtaggtggtgtaacgcttggtaagctcggtacgcaggccaaagccctgggcggcggcgcagacagccagcagcacagcagccgcggcaccgttccagaaccgcagcaccagcccgcaggccgccacggccagcagcatgccggccagccaggccagacgggcgcagctggagaacatggcccagaaatccatcagcacctgcgggatgggcacggtaaacagcgtgcggcccccgaaggtgacggtgttgcccatcgaggcgacggcgtccagcaccagcagcacaacagcggcaaccacaatatgggtatggcggcggaagaactctaccgcttttttgcgttgtaccaacaaaccggccagtgccagcacgacggccgcggtggtgcccaggcccgcgtacacttcttgttcccagctggcacccagacccggcacaaacaggttggctaggtcggcaccgctcaaatagccgttggagtagcccgcaaagttggcggcaaaggctcccagcacaaacagttcggccagcgccacggcgcaaaagctgacgatgggcagcacaacggcggcggggccgcacttttccagcccgcgctgcacacaggtggccaccaacaccatacccaccatgggcagataatacagatggatgcccgcacacagcagccccaacacaccccaccacaggcagagttttccggtggacggcctattttcggattgctcggcacacagccacacccacagggccagcagcaccagccagttggcggccagcgccgtgtgggcaaacatgcggatgttcagcgccgggaacagcaccagcaccccggcgcccagtacgctggcccggttttttgcggtatcctgcgggcgcacgccgccgatgcgggcaatgagcgcctgggccagaccgccctgcatggcatagcagaacagcccccacagccctaagtactggaaacgtgcgggcagcaccccgcccagcagcttgcagaccacggccagcagcgggatggaatcggtgtacaaaatgctggtgcggtaggggtaaatggcactgtagtttgtgcccagatacggcaggtgccaaccgctgcggcggtaaaacacccagcccagataatgctgggacgggtccgggctgggattgttcaagatccagtccacacagacaggatccagcacccgcacgccgtatagtacgagaaaaaccagcgccccaagcagggcgccggtcagactccagcgatgtttttgcaaaaatgcctttgtctttgtcatacggtcccccgcttagcgcacaaaggtggtggaaagggtggtggaccagctttcgcccttcttcaggctggcggcgcaagggcgctgctcccactccagggggccgttctcctcgccgggcaggctgtgccagggctcgatgcagataaagtgcagcggctttttggcggcggaccagatcagtacgtaggggtagccctccacgttgcaaatcacgctgcggccggtgtccttctccacaacggagacatgggcggtcttcaggttgaccatgcaatggctgtcactgtcgaacaggtcgtcggtcagggggatggtctcggtgttgcgggccagatagtaactctggccattcagcaggccgttgggaatggcgctgacgcacagcggggactccagcccgtcaaagcggatctcgtaatcctcggtggtatggcggtcgtcaaagggcagcgcaaaggcggggtgatagccgatgccaaagcgcagctgctcctccacggggttctccacagtcagggtgtggtggatggtctcgccgtccagcacaaaagtggagcgcagcacaaaggcgtagggccatttgggcagcgtttcggggttggcgtgcagctcaaactccagtgtgtcggcggtgtgacgggtcatggcgtgctccacatcgcgggcaaagccgtgctggccgccggcgtattccacgcccttggcaatcatcttgccgccggtcaacttgccggtgtaagggaacagaatgggcgcgtggcggccccagacggaaggatcgccggaccagagcagctcggctccggtgggcttgtggatgacgctgacagcctcggcaccgtgggtgtcgacggtcagacgcagggtatcattttcgatcgagtaccgcataggataagtacctcctgccgaaatttttacggttttactataaaaccgcacagccccgcggggcgggaattgtgcggtatggccttagaaaatcagttgcagcaccatgcctgccgcggcgccaacggcccacagcagcccggtcataaacaggttttgcttccagctggggttcacacgccacaacacggccaggcccacgcctgcgccggcggtcagcccggcaaacaggctgccaaaggtgatggccccctccatatacaactgggccagcagcacactggcggcgcagttgggcacaaggccgaccagcgcggtcagcatcggctggaagatgcccataccgcctaagataccggtgatggcgtcctcgcccacggactcaaaaataagcccgatcaggaagctgaagagcagaatgaacacgaaaatttccagcgtgtggcgcagagcggccaggaagatgctgctggtctcctcgtgctcctcgtggcagtccacctcatcggcgtggccctcatacccgccgtacagcgagtggggcagcaccttgcgcagcgggaagtccagcagcacgccgcctacgatggcaaaaatgatcttgcagacgatcagcaagaccagggtggtccactggctcggctcagcggccagcagcggaatggcctcgtcgctggtggcgataaatacggccagcaatgtgccgggggtgatgacccggctggcgtagaagttggatgcgaccgcgctgaaaccacactggggcacacagcccagcagtgcgccgggcaaaaagccccagcgaccgccgccggcgagggcgctttcaatgttctcgccgtggtggcgctccagccattcgatcagcagatatgccagatacaaaaagggcagcatttttacgccgtcaatcagcgcatccaacagtgcatcgagaaaaatttccatttagacctcattatatactttttatgggatttgcggtgccgtagtattgtttgtgcaaactacagctttatacaaagctgcgcagcagccttacggccgggcgcaccactttatcggggatacgggcgcggaaccgcgctaccgtgcgggcagaaaacggcatctcatcgctgaaagtttccatgcccaaaaaatactgcaggtaggggctttcccgcaccagctgcaccacctcgcggtccgagacctcgtaatgcagctggataacacggcagcccagcgcgatgcgggccgagatggccgctttgccgctgggggcaaacagttcactatagccctgctcaaaacggtcccaatcgatggcttcggccagacggacccagcggtttttatcgcgcagttctccatggtacggcggcagatagtcataaatcgacatctgcttttctttggcacggtacacaggcgtaacccctctctacaacaatacggaaatttaataccgctggaacagcgggaagatcatagccagcacgcaccacgcggcctggtacaataccaatgcgggcagcggcagggtggccaggccgccggtcagggtcagcagtacgcccaaaacgcagctgataagcaccgaggcagtgacgacgacggcggacttgcgctcgccctcggcagcaccggcggcagcttccaggccgcccacaaagctggcaaagctgcccagatgcagcatgttgccgtcgctttccggcagccaggcggtggccgggttcatcagctcatgctcggcggtgttcagcaccttcacggccccggcgggcagactgtaggcagcctccagcagggcggtatcgcagttgaaatcgtcgcagtcgacgatcagcgacaggccggaatggcgcaggctgtccagcacggcggcagtgtccgggtcacgctggtaggccacctggaacatggcaaacagtttgccggagacggccaggtagatcatgcggcgctggttgacggtatggtgctgctcgtactccaggctgggcagcttgacgccgtaatcctgcatcaggctgcggttgcctaccagcacgcggcgcttgttgacccagccgatgtagcccttgccgtagacggcctcgcggtcatccaccttggcaatcatgctgcggtcgcccagcatattcaagaagacatcccgcagcgtggggcaggcctcagccatgatggaggcggcatagacgatggccaggtcgatgggggcgtttttgatgggcttgatgcccgccagtgtgacgcacccctgggggaagagatcccgcgcggtgacctggatgacgttgatgcggcccagctggcggatgtcacgccagcccggcacgaccgcgcccacctgggcggcgctgcgctgcatcaggcgtgcgggcagggcggccaacagcgtgcccgccagcggcgcggccaagcacaaaatgctggccaaaatggtgacagcgctggtcaggttgtgggtgcggatgacagtgatcaggaagcccagcagcgcgcagccgcctgcggcccaggcaaactgctgctggtttttatcgctggtaccggcagcggcgctgctggccaggaaaccacggaagatctgtgtcgggcggctgaccagcaccgacgggtgcggctgggccaacccctgagaggccgcccgcagcgcgccggcgtctttcagccggtaggctacggcgtggtctacatttttgctgacgagctggaagttatcccgcacggtggcggcgttcatccgcttgcctacggtgttgacgcagagcaccagcgcggcaggcccggccagcagggtgacctcgttcgtgtagccttttgtgaccagcacgatgagtgcctgcaacagcgcacccactacggccaaagcggtcaggctgtcgggggtcggctttttggccagaccctgcaaaccgttcagcagtgttttccagttgataccggcggccgcggccagcagcaccagggctacggccgggtagacggtttccccggccagaacgccgggcatggcgggcagggcggcggcaatgaacgccagcaccagcagcaccagagccgccgcgccgcttacgatgcaggcggtagtcagatgcagcaggttctcgtccagctccttgcgcacggcgggggcgtcctcggcgctctcgtaatcgcggcggcgggacacggggatctcggcagtgtcaaagggctgggcagcggaatccgccgattcatcgtcggccttgccgcccagatggaacccgcccaggcggaacttgtccagcaggccggtgtgagcggtgctctcccctgcttcctcctccagattggaggtgagccgggcggccatctcgtcgtagcgagtggtctcgtcggagatcgcgccggtgttgatggcgttggcgatgttatccacaaaggagccggtggcaggctcgacgggagcctggcccaggttttgggtaaagccggtgtgggccggtgcggcaggggccgcgtagctgcccagatcctgcgtgaagccggtatggacaggctgtgcctgcggggcctgccggaacggctgcgtctgggcaggctgggcggcatcgggcgtgaccggcgttaagcggatgcgcccggtcagggtatccaccagatcgtccacggcatcgcgggtgtggtgatagctgtcagccatcagggtcggctcgtccacagcaggagccggggcagccgtatcgggctgcggtacggtatcgacctggggcgcgggctgcggcgctgcgggttgggcaggctgcggctgggccgtatggggacgcacggcgttgtaggcgctcatgaactgctgggtgctgtccgacggcgttggcgcgactgaaccgagctgcatcgtaaagccggtggtggtctggccgggctggatggcctgggcaccctccaggccgggcaggtccagcggctcgcctaccggtccctgcagcggcgtgggctgagccgggggcggcgtgctgcgcttttgaccgggggtgaattccacggtgctgcgctttttacggtagatcgtgctggtggcgcccgggtcgcgggcaggggtgcggctgtttttttgctcgttgacgacgcctcgcagcatttgcagtgtgtcgcctgtcagggtagcaccgaccagcgtgctgctggaagattcgctttggggctgggtgtatttgctgcgccagacgttggtgctggtctccggctccggctggatggccgggcgcagcggagccatcgtcggctcgtcctgccgctcctcggggatcatcagctcgtcggtggcgtcggtatcggcgctgcagccaccgccaaacaggctgttcaagaagccgtgcttgcgggcaggcttcggcggcggggcctgctcggcctcggcttcatccgggaaatattcatcctcggtctggtaggaactttgcgcgggggcatcgatgtggccgccgcccagcgagacgttgatcggctcgaaatggtcggtgtcgtcggcgggtttcaggccgaaaggccagcgctttttcttgccggtgtcgtggaaacggcccttttcatcgggcacgacggcgacggaatcggcgaagaagcgctggaaatccgctttgccctcgttcagcgcggtggtgttggaaacatccccctccggggccatcttgcgcagaaagtccttgatgatgccggtgcgggtggtgtcctgggtgctgccctcggtgggggcgggttgctgcaccggccgggcaggctgcacattttgcacaggctgcacgggctgggccggacgcactggggtcgaaggggcggcagccggctgggcatccgggacagattgcaccggccgctggggggctgccgcacggggcgtttccgttgtgcggcgggatgccggtgcgggcatggaggcaggtgcagaagttgccccggcactgcgcataatttcatcaaaatcgtcagggccgctgaaatcggaaaaagcgatctggctgtcctgggtcggcgtgttctgcagcggcgtggtggaaatacccacgctgcgcaaaatttcatcgacctgatgatcggtgacgctggcgcgtacgccgtccgccgcctggcgctggttcaaatccgccaggatacggtctaccgaatcattggtacgtttgcttggcatttttatgctccctttataaggtagagatacaaattacttcttggcggtgcggcggcgcagtacgtcgtagcacaggatgccggcagccacgctgacgttgtagctgtccacgccggtggactggccgggggccatctccagcgtgacggcggcgtcgcaaagcttgcgggtcagggcggaaggaccgccgccctcgctgcccagcaccagggccaccgggccggacaggtcggtcctggccagcggtgcaccgcccaggtcagcgcagtagacgaagatgttatgttccttaatagtgcggatggcctgcgccaggttggacacgcgagccaccggcaggcgggccgctgccccggcgctggatttcatcacagtgccggtcacgccgacgccgccgcgcttgggaatgaccacgccgtgggcgccgcacaggtaagccgagcggatgatggcacccaggttgtgggggtcctctaccccatcgcacagcaccaggaacggtgcttcgcttttggcctcagcagcggcaaacaggtcctccagcgaggcatactgcacctcggcggcgcgggcggccacgccctggtggtcgtcggtgccacagatcttttgcagcttatggcctggtacccgtttgaccaccgcgccggtctgcttggccagggcggtgtaatagccggcaaccggctgcggcagcgagtctgccagatagacagtatccaccgcgccgccgcttttcagcagctcggtcacggcatttttgccccataccagcgtgtcggtgcgcggttcagcctgctcgcgggcaatcttttccatagggtacctcctgcggggcattgccccggtaattgtcgaaaaatgcaccagcggtgaaaaggctggctatacagataacagtatagcacaccccgcggccttttgtcacctttattttgcgctttttagcgggtctgtactgcttttttacaactgctgccgccgcaatgcgccaaaagtacaaagaccctctggcgggtgcgcgataaagcgttgtttatacaaaccgtagtggaaaacccactttccccttgttgaaaactctgttgaaaaggtggaaaaccagcatagcagccaagttttccacaaaaacgggggtgcgttttccacaaggggtggaaaagttatccacataacaggttggataaacccttttgtcaagatgggaaaaaagctgatttcttgcctccaattcccccgttaagctgacaaaactgccaaatttttgcaaaggctggcaatctttggtacagtgcgccaaaagtgcatgaaggttctgaaatttagctgttgattttttgtcaaagtcgggttataataggattatcggtgggctgaacgccagtgccaccgcttaacaatcatgtggaggtatgtgatatgctggtaaatgctaccaatatgctgctgaaagcacgcgatggccactatgccgtcggtcagttcaacattaacaacctggaatggaccaagagcattctgctcactgcacaggagatgaactcccccgtcatcctcggtgtttctgagggtgccggcaaatatatgaccggtttcaagaccgttgccgccatggtcaaggccatggacgagagcctgggcatcaccgttcccgttgccctgcacctggaccatggcacctacgagggcgctaaggcctgcgttgccgccggcttcacttccatcatgtttgatggcagccactacgacatcgatgagaacgttgccaagaccaccgagctggttgccctggcccatgaccacggcctgtccatcgaggctgaggtcggttccatcggcggcgaggaagacggcgtcatcggtatgggcgaagtcgctgatcccgctgagtgcgccaagatcgctgccctgggcatcgacttcctggctgccggcatcggcaacatccacggcaagtaccccgccaactggcagggcctgaacttcgaggctctggacaagatccacaacgccaccgataacatccccctggtgctgcacggcggcacgggcatcccggctgacatgatccgcaaggccatcagcctgggcgtctccaagatcaacgtcaacactgagtgccagctgagcttcgccgatgctacccgtaagtacatcgaggccggcaaggacctgcagggcaagggcttcgacccccgcaagctgctggctcccggcgccgaggccatcaaggccaccgtccgcgagaagatcgagctgttcggctccgccaacaaggcctgattttaatacgcaaatccaaaagcccgaaggtgcaatgccttcgggctttttgctgtttacacacctccccgtcccccggcataccgtggtacaaggaggtgtttactatgccaacaggcagtatccaagtttatgcgtccgtggcggggcaggcggcaccgctggcaggcgtgcaggtggcggtgctggatgaatccggtgtgaccgtggcccgcctgaccactgacgaagccggtgcggcagaagccacaaacctgcccgcgcccaacgccagctacagcttgcaggagaccaacacgacggtgcgcccctatgccgtctaccgcctgcgggccaatgccagcggctggcagagccagattttggacggcgtgcaggtatttgacggccagcagacggtggcgcggctggagtttttgcccggcggcggggacggaaacgctctgcccgcacgggaagccgcgccccagaccgtcaccatcccaccccatgttctgtttgcgggcgacggcggcagcggccccgcgcccgaggagcgcctgcccggcaacgtgctgagcgaggtggtcgtgccccgcaaaatcaccgtgcatctgggccgcccggcggccagcgcccgcaacgtgacggtgagcttccaatcctatatcgccaatgtggcgtccagcgaagtctatcccacctgggtaggccatgcagtttacagcgctcccctgccccggcgggccagccgcgcctgtacggcggcaaagtcggcgcgggagacaagcccctcatgggtacccggcaccacgatccattgcgaccgcggcaaccgcacgctgcgggcagatttgtagctgactttgcggcggcggccctgctctaaatcgcctgcgtaggtacggttggtcagcatctggtgcagggtggcgcggctccactggccactgccggtgtgggccggtccgccgtgctgctggcggtagacgctgggcggcgggacgccctcggcgtttaaaatatgggcgatgcgcgcggtgccgtacccttgcagatacagcgcaaagatgtgccgcaccacggcggcagcttcggggtcaggcagcaggcggctgtggtcggcggggtctttgcggtagccgtacagcgcaaaggtggcaatgtaatccccctgccaccgcttatgcgtcagcaccgagcgcacattgtctgacagatcctcaagataccactcgttgataagcccgttgatttgccgggcttttttcccggcgcggtcctgggtgtccacgtggtccaccacagcgatgaagcggatgccccactcggcaaatttgccgtggaggtacttttccaccagctccatatcgcgggtaaagcgggattgcgttttggctaaaatcatgtcaaattcccgccgttcggccgccgccagcatctggttgaacgccgggcggcggcggtcggcaccggagtagtcctcgtcgatgtagacttcctgcacggtgtagccgtgctcagccgcatagcgtaacagcatcgagcgctggttctggatgctctcggactcgggcccggttttggccgcgtcctccttgctaaggcggcagtagatggcagcttttatgcggcatcccccccttcgcctaaatatatgcggtacatacaaaaaggctccctctgtgagacagactcccccgatacgggagcgttgtcgccgaaggtgagctgcatccccgatacagaatacacgcacaaacgaaacgattttccgaaattggcctaaaagggtggcgattgaacaaaaaagaacggcacaccggtcagggtgtgccgtacgagctatgaaattagtgcccctctttgtcgatcatcttgcggatggcatcgatggcgacgcggatggcgaggtcggtgtcgtgtacctgggcattgggcaggccctttttggcgcgctcctggttggcgaccaccaggaacagcgagccgacccgcacgcggcggtaagcgccggcaatgaacagcgcggcggactccatctccgacgcgatgcagcccatgcgcagccaagcttcccacttgttcagcaactcgtaagagacagggtgtttttcgggctggtgctggccgtagaaggaatccttgcactccaccacgccggtgtggtaggtaacgcctacgtccctggcggcgtccaccagggcgttggtcacgccgaaatcaggcacggcagggtactcgatgggcgcgtactcgcggctggtgccctccatgcggatcgcgccggtggcaatcacgacgtcaccgccgcagacatcctcctgcatgccgccgcaggtgcctacgcggatgaaagtgtcagccccgcagttggtcagctcttccagcgcgatggaagcggacgggccgccgatgccggtgctggtaacgctgacgggtacgccgttgagggtgccagtgtaagtaacgaactcgcggctgtcagccaccaggcgagggttatcaaaatatttggcaattttggcgcagcgcttggggtcgccgggcagaagcacataacggcccacatcgccgggacccagcccgacatgatactgcttgccgctgccttcggtataatcgaccataggtttcaacctcctgaatagatatttgagtatattatacagcgttttgggggaggttgcaaccaattaaatatagaagaacacaggtgtgaaatggatagtgtttttcttctatcagatattcaagcgagatttcccgcttgcggcggctccgtatgctccgggctgcgtctatggcagcgtggcgaataacagtcttgcaaaaggcatcgtgtgtatgccggatatgttcttgatacttttcgtgttcggtcatggaaaatccccctttctgaataatggcagagggcggcagcatcttgtgctgtcgccctcttgattaccgaacagcaaagacgggcggggctgtcaacggcggcgcatttccgccgttcatcttgaccgttgacaggctcggctgggtttgctatctgctcacggcaattcactctcattgataggaattg

SEQ ID NO: 7885 - DNA, 283 bp, Unknown
  gut microbiota DNA sequence
gcagccgcggtaaaacgtagggtgcaagcgttgtccggaattactgggtgtaaagggagcgcaggcgggaagacaagttggaagtgaaaaccatgggctcaacccatgaattgctttcaaaactgtttttcttgagtagtgcagaggtagatggaattcccggtgtagcggtggaatgcgtagatatcgggaggaacaccagtggcgaaggcggtctactgggcaccaactgacgctgaggctcgaaagcatgggtagcaaacaggattagataccctggtag

SEQ ID NO: 7886 - DNA, 5862 bp, Unknown
  gut microbiota DNA sequence
agaaatgttcgccccggctttttgtgtatattttttcattgacaaacccacttctctgcgctaccatgttactatcttatagtatacgagggggatcaccatgaaatacggttttatcggctgcggcaatatgggcggcgcagtggcccgtgcggtctgcaagggtgcaggcgccggggatgtgctgctggccaaccgcacaccagccaaagcgcaggccctggccggcgagctgggctgtgcctgtggcaccaacgagcaggtcgccagtatctgcgattttatttttctgggggtcaaaccccaaatgatggctgacatgctggacgagctggcccccacgctggaggcccgggccgaaagccgcccctttgtgctggtcagcatggcggcggggctttcgatgcagcagatccgccacatggcgggcagcggctaccccatcatccgcatgatgcccaacacccccgtggcgctgggcgccggtatgatccagtactgctgtgacgacgtggagcctgcccaattgcaggaatggctggccgccatgcagcccgccgggcggctggacgaagtgcctgagacgctgatcgatgccgccagcgcagtttccggctgcggcccggcctgggtgtaccagtttatcgaggcactggccgatggcggcgtagccgccggcctgccccgcgccaaggcccaggaatatgccgcccagatggtgctgggcagcgcccgcatggtgctggaaagcggtagccaccccggtgccttgaaagacgctgtgtgcagtcccggcgggtccaccatccagggtgtgcgcctgttggaagaacgggccttccgcggtgctgtgaccgacgccgtgctggccgcctacgagaaaacgaaagagttgggaaagtaagatgcgaattgttgttaaggtcggcacaagcaccctggcccacccgggtgggcggctgaacatccgccataccgaggaccttgtcaaggtatggagcgacatcaaaaacgccggacatgagctgatcgtggtctcctcggctgctaccggtctgggcgtgggcaagctgcaaattcaaaagccccgggacatcaccaccaagcaggcagccgctgccgtgggccagtgcgagctgatgtacatctacgaccggctgtttggccagtacaaccacactgtggcccagatgctgctgacctgggaggatttcgaccacgaaaaccggctgcacaacctgcgcaatacgctggagcgtctgctggagctgggagccatccccatcatcaacgagaacgaccccatcgcctgcgaggagtactctctgggcgacaacgacacgctggccgcgctggtgggcgagtgcatccacgccgatctggtggtgctgctctctgacatcgagggcttgtacaccgccgacccacacacccatgccgacgcgaaacttatccctgtggtggaagaaatcacacccgaaattgaggcgttggccggcggggccgggtccagcctgggcaccggcggcatgctgaccaagatcagcgctgccaaacgcgccaccgccgccggggccgatatgatcatcaccaacggtgcccgcgccgacgtgctgtacgatattgtggagggtaagccggtaggcacccgctttattggtaaaaaggagcatgcccaatgacgacgcaggaaattttgcaggcggcacagaccgcccgcatgccgctggctctggccgacgccgacacaaaaaatgcggcgctggaggccatggccgtggcattgattgccgcgaaagatgcgatcctggacgccaatgcgaaagatctggcagcggcccgcggccgagtcagcgatgtgatgctggaccgcctggcgctgacgccctcccgcctgactgacatggccaagggtatgcgcgaggtcgccgccctgcccgacccggtgggcgcggtgctgcgccgcatcgtgcgccccaacgggctggtgattgaaaagaccgccgtgcctatgggtgtgatcgccataatttacgagagccgccccaacgtgaccagcgacgccgctgctctggcggtgaaagcaggcagcgcctgcatcctgcgctgcggccgcgatgcctgggccagctgccacgccattgtggaggccctgcgcgccgggctgcgcaaagcccacctgcccgaaacggcagtgagcctgatcgaggatacgagccatgccagcgccaacgagctgatgaccgctgacgggctggtggacctgctgattccccgcggtggtgccgggctgattcgcgcctgcgtggagaatgccacagtcccctgcatccagaccggcaccggcatctgccacgtttatgtggacgctgccgctgatctggagatggctgtgaacattgtggagaacgccaagaccagccgtcccagcgtttgcaacgccgaggaggctctgctggtacaccgggatgtggccgcccagtttttgccgatgctgaaacagcgccttgtagacgaccgcaccgccgccgggctgaccccggtggaactgcacctggacgcccgcgccgcggctatcattgacggtgtgcctgccgcacctgcggattttgacaccgaatatctggactacaagctgagcgtggccgtggtgaatacactggacgacgccattgcccatattgccaagcactccacccaccacagcgaggccatcatcacggcggacaaggccgccgcccagcgttttaccgcctgcgtggacagcgccgcggtctacgtgaacgccagcactcgctttaccgatggcggtgagttcggcctgggctgcgagatgggcatcagcacccaaaagctgcacgcccgcggccccatggggctggccgagctgtgcacctacaagtatatcatccacggcagcggccagacccgcggcggtgccgccgccaaactgcagacgccctgctgctgaaaatttaaaatggcaaaaaattccccggtgcggttcagaataaaaccacaccggggaattgctgtttatatggatgtcagccgatgttcatatcgacgggcttggagatgccattgacgtggccggagcccgtgtactgccagatgttgtatttatagctgaagttcagggtgtcacggtactgggcgatccaggtgttgtacttgctgatgttagcgaagttcagcgagttgtagaaccagcttgcataggagtacacaccggcagagtagccggagttgcggatggtctcgcagaatgcgacggcgcaggcggtgcgctgggcggcgctgatggtatcggcgcggccggtatcaccggcgactttctcggtatcgtagtagacacccaggggcagcgagtagccgctgaccaggctcagcaccatgctggcttcctcgacagcctcagcctcgttagtggcttggctgtagaagtagacgcccactttcaggcctgcgttgatggcgccgcggatgttggcgcggtaggtggaatcctcgaccagagcgccgctgccgtagccgcggtagccgcagcggatgatggcaaaggtgatgccgtcggccttgacagcgttccagtcaatgctgccctggaacttggaaacatcaatgccgcgggccgtgcgattcagcgcaccgtcggcaccaaaggtgtagacgttgccctggatgacctggttgccggtaacgggctggtgggtggcggggtcgtaatagtacgtggcgccgtcaatgttctgccaaccggtgtactggtactcgacggtctcggtgctggtcacggcaaagccgtacccggccagcttggaggcttcgatctcatggggaaagcctgcggtgcgatccaccggcgtgggggccggggtggccgtgggggcaggcgtcggggtcgcggtcggctccggggtggcggtaggggtgggttccggcgtggccgtcggctccggggtggcggtcgcttcgggttccggggtaggcgttgcctcttgctccggggtgggggtcggcgtggactcgctgtcaccactggcagaggaggaaccactttcgacgttctcgtctacccccatgatgccctcgttatcgtcggcatggtggatgacacgggtggtaacagccagaggcacgatggcatccgctgcaccgggcagccagacagccatgctgtgggcaacggcatagctgtcatcgcgcttggcaccggccaggtccttggtgccgtctttgtaaacgggcaggtacggggtctcggtgccgtcagacagcagcagatggccgctgctgctcagcttggcggtgtatgtagtggtcttgccggtctcggtcttggcgctctcagcgtaggtgacggtgtcggtcacttcctcgacgatgggggcagcgcctgcgtttttgctggcagagtcctcagcgctctcgttgacctggctggcctggacgatcttctctttcacggcggccacatcagccttatagacgaccttctcgttgacggttacagtcttgctttcgggcgtgacatacccctcgatgggctgcacagtcacggtgtagtcgccaggctccacctcctcgatcaaggccgtgccggtcttggtgtccagctcgtaatcggtggtcttgccgtccttgtcagtcagggtcacggtggcggccacatccagcaggggcagcttttcctcggcgtcctcatccttgtcggaggcattttcgggggtggtagtcggcagcgtataaagctccacaccaatgtcctgctgcacgacggtcacatcgacgtacaggtccttatccggttccggcgtagccgtcggttctggggtcggggtgggggtcgcctccacgatggccgtcggctccggggtgggttccggctgggcctggggcgtgaaggacgctgccatgacgcccaggccgatgctggccgtgagcaccacggccgagccgcctgccaccagtttgtacagcggcagacgcgcaaaggcgttgccggagaaatatttcatgggattccgcttactgaacatcctgtcctcactgtttccttttatagagttctattactgcttatggtcatcataccataaaggatcccctggccgcaagggggcaggggcgaaaaaacttgtaaattttgccaaaatagataccccaattttgttcaatttaccgcattttggcagttttttagctgatatggtggttactctgccgtaaggccaccagtagttgtgtagggcaaaaattcttctaccagcaggtccacgcaggcgccgtagctgcgcatgcccaatttctggccgtaaccctgcaaaaaggcagtgtacactttttcgccggtctccttcactgggccttcccactgcttccaataggcgttgttgtccgccatgtcggcctgagcctcggcgcacagggcggcataggatgcccgggccaggtccgggtcggcgctgtacagcgcgttggagagatgcagatagccgaacagccagccggagtactggtatgccgcattgccgcccgctgtggccgccataacgccgacgaagttagcatcctgctccgccgccacgccccgctggtgggccagctcgtgggcgaccgtcaccggcaggaacaccgccgggctgtccacgttgagggtgctctcccccaccagcgggcagaggtagccggtgaagccccacgcgctcatcagcttggagtagaccgccggtttggggtgccgctcggggccgtccaaaaacggccagcgctccagcagcggcgtgtacaggccggtgcagctttgcaaaatttcggttttctccaccgcaaacagactgctttcgtcccggggcacag

SEQ ID NO: 7887 - DNA, 629 bp, Unknown
  gut microbiota DNA sequence
tcggctgtctcgttgacacgggcggcgaagtagtcggtcaccgccgccagctgctctacgctgaccgccggggactgcatgcctgccctgcctgcaaagcttgtaccgtagtactgggtgccccagagggcgcacacgcccgcatagccccagacgaccagcaccgccacatgcagcagccaggcgggcagggcacctttttggcccttaaccgcacgacggatggcacgggccagaaaggccagcgcacccacgatcagcacggtggcccccagctcgcaggcactgaaggtcagcgggtccaccaacgccgagatgccccgcttgacgggcatcgagacatgggccagccaccaatccatggccgcccggttgccgcgtgcggccgcaaacaggcccagggccgccagcccggccagcagccccaggcaggcggcccggtggcggcgcagccaggcggtaagggttttgcaggtatttttcagcattgcagtgtctcccgtttgtgttttactttaggcaacaccgcacaattcccgccttacggcttaagcaccgcttcggcggctgcggcacggcatctgcgttgccaaaatgctcgataatacacaaagtattatctgcgcttt

SEQ ID NO: 7888 - DNA, 194 bp, Unknown
  gut microbiota DNA sequence
ttcctcccgatatctacgcattccaccgctacaccgggaattccgcctacctctgcactactcaagacgaccagttttgaaagcagttcatgggttgagcccatggatttcacttccaacttgatcgcccgcctgcgctccctttacacccagtaattccggacaacgcttgtgacctacgttttaccgcggct

SEQ ID NO: 7889 - DNA, 1544 bp, Unknown
  gut microbiota DNA sequence
ggttttcggacacttctacatagatttcttcccgctcccagattcccggcactgcggggaatgccgcatggaggctttccccattttgacaatggatttcgcatttgatcgtttttacttccgtcatttctcagcacctcaccatttttgaggaacggtaaatcaaactgtgtaaagagaaaaggtattttcttgttctcgcattctgccgtccctgctgtcaatacagattctataacacttttatacgattataaatggtaagaatatgtattgcatggtaaattattgccttttgagaaaaagtatgataggataccttcacaggaggtatcgtacatgacccaaacgtcttcccaccattccattggctttcatttttcttctgatttgtcctatttgacgctgaaaggggcgggacggcacatcattgattctcatgattactcttgggacaatcgaaacagaagcggcgattattgcctggtgcaatgctgcatcggcggagaaggggctctggaaatgaaagggatttcctattcgcttctgccgggagatgttttcctgattgcaattcccggcgaaagccgctattacctgcctgcccatgcccaatactgggatgccccatatcttgagttttcaaaagagtgcctgccattactacggaaaatatatggcagcataggtcctgtcatccaccttacacaggaatccggtcttattgatcgaatgctttctatatacgaccgtgcacttcatcacgattttgagacattttttgaaaacagcaaaaccgcctacacgttctggatggatatcaccgcttacgccctttcatgctatcaccgggaaattacgaaaatcgatcacgccaaggcctatattgaccaaaactattgcgcggagaatctgaccctggatttagtggcaagccacgccggattatcgaaattttatatgtgcaaagaatttcacaaaaaatacggcatctcgccaggacaatacataaaagaactccggatcagccaagcttgccgtcttctggttacgaattcggattatacgattcaggaaattgcgcatatggtaggctattccaacgacaattactttggtaaggtattcagagcgtcaaaaggactgcctccggatgcattcagaaagcagtccaatcattatgatttcatgcgcaccgtgtatgaaacgcagataaagtcagatttaggttaacacaccgtagaatatgcagcagtaggttcttcagatggaacaaaaagaaagaatggatcaaggcctaatttacgaccccgcggacaataggatcagcacagagcaaaccagctgtctggatgcccaatatgaattcaatgcaacacgtcccagtgaaatgaaaaagcgtgcagcgctattgaagcagatgcttggagcgatcggagagaactgttatatcgaaccgccattccgagcaaactggggcggaaagcatgtctatatgggaaacaatgtttacgccaattttaatctgaccgtggtagatgatg

SEQ ID NO: 7890 - DNA, 3837 bp, Unknown
  gut microbiota DNA sequence
ggggcggtaaccgtggtcggccagccagcgggtatcgcgggcggcggtggcggcgttgcagcttaccatcaccaccgtgcgcggggccatggcggcgatggctgtcagcgtggcttcgtcgcagcctttgcgcggcgggtcaacgacgatgacatcggggcgcgcgccctcggcggccagctgggctgcagcggcaccggcgtcttggcagcggaagtcagccttgtcggcggcaaggcccaggcgggcggcggtctctttcgcgccgtctacagcctggggcacgacctcaacgcctaccaggcggcggcagtcgggcagcatcgaaagcccaatcgtgcccatgccgcagtagagatccagcaggaaatcatccggcgtcagcgcggcaaattcccgcgctttggcatacaaggcttcggcggcgggggtgttgacctggtaaaattcgtgcacacccatccgaagcgagaccccggacagcgtatcctcgatatacccggggccgagcgccacacgggttttagcacccaaaatcacattggtgcgggcgttgttgcggttgatgagaatcgtcgttaaatcgaattctttctgcaaggcggcgcaaatctcggcctcgttgggcaggccgtttccgttcaccacaaagcagagcagccgctggccgctgtgccagccctggcgcatgtacaaatggcgcacgcggccggtgtgggtttcctcgttgtaggcggtgatgccgttttcttccagcagggtgcaggcgcgggcggccagggcgttcatccagtccggctgcagcttgcagtcggcgcaggggacgatgcgatggctgcggcccgcaaaaaagccggtcaccagatgcccgttttcgtcggtgccgacgggcagctgcaccttgttgcggtagcggtcggcggcgggggcgcccagcacctcgtgcacgggcacgtccagcttggccaggcgctcaaaagcatcccgcacaaactgcgttttggcggcgcactcggccgcatagctgatatgccgcaggccgcagccgccgcaggggccggctacgggacaatcctgcttgacgcggccagggccgggggtcagcagcttttccagtttgccgaaggcatagcctttcatgggcttgacgatgcgtacttcggccacatcgccgggggcggcggctgcgacaaaaacggcctggccgtcatgatgggccacgccgctgccgtcgttggaaagggattcaatggagagggtcaggatctgatttttctgaaaggccatggttgctccttacattttgctctttactgctgggcctgctgggaggctttctgctcggcgtccagggcggtcaggtacttgctcggcgggactttctttacctttttgaagacgcgggagaagtagaactggtcaaagaagccgaccgacaccgcgatctcggcgatggacagggtggaattcttcagcaggctgcaggcctcgctgatacgataatgcgtcaaataatcgatggggctttgcccaacgttggacataaacacgcggtacaaatggctgcggctgacgccgacggccttggcgatgtcgtccaccgagatgtcgtgggaatagttgaactggatatacttgatggcggccagcacatactggctgctggaggagcccacgttgggcatggcttcgcgggccgcctgcatcaggtgggccataaagatatagaggtagccggtcatcagggcctcgcactggggctccggcccgcgggacagatagatgttgtacagcgcttcccgcacggcctggggatccttgcaacggtgtaccggttgagtgtccgagaagggcgtctgctgcaccagcttattggcgcaggccccgttgaagcctacccaatagtactcccacgggtcggtctcgtccgccgcataggtgatcagctggttgggcttggccagaaacagatcgccctcctgcagggtataggacgacccattgacctggtacacgccgcggcccgccaccaccaggtggatgaggtaatggtcgcgcacgccggggccccaggtgtggcccggctggcagtactcatgcccgcagttgaagatggacagctctacattatcggtgtagctctgcttataggattgcttggtttcgttatccatgacagctccctctccgcgcggtgccgccccggcaccgcgccgccttgcctgcagccggggccgcgggcaaaatatagtaattttattatagcaggggattcatcaaaagtccataaaagcgccgtaaaaaaatgtttactttctttcaaaatttgttatactaagattaagaacccggcaggcggcggtgtactttgtccgtttgcctaaaagatacaggctcattttgtgcatactggcgaaaagagccgcgcaacagaaaggcgagtgcaattatggcgaacaccattgaactgaaacagcagatccagcagggtgcctatgatgcagcttttgtaaaactttacggtgttgatgtggacgtaaacgcccagcgtgagcgttacatttccgtcatcgaccagtttgagaacgagtttggctccgggcgctccgtgcgcctctactccgcccccggccgcaccgagatcggcggcaaccacaccgaccacaacaacggcgtggtgctggcgggctccgtcaatctggacattgtggcggtcgtttcccccaacgaggagaacatcatccgcgtcaagtccctgggctttgagaagatcgacgatgtggacgtgaccaacctggtcccgcaggagcaggagaaggagcactccgctgccctgatccgcggtgtggccgccggtatcgtcaacgcgggcggcaaggtcggcggctttgacgcctacaccaccagcaacgtgctgcgcggctccggcctgtccagctccgctgccttcgaggtctgcatcggtgccatcctgcgcggagagtacaacgataacgacatggagaaattctcccaggtcaagatcgcccagatcggccagtatgccgagaacgtcttcttcgacaagccctgcggcctgatggaccagaccgcctgtgctgtcggcggcgtcatcaccatcgacttcaaggatccggcacaccccatcgtgggccagacgtccatcgacctggccaagcacaagctggccatgtgcatcaccgacaccaagggcagccacgctgacctgacggatgattacgctgccatccgccgcgagatggagagcgtggccgagcagatgggcaaaaaagtcctgcgcgaggtggacgaggacgcgttctacgccgccatcccgcagctgcgcaaggccgtgggcgaccgtgctgtggtgcgtgccatccacttctacaacgactgccgccgcgccgccgccctgtgcgatgccgtgcgcgccgacgatatggataccttcctgaagctgatcgtcgagggcggccactccagctttgagttcaaccagaatgcttacagcatcaagaactacaaggagcagggtgtgcccatcgcactggccctgagccagaaagtgctgaacggccgcggtgcctggcgtctgcagggtggcggcttcgccggcaccatccaggcgtttgtgccttatgatctgctggatacttacaaggcgaccatcgatgcctgcttcggcgaaggcagctgccatgtgctgaatatccgcaactatggcgcggtgccggttactgtggacatgtaattattatattctgctttgcgggggacaccaccatgtggtgtcccccgcaaagtgtaaacatataaggcaataccgcataattc

SEQ ID NO: 7891 - DNA, 34438 bp, Unknown
  gut microbiota DNA sequence
tcaatgtcgatgaccgtacatagctgcttaccgttcatgaaattcatccgcatggtaaaatccgggtccgtgctgaaatgctcggcgttatagatatacttgtatatggtctggcgcgacacgccgaactgttttgcaatctcggtgttgccgatgccttttctatgcagttccaaaacctctacgatctggtcgggggtcagctgtgccttgcggcccgcattgcgcggatttggatgattgattttcagcatctttgcaagttctcgcaattcatccaaatcagctgtgccaaaaatttcttttatttgcttttggtaatcgctcggcatccagtatccctcccaagtcgttttctactattactatatcgtgatttcggggaaatgtcaacaaattaaaatatttacacacaagatgcggcagttctatctcagctatccaattttccagacagtgtctggaaaattgaattggtcgcactactgcgagctgctgtccatctccgataaagaaaagcgcagcttctatgaaaaggaaacagtcaacgccggatggtctgtccgtgagatgaagcggcagattgatagctctctgtttgagcgtctgcttctgtcccgcggtgatgccaacaaagagcaggttttggcgctggccgaaaagggtgtggactacgccaagccggaggacatcatcaaagacccgtatgtgtttgaatttttaggtctgccggaggagaagccgttccttgaaagcgacttggaagcggcactggtgcggcaaatcgaagatttcctgctggaactcggtcggggctttatgtttgtcggcacacagcagcgggtcactgtgaataacacccactactatgtggacatggtgttctacaacaagattttgcacgcctatgtgctgatcgagttgaaaaccaccaaactcacgcccgaagctgccgggcagatcaatatgtatctgaactactatgccgcagaggtcaacgacccggaagacaatccgcccatcggcatcatcctctgcaccgataaggacagtgtagcgcctgagtatgcgctgggcggcttgtctaatcaaatttttgcttctcggtatgtcctgtatatgccgaataaggagcagcttatcaagcaggtggaggaagtcttaaagcgctagcactcccatgagggtgactaagcgcgtcatctggctttgcgtgagctgctaatttccttgatggctgcatcgagggcaatgccttgccgattgaaatactgcgcatatagctgccgcttttgccaagggcaaggctcattttatgttcagaaacatgaaggcgatggcgcagctgcgtgatgcgcttacggacaaaactctcgtattcggctacctgtagcaagcaggtacaccctttcccatttatactatactatgtaaatattgtaatataaattgcggtagagcgttcagcattgtgatatcagtttttgcagcatcgccaatatattgacgataaaataatgaattttgaaaaaagttttttcaaccgcggtgtttcagatagggagcagtctgggaaagcggctgtatcccacccggtcgctgatctcataaatcttcaggtcggtgcgggccagcagttcctgggcatagcgcagccgcaggttgttcaggtagctgataaaggtgcagccgcaccggcgggtgaactgggtgctcaggtacttcttgttcaggcctacctggtcggccacggcctttaaggtcaggttgtggtcggtgaagttgtcctccagaaagatctgggcccagcggatggggtccggggtctggctgcggctgcggtgctgcagccgttcccgctccttgcgcagcaggttgcgcagccagacactgcgctcccagggggtacccagggcttgtaccaccgcttcacagccggcggtgttctccgcgtccaggccgcatttgcgctgggcctcggtgatctgggtcagcagcaccagcatcagctgggtctgagccgggccgtccagcggttcccgagtgcggaaaaggcttccttctccgcttcatagtcctcgtcccgctgggcgcccagggcgttcaccaacggcgcacacacaggggctctgtccaggcaggcccgggccagggggtcgtaccggctctgggtgcagaccgctcccggtccttgcagcaccgccagccgcaccatcaccccgcacagggcgcaggcgtcggccacccctgctttggtgaccaggtcgctcaccgccgctgaaacgctcaggttcatgtaatcccgccataccgcttggatctgctgcactaccgacagcatggtgttgtggtagcgggctttgtcccgaacctgccacagcagctcgtactggccgggtccggcagcccgcagggtggcccgacctgccacccgggggatctggcgtaccagttccagcatgggcttgtccaggcggtttttcaggtcgcccccgaaccggtcggactgccgggccatgtcgtccaccgcaaataccgccaccccgtaactgcccggggccagctggggcccggcggcgggggccgctgcggtgccgccgtcggcaaagatgcggcggcgcagctcggtgagcatggcggtcaggctggcggtgtccaggttgcctttcagcaggtagtcatgggctcccaggcggaaggcctcccgcaccagctcgtattcgtcatagcccgaaagtaccaccgtcaccggcaaaagggcgctttgccgcaggcggcggatcaaccccagcccatccagcaggggcattttcatatcggtgatcagcaggtccacggtggtgcgctgtaacagttccagcacctgcagcccgttggtgcagtcccacaccagggtgtagcccaaggcttcccagtccaccatggtgcgcaaagccgcccgcagcagggcatcgtcatcggcaatcagggttcggatcatgggacagttcctccttcgttgtctggggcgctaccgcctgccagggtaggcggatcgttatccgagtgccctggccgggcacactctctatcaacaggttgctttcgccgccaaaatgcagccgcagccgtgccagcacgtttttcagcccgatgccgtggccggtatccgcccccaggggacggccccgcagtaccgcatccacctgctccggcgtcatgccgcagccgttgtcctccacttccaggcaaaggaaatccccctgccgggccgcctggatcaccagctggcccagctcgtcccccatgtccgcaaagccatggtccagggcgttctccacaatgggctgcagggtcagccggggcaggcggcagctgcggcaatcttcggccacatcgtagcgcacctcaaagccgtctgcatagcggatgcgcatgatgtacaggtagctgtccagcatctgcaattcctcgtccaccgtgtaaaagctggtgctgctgcggaaagagcaggatacgatattgcccaacgcctgggccatacggcgggtgccgtcgtaccccgacatctgggccatgaagcggatggagttgagggtgttcacaatgaaatgggggttgatctgactttgcaggacctgcatctcggcctgatgcttgcgcttctgggcttcctcgttgatggccagcatgtttttcaggctcaggaccatctggttgaaggaggaagtcagccgctgcagctcatggtgacccgagggctgcagctgtacggccaggtcgttggcggccacccggtccatggccccggccggctcctgcaccggcatgacgatggcgtccaggaagtaccgggagaacaggaagaagagcagcagcaggctgaacaccacccccaccagcagtgcgccgatacccaggatgcggtccatgacaagcccttcgtccacaaaggtggcgatgcgccaacccgcaaagggcacctgccgcaggatgaacagatagttgcgggtccgcccgtcggggtccagggccgcccgccggttgaaggtgccgttgggtagctgcgcgccgttctctccaagccaggcaagcagttcttcccggcccatatccccgaacaggacctggccttcctcgtccagcagcagggtagtgcccatgccggggtcggagcgagaccgcagcggcacctcgcttacctgggaggtggtaaagtacgccaccatctcgatgcggccgctgcggtcggtggtatagttgggagccatggccgtcaccagcaccagctgaccgcctttctgggcgttggcggtcagatcggtcttgctggtgtcgtagccgcctatggtcacccggttgggattgtccagggcggtgcggtaccagccttcggcgcgcagggcgtcgtccggcagggtggtggactccttcaccggcacggtacccccgcctttcatgaaaaagagcccggccagaatgttctgagacggcaccatggccgtgttgaaactccgttccagctctttagcggccagatattgctggctgctgccgctgctggaatagacccggttggccacgtccaggaactcgccgtcgtttacatagacaaaatgggacagctgcagcgacgcggatttgatatcggtgttcagggtggtggccaccgtttcctgaaacgccgagatggtatccaccgcggaggtgcgcatcacctggtacaggatcaccgccgccgcggcaaacaccacaatcagcagtaccactaccagcagcgaaaacatgcggtaaaagacctttttcagcgggtattggctgtcgctcagtttcacggccgttcagctcccttttgtgcactttgagcccagtatagcagacccgccgcccaaagaaaagcacccccgcatccattgaggcagaaaaaccgggcggggcgcacggtgtggtgcgccccgcccggacaaagcccgccctcacaggggagaggtatgctcgttgcggtattctttaggggtgacccccaccagtttcttgaactggcgggaaaaatacttttcgtcctgaaaccccaccatctcggacacctggtacaccttgtactgggggtcggccagcagccgcttggcggtctcgatctggcggtccagcagatatttcatgaaccctacgcccatctcctccttgaagcgaatggacagatagttgggggtgacgcaaagttcggcggccagggctgtcaggttgaaccgggggtcccggtaatgcttttcgatcaggtccaggctggcggcaatgagcttgctttgggccagcggtgcctgggcgcatttgtgggcacattccgcggccacggtatcccgcatgcaggcgcacatggcctcggtgtcggcgcagcggcgcagggcgtgcaccgggtcctccccctcgccggaaaggatgccctcggagatgagcagcatcagcagattggtgcagaaccgctgggccgaggccaggtggtggggttccgcccggaccacctgctccacgcaggcccactgggccagggcttcctgggtttccccgtgcttgacacagtgcacaaagcggtgccggtcatagccgccgctgcgcaggtcctgcaaaaagctgcggtaggtgtgcacggggatgtcggcgccgccgtcctcctcggccctgcggtgggcagggcgcaggtccagttcgccccgcagcttgtgcagcagggcggtcagggcgtcggtgtccaccggtttcaggatatattcccgcaccacattcaggcgcaccgcccgctgggcgtaggaaaaatcgttgtagctggaaatcaggatcacctggggagaaagccccagttccaacaggtcctcgatcaggtcaaagccggtcttggaacgcatgcagatgtcggtgatcaggatatccggcgcccggcgccgggcaatctccagggcgctctcggcgccgtcggctaccccgatcacctccatgtccagggtggcccagtccaggtgacggcgcagtccttcccggatgagcatctcatcgtccacgatcaaaacggaatagggcatgggtctttactccttcagtctgggggtagtcaggcggtcgggggcggtataacggcggggaatgcggatgctcgccgtcaggaagcccccctccatccggtattctagggcggcttcccgggcgtaggcgatctccagccgggtgcggatgctctggatgccgtagctgcgggcgggggcgcccgcctcctgccgcagtcgctgctgtacctgggccagggcgtcatcgggggcgttgttggccacttccagcaccaggtcccccgcccgggcaaacacccgcaccagcagcaggttgccctcggccggggcgtcggaccggttgaaggcgtgcagaatggcgttttccaccaagggttgcagcagcatcttgatgacggtgtcctgcaaaagggattcgtccacttcctcatggacctggaacagcccgcagaaccgcactttctggatgttcaggtagctgcgcatgtgggtcagttcctgttccaccgtcagttccggctggccgttgttcagcgaggtgcgcagcagggtggacaggctggtcaccagctgggagatctgttccacatggtagtccttggccagccagttgatggaatccagcgtgttgtacaaaaagtgggtgttgatctggctttgcagggcgttgagttcgctctgtttctggttcaggcgggtgacgtaattttcctcgatcagctggttgatcatctggatcatgtagttgaaactgtcgtacagttcccccacctcacccttttcccgggtgtggacggtgatgtccagatcgccgtttttcacgtttttcatggtctcggacagctgcaccaccgggcgcatcaccgacccggtgaccacaaaggtgagcagcatgcccaccagcagcgccgccccggcggacaaaaacaggatgctgcaggattgcaggtaggtggtgtgcacttcctccagggatttcagccccaccagatagtagtcggtggtggaaagccgccgggcaaacaggcaggcgtcgccgtctggctgtatatagaagccgcccgaagcgctcagctgccgcagggtatcggtatcgggcaggccccggatggaataatacccgatgaactcttcggtggctatattgtagagggcggcttccatgcctgcctcgttgcgcagattgtgcagaacgctctgggtcaggtgctcatagttgaactccaccgatatggtgcccagaatgttggaaaaatcccggttgtcgtagatgatcttggaggcccggatgtattcatagttgccgtcgtagtaggtatcccacaaaaaacggccgtccagggactccagggtctggatccattccgaacggggatcgtaaggagcgggggattcctccagccccagggtgtcgtatacgggcagataggacccgtccggggtgcgggcggtgatctcgaccagcaagggcagggtgcccagggtcacgctgttgaaggacagcagagaggtaagggcttcgtcccgcaacagggcctgctcggcgtcgccctgggcggcgccggtgccgtaggcggccagcagttcctgcaaatgctggctggaggccagattcagtatgtggctgtgggcaaagcccatggcgtcggataactcggtggaccagcgctgcattatttgggaggaggtttcaatcaggttgccttgaaccatgctgtaaacggtgcgcagcacaaacacaaagatgacagcgcagaacgccagcaggatggaaaaataagaaagcagcattttgcgccgcatgacgtcccctccttcaggtccgaatctaacaaggttcgccacccagtgtaacatacttcgcggggtgttgcaacgaaaaaacacagaaaattgtgcaataatatcaaaataaacagcaaaacaagaaaaagaacatgaaaaatagcgaagaaagagaaatagtccaccatatcgtatttttgttatcttgtaaaaaaagcggcacaatggtagactgaagacaacgaaagtgcacagcgcctttacggcagcacgagaagaaacgcacttgaaaaaaggagcaaagcagtatgaaaaaaagcagtatgaaaaagtcaatcgcattgggcctggctctggccatgggcacctccctgctgaccgcttgcggcggttcggcaaccaccagcagttccgagcagacatcttccgccaacgccagttccgagatcgcttccaccgagaccagcggtgacaccatccgcatcggcggcatcacggcagtcaccggcgacaaggccgagatgggtgagagcttctggcgttcctgggagctagccatcgaaaaggtcaacgagaacggcggcgtcctgggcaagaaggtagagctggtcctggaagactccaaaggcgaacccaaggaagcggtggagctggccaagaagatgggcgatgatgagagtatcgttggcgtgcttggccccatgaccagttccgaagccatcgcctgtgcgcctgtttttgaggagtacaccatggtggagctttccccctgcgcttccaacaaccagtacgcccccatgagtgactacgctttcacggtggccggcaagatggaagccgagcagccctacctggtggagcgcggcgcctatgaatacctgaacgccaagtccatcggcgtcatctgggtcaacgatgactggggcgcttccgcctttgagtccaccaaggaaggctgcgaggaatacggcatcgagatcaccgatgacgagagctttgtttctggagaaaaggatttcaccgccatcctgaccaagatccgccagaccaaccccgagtatctgatgttggtaacgcaggccgccgacggtgccctgatcctgaaacagctggaggccatgggttgggatatcccggtcatcggcgccggcgccatgtactccgaccaggtgattctccttgcaggtgaagcagcagaaggtttagtgatttcggctggatttttcctcagcgaagaagatgaaatcgcgtgggactacgcaactaaattctacgaaggcgccgggttctatcctaccactcatggccctctgtcctacgacgctgcgctgcttctctgcgccgccattgagaaagccggcaccaccgaccgtcaggccgtgcgcgatgccctggccggcatcaccgacgccgacgtgcaggctctgtggggcgatgtgctcctggccggtccctacgagttcaccgaggatgaggacattatccgcgcctactgcctgctgaaaattgtcgacggcaagtggaccaaagtcagcgactactccaagtgcagcaagtttgaatgatcgctgtgtgctgacacggtaaaacggaggccccgttttccctctctcggggtgaacggggcctctttttttgccccgcatcgcagcctacccaaaggaggtattcccatgtatgtgctccagcagcttatcaacggcctgtcccagggcagcatctacgccctgatggccattggttatacgctgatcgtcggcgtcgtcgggctcatcacctttgcctacggcgaaatggtcatgatcggcgccatgagcgcttatctgttctacacctatgttacgcccaacttcttcctgggcttgttggtagccttcatatcttccggtattgccggtatcttcatccacaaggttgcctacgagcgcttcctggacgcgcccaaaagcatcgccctgctgtgcacggtgggctgctccctgctcatcaagaacctggcccagatcgccttcggctcccagggcaacgccatgccccccgcctttgaaaccaagcccttctatctcttcggtaccgatctgtacattaccaccatccacatggtggtaatcgccatcgtggtggtgctggccatcggcctgagcctgtttttgtacaagacccgcgtgggcctgatgctccgcgccgtcagccaggataaaatggcggccagcctggtggccatcaacgtcaagaaagtcaccctcatcggcaacatcgtgggtaccggcctgggcggcatcgccggtctgctgtacggcacctacctgaccaatgtgtccaccgtgttcggcaccgtggtcggcctcaaggccatttccgcctgcgtgctgggcggcatgaccaacatccccggcgccgctttgggtgccctgctcatcggcattctggaaaacttcggcatcgccctgttcacctccagctaccgggatatcatcggcttcctggtggtgttcatcgcactgtcgttccgccccgagggtctgttcgtgttcgactttaccaagggcttcaaacggaagggaggcaaatgacctatgaccaacctcattaccaaggccaaagacttctacaccggccataaaaagctggtggtcgtcctcggcatcctgttcctgatcctgctgccccagctcaccaccagcaactacgtccggggcgttctggcccgcatcatcgtgtacgccaccatcgccagcggcctgaacatcatcaacggctattccggccagagctgcctgggcatcgtgggctttacctgcatcggcgcctacagcggcgccctgatgagcaccgaactgggcatgactttcctgcccagcctgctgtgcaccattgttctgtgcgccattgccggtttcatcgtatccatccccaccctcaaactcaacggcatgttcctgtccatcatcaccctgggcttctcggaaatgatgcgcctgaccgccctcaactggcaggacctgaccaacggccccctgggcatcaaaggcatccccaccattaccatcttcggcttcaaggtggaatccggcgctcccttctactacctggcgctggtggtgctgctgctggtggtgttcattctcaaccggctgctcaactcccgcatcggccgtgcctggatctccatccgtgaggaccaggacgccgcccgttccctgggtgtcaaggtttcccactaccgctgcatcaactttatgactggtgccatcatctgcggcaccatgggcgtgttcctgggccactactaccgctacgtcagccccgacatgttcaccctggacgaaggtttcagcgtgctgtccatgtgcgtggtgggcggttccggcaccctgctgggccccatcgtgggcgcgttcgtcatcaacggcatcaccgagggctttcgcttcgcctccgaatggcgtatggtcatgtacgccctgctcatcatcgtgatgatgtgggtacggccccagggcctgttcggcgccaaggacagcgtcatcgcgggcaatatctccctcccgctgccggcgttcttgcgcaaaaaggaaaagccccagtcaaaggaggcgcagtgatatggcagtcattctggaaagcaaggccgtctgcaaatacttcggcggcctgaaagccgtcaacaacgtggacatgaaggttgaacagggccagatcttcggcatcatcggccccaacggcgccggcaagaccacctttttcaatctctgctccggcacttacaaggtgacctccggccagatcctgtttgacgggcgggacatcaccaacctcccccccgaggaagtggccaagctgggcatcgtgcgtaccttccagaacatcaagctgttcaagtacctttcggtgctggaaaacgtgaaggtgggctgccacatccataccaggaccaatgtgctggacgccttgctgcacaccccccgctaccgccaggacgaggaatatgccacccagcaggccgccaaggtgctggaggaagtgggcctgaccgaatacaaggactggaaagcgggcaacctgccctacggcctgcagcgcaaggtggagatcgcccgggcgctggccgccaaccccaagatcctgctgctggacgaaccggccgccggcatgaacccggccgagacctggagcctgctggaatttatccagcgcatcaacaagagcggccacaccatcgtggtcatcgagcatgatatgaagttcgtcatgaacctgtgcgattacatcatggtcctcagcttcggcgaaaaaatctgcgaaggcacccctgacgtggtgaaaaacgacaagaaggtgcaggaagcgtactttggacggggtaccatccagaagtccaacgagcgctgagagaggagagaacgacaatgtccgaaacgatgctcaagatcgacaatctggtggtggactacggccatgtccatgccatccgggatatcagcctggaagtggaccgcaacgagatcgtctgcctgatcggttccaacggtgcgggcaagacctctaccctgagcgccatcagcaacattaccaaaaagacctccggccgcatcaccttcaaggggcaggacatcacccacatgaacgcccccgatatcgtgcggctgggcatcagccatgtgcccgaaggacgccacgttttccccaagatgaccgtgggcgaaaacctgatcctgggcaccatggccctgcgcaaggtttcccgcaagtacatcgacgagcggcgggagcagatgtatgacctgttcccccggctgaaagaacgcatcaaccagcacgcgggcaccctgtccggcggcgagcagcagatgctggccattgcccggggcctgatgtacgaccccgaactcatcatgctggacgaaccctccctgggcctggcgcccatcgtggtggaggagatctttgaactgatctgcaccatccagaaacagggcaagacggtactgctcatcgagcagaacgccaacatggccctgcagatcgccgaccgcgcctatctgctggaaaacggcgtcatcgtcaagagcggcaccggcaaggaactgcacagcgacgacagcatccgcaaggcatacctgggcggttgagaaaggcggcgtaccatggacgcaacacagtacaaacaggcgattttgcaaacgctggacgccatcggcggcgaggtcacggcctgcgccgatgccatccacggctatgcggaactgagcggtgaggaacaccgttccgccgccgccctggaagagttgctggaacaccacggctttgcggtggaacggggcctcaaggacctgcccacggccttccgtgcggtgtacggcagcgggccggtgcgcatcggctttatgtgtgagtacgacgctctggccggtctgcagcaggacgatgtgccctgccagcagggcaacggcacccccggccacggttgcggccacaacctgctgggggcgggcagcgccgccgcgggcatcgctctggcccggctggtagaccagggcttgcccgccaccgtggtagtctacggcacccccgccgaggagaccctggccggcaagaccattatggtgaacaacggctgtttccgggatgtggatgtggtgctgggctggcacccccacaaccacagcgaaccgggcgagatcaagcacaaggcggccgccgcctttaccatgaccttccacgggcgggcggcccacgcctgcaactgccccgaaaacgggcgcagcgccctggatgccgccgaacttaccaacatcggcgtcaactatctgcgggaacatgtggaccgggactgctatatgcactactgctacctcaacggcggcgagcggcccaacatcgtgccagattacgccaagctgtggtacatggtgcgggcctatacctatgcccagatgaaagaggtggaacaacgggtcaagcgcatcgcagagggggcgtgcctgatgaccgataccaccgtggaatttgagactctgggcgatacccacgacaaccggctgaactttaccctcagccgcatcgtgtgggaggccatggaggcggtgggcacgccctgctttaccgaggaagagaccgcctacgcccggcagatcgcccaacatgcgggggtgcccggctttaccggcgattttgacacccgcatcgtttcggcggaccgcaccatcaagatcgacaacggttccaccgacctggcggatgtcagccaggtggtgcccaccatcaatatgtttgccgcctgctttgcggccaacacccccatgcacacctgggcggtaacggcccaggcctgccgtccgtcggcccatcggggcatgcggttcgcggcggcgtccctggcactggccggggcgcggctggcgtcggaccccgaaagcctggccgcggtgcgggcggaatttgaaaaggagaggtgacactggctatgacctgtcagcaacggatcgaaacctggctggaagaacacggcccggaatttgccgcctgtgccgataccatccacggtatggcggaactcagcggcgaggaacaccgttccgccaccgtgctggaggacctgttggaacggcacggctttacggtggaacgggggctgaaagaccagcccacggccttccgggcagtgtatggcaacgggccggtgcgcatcggctttatgtgcgaatatgacgccctggccagcctgcagcaggacgatgtaccctatcagcagggcaacggcggtcccggccacggctgcggccacaacctgctgggcgcgggcagcgccgccgcaggcatcgccctggcccagctggtggatgaaggcctgcccgccacggtggtggtctacggcacccccgccgaggagaccctggccggaaagaccatcatgatcgagaacggctatttccgggatgtggatgtctgcctggcctggcatcccctggaccacaatgaccccggcgaggtaaagttcaaggccgccgaggctctgaccttcaccttccacgggcgggcggcccacgcctgcaactgccccgaaaacgggcgcagcgccctggatgccgccgaacttaccaacatcggcgtcaactacctgcgggaacatgtggacaaagactgctacatgcactattgctatacccacgggggcgagcggcccaatatcgtgccggattacgcccagctgtggtatatggtgcgggcctacacctttgcccagatgaaggaactggaagcccgggtacgccgggtggccgaaggtgcctgtctgatgaccgacaccacggtggaagtgaagatcctgggtgaaaaccacgacagcaagctgaatttcaccctggcggccctggcccacgactgcatggaagccatcggcgcgccccgctttaccgaagaggaaaaggcctacgcccgccaggtggcccaggctgtgggcctgcccggggtggaaggggaactggacgagagcatcctgccggtggacggcaccatcaagaaggacaacggttccagcgatgtggcggacgtaagccagatcgtgccggtggtcaacatcaacaccgcctgctacggtcgcaaaacgcccaaccacagttgggcggtcacggtgcaggccgacaaaccggcggcccaccggggcatgctgttcgcggccaagaccctggccctgatgggcacccggctggccaccgaaccgacgctgctggcggcggtccgggcggaatttgaacaagcggagtaaacggaaatgctacaagaacaagtatataccgtatacggcgagctgctgcggggggaactgatcaccgccatgggctgtaccgagcccatcgccatcgcctatgcgggcgctttggcccgccagatcctgggccgggagccggataccctgcagctggcctgcagcggcaatatcgtcaagaacgtcaagggcgtcacggtccccaattccggcggacgccgcggcattgagatcgccgccctgctgggcgtctgcgggggcgatgccacccgccgtctggcggtgctggaaagcgtcaccgatgccactcgtgcccgggcggtggaactgctggaagcgggtatctgcaccaccagccttatcgaaggcaccgacaacctggtagtccaggtgacggcccgggcgggggcggacgaagcctttgtggagatccgtaccacccacaccaatgtgacccgcatggagcacaacggcgaaaatctgatggaaggggagtgcgcccggcaggtgtgcgcccctgcaccggacaaaagccttttgaatgtgcgggacatccttacctatggcgaaacggtggacctggacaccatccgggatgtgttggaaaaccagatcacctgtaaccgggccatctcggacaccggcctggccgggcactacggcgccgaggtgggcgccaccctgcggggcatgttccaggaaggcccctttgagatgcgggccgccgccgcggctgccgcgggcagtgatgcccgtatgaacggctgccccttgccggtggtcatcaactcgggcagtggcaaccaggggcttaccatcaccatgccggtgctgctctacgccgaggaaaaccaggtggaccacgacagcctgctgcgggccctggccatcgccaacctgatgagcattcaccagaaacggttcatcggcagcctgtccgcctactgcggtgccaccagcgctgcctgcgcggcagcggtgggcatctgctggctccagggcggcagctatgagcagatctgcggcgttatcaccaacactctggccactctgggcggcatgtggtgcgatggcgccaagtccagctgcgcctccaagatcgcggcggcggtgtacaccggcctgctcagcgtacgcatgagcatgaacggccaccgctttgaacagggcgagggcatcgtcaccgccagcgtggaaaaaacgatccaggacgtgggccacatcgcccgggaaggcatgcgggaagcggacctggagatcctgcgcctgatgctgaaaaactgatactttgccattaactcggtctgaccagtagagccttcctgaactgcacaacagcctggagcgcttgaacaaagccctgccatcggatgccatagctgtttgcaaactcaaagactttgatggcggcagccttgtgcagaaagtcaagcatgcgcattacaaaaagggaaggacctgttcctcacagattcttcccttttattttttctaccctgtttacttcttgatctccgccgtctccacgatgaactttacgctgccggtatctccgttgtgcaagccgctgaaggtctggtagtttttgcccgcctgctggacggctttcaggcggcggactacgttgcgcaggccgccgcccaggtcatcggaaaggtcgtcggtgtttttatcgctgaactcctgcacgccgtcgtggagttctgctgcaccatcgtggagttcagccaggccctcgtacatggagtcgctggcgtcgtccagtttggcgctgccttcggccagggcgtcggccccttggctgacctggccaaccgcttttacgtaggtgtcggcaccgcgggccagctcggcactgccgctggcaagctggtccaggccggtttgcagctggctgatgccgctgccaagctggcccatgaggaccccggagaccgtaccggccacgccctgcaccatggcaggagtgtcgttttgcagcgctttgcccatggccacgcctactgcgcccagtacggcctgctgctgctccccggtaaggccagccgctgtcagggcggccagcaggtccgcatcggtcacggtatccgttaccacggtcgtgccataattggaaattaccggcgccagctgctcgttcagctgggccatcatctcgtcattgctgcccgtatcgccggaggtcatcccaccgacggctccgctgaccgcactcaaaccgtcccgcagggcgttggcgccgtccgccagggccgtgccgctgtcatacagttgggtcaggccgtcggccagggcttcggcgccctcgtccaggccctgcacgccgtcggcgtactcgtggaagccatcatacagtgcctgcacgccgtcggccaaagcgccggtaccgtccgccagttcgtcggcggcgtcggtcaggtcgtccagcgtgtcgctcaaatcgtccaggtcggacaggtcgccggtgtccagatcatccagcgccgagggagtcaggatcgtggccgtaaagtccagcgagaagtcggtcacatcggcgctcacttcaaaataagaggggatctcggtgtcctccagcggctcaaactcggtcaggcgcaggctgtccgccaggcctggcatcgcggtgcccagcacggccgttgtgccgtccagctccataaccttgccgttgtcggtctcaatattagagaacttgtccccgtccaaaatcaccgctgtgatggccgtaaacggcacgcagaccgtgtactcctgcccatccaccgtgacggtctcgcgggtgtggttggtgtagtcaaagcggatgcgcacccggccgctctgcccggccaggtcggcgggggcggtttccacgccgtttaagtagtaggtcacccgggtggtcaccggcagggcggcgtcggacttgcctgcgtaggtgatggcattaccgctgttctcccaggtcagggcgttgtcggcgccggtggtgtacgcctcatcaccctctttgttgatgatgtcccgcagggcggccacgtcttcaatcgtcgcgccgtcgcgggccttcagcacagcttccaccgtggtctcggtcacggtgccgtcggcgtcggccttggcgtagacggtctcggccttatccacgccgccgggcgtggtcttgggggcagaggtctgcgccgtcgtctcggtcacggcagcaggggcgtccgccgaggtggtttccgccgtgccggccgcctggccgcaggccgaaagcagcagcgccgcagacaaaagtatcggtatcgtttttttcatatcccatcactccacattcttcagcgcttcgtccatcggcacgcggatgatgcggcggtactccagtaccgccaccaccgcgtaggtagccaggcccgccgccagcatgcgcgggtacagcgtgggcgagacccacatctcgatccagccggtcatgctttccatcatgacagcgcggaaaaggaacttcatcacgtatacttcgatcggcaggctgatgaccaagcacagcacgaccaccaccgtggtggacagcagatacagccgggcaatctcgctgccgttgtagcctaaaattttcgtcatcgagatggattgggcgttcttctcgatgatcatcttgcttagcaggtagacgaccacgaagaagatcatcacggcaaagccgttgaccagccccatggaggcccccatcgagaccatcagctggcgggaaactttcgtcagctggtccaggtcgatgaccgagccgacgtattcatccttgatctcggtcagcggtgcgtcggagaaatagccaccgtagtagtcgtcgcccaggttgaacacttcgttcagcttttcccggggcataaagacggccagcgcccccatgtaatcatacacgccgtccaccgtaaaggtataggtcgtatcttcgtacttttcccgcagggtaatcgtgtcccctgcgcccagttcgtacttgtcggcgtaggccgaggacaggtagacaccatcccccggcagctgcacgtaacggctgtccggctctacaccgtacagcagcacgctctcgcttttggccgcgccgcccacgtcggtgcccagggtctgcaggctgtaggcgctgaacttttcggcgttgttttcctcggtatcggtctccatgcggaactgcagcatcgagagcagggcattcagcttgcggtcctcgtccatggcgttgtaggggatctgcagcatcgtctgggtgttgctcagcatgttgtccgcgatcgtatcactgtaatggttcagcgcatcgggcaggatcatgccaaaactgagcagcagattggcgaacagcacgcccacaaacagcaccacataactgcccaggttttgcaaaatcacgcgggtgcggaaccgcccaaaaaacggcagtgccgacggcaggggcagggcatgcttgcggttagcgtggcggctgaggtcatgccgcaaaaattgcagcggcgagatgcgcatcgtgcgggaaagcaccagccagttgatgaagatcatcaacgccaccgggatgactgtcgtcatccagaacgcatcggcgttccagcgtgtgacataggtgggcaagctgtaactgccatagtacatgtcgacgcagacgtttttgagcaccgtgtaccccagtacattgcccaccgccgcgctgataagggtgaccaccaccggcatggccatgtagtggcgcaccagctcgccccggctgtagccggaggcccgcagcgtgccgatgacgcccgcctctttggcgatggtattggacgtagtaacggaaaacacaaaggccataatggcaatgacgatgtagagcaacacggcaatcatggcgcggtcgctgcccaggtcgtcaccggtaaagatgatggcctggttctcatactcgggcacaaaatcctgcagggacgccgttttgttgacgactttcataaagtcggtggctgcgtccttctcggcgcggtcgtccgccggggcggtgtcgtactgccaggcgtagttccaggtctgctgttctggcagggcatcgaacgcctcctgcgtgacgatggccacaccgaacttgatggcgtcgaacatcgtgtccgtattatccttaaacaggcagctgtaatccggcagggccacatagccggtgacggtccaggtctggccgtttgtgtcggtcacggtatcgcccaccgcgatgccgttgttctcggcatacatgcggtccaggcccatctcaccgggggcggcaggcatggcaccctgcatcaggcagacagtgttgacctgggtgcggtccgggtagatgcgcagcgtgctgccgttttccatggcggtctcacggtagtgcaggtcgtacagggtcacacctgcgccggtgatcgccttaagctgggcgcggttgagctgcttttccacgcggaagtggccatcctcgatgttgtatttctcaaagccttcgttgtaggcggcaatcatgctggagccggccacaaggaagcccgacacaaagccgatggtggcgatgagcagaatagcgatgacggcgtacttgcccatctcgctgcgcagttcgcgcagcatgcgtttgtttaaagggtccttcacgcgcaagccccctttaccattccaggtcctgcgcggggaccttgaccgcattggtctcgttgctgcggatggcgccgtcgcgcagacgcactacgcggtcggccatcaggcggatggcgtcgttgtgggtgaccatgatgacggtgttgccgtacttctggttgacggtctctatgagcttcagtatctccttgctggtcttgtaatccagcgcgccggtgggctcatcgcaaagcaggatgtccggattcttaacgatggcacggccaatggaggtgcgttgctgctggccgccggaaagctggttgggcagttttccgcggtgatcccacaggcccagcaggtggagcaaatcgtccacatccagcgggcggcgggagaggtaagcgcccacctcgatgttttcccgcacggtcaggttagggatgaggttgtacatctggaaaatgtagcccagatggcggcggcggtagagggtcagggccttctcgttcatatcggccatacgctcgccgtcgatgagaatgtcgccggagtcggcgcggtcgatgccgcccaggatgttgagcagcgtggacttgccggagccggacggccccagcagcacgcagaattcgcctttttccacggccaggtcgatgcctttcagcacctggacccggttttcaccgctgccaaaggactttttgatctgattcagttcaagaaacacaggaatgctcctcttttagttagtctattgcaattagcatacactaacagtataaaacggaagccccaatgtgtcaatattttcgtaagttttcggtgcattttagcggcaaaatgccattataaaaggccctgccgcaaggtgggcagggccgataaggcacatattaaaagcagaaatcaagcgtaatgataccgattccggttcttgaccagcagcgccgccgaaacgagcaacgccgcagcctcggcaaaaaccagggcataccagatgccgtcaatgtccagcaccatgggcagcaccagcaccgcaaacacctgaaacaccagcgtgcgcaggaaggagatcgccgccgagatggcaccgttgttcaacgccgtaaagaacgccgaggagaaaatgttgaagccgcacagcaggaaggagaacgcgtacagcttcagcgcatgctcggtcagctccatcaggccggcgtcgtagccgacgaacatcttcgccaaaggcgtggccatcagctgggcactggtaaacatcgccacaccggcaatcgccagcatcgtaatgctcttgcggaacaagttcttcaattcatcgtggttttcagcaccataatggtagctgatgatgggcgcacagccctgggcatagccgatgaacaccgctgcaaagataaagcccacgtacatcaacacgccgtaggccgccacgccgtcggcgccgatgagcttcatcagctgcaggttgtacagcgcactgaccagcgaggccgacaagttggtcatcagctcgctggaaccgttggcacaggccttgcccagcgctttggcgctgaacttgggccgtacaaagtgcagcaggctggagtttttgcggttgaaaaagtagaacatagggccgatgccgcccaccatctggctgatgacggtagccgacgccgcgccaacgatgccgccgcgcagcacacccaccagcagaaagtccagtacgatgttggtcaggcccgccagcacagtgaaggccaggcccagcttcggcttttcggaggtgatgaaaaagctctggaaaaagaactgcatcataaaggctgtctggaacaccagcaggatgcggccgtacatcaggcagttcggcagcagttccggcgtagcgcccagcagctgggcggcaggctccagcaggaaccagccaatgatggtggagacaatgcccatcacgatcgtggaggcagccagcatcgagaacaggttgtccgcctgctttttatcgccagtgcccagtgtcatggcgaccagcgcgctgccgccggtgcctaccatgaagcccaggcagccaaacgcctgcaggaacgggtagattaggttcaaagcagaaaatgccgttttaccggcaaaattcgagataaaaaagccatccaccacgctgtacaccgaggtgaagatcatcatgataatgggcgatgccacaaaacgcagcaggcggccggtggtaaaatggtcagataactggatacgatctttgctcataggttctccgttttatgtccatctgttttttcttttaactgtgtaaattcttcccgcaatttctgcaggtatccctgccggatggcaaggtctgtttccatgcgctccagccccatgcggcatatggctgccgcctccgcccggacaacccgcgctatggttttttcggccaaggcgcggcccgcttcggtcaggttcaggttcttggcacgcttgccgccgggggccggggtcagcaccagcagcccctgttccaccatgctgcgcaccgccgagttgagggtctgcttgggcaggcaccattcggcgcacatctgcacctgtgtaagcggggcggcactgctgtacagcgcatacagaatccagaatgctgtatccgacaggccgaactgcaccgccgccgcgtgatataatgcgtttgtttcgttatactgtcggttttcctgttcaatcaggcttttggcagacagtgcagcgttctcttccaaggcgggttgtctcctctcaaaacagcaataatccgaaatcggactctgctattatagtccgatttcggattactgtcaagcggtattttgctttattccacaaggtttaccagcttttcgcctttggcgaacgcacgggcattttccatcgtagttatggcaatactttgcagcgccgtgcgggtaaaaaaagcctggtggctggtgatgaccacattcgggaagctgagcagcaccggcacgaccacactgcgcagcacatcatcggagtaatcctcaaaaatttggttgtcctcggtctcgtagacatccagccccaccccggcaaatttgcgctggcgcagcgcatcgatcagcgcgtgggtatcgatcagcccgccccggctggtgttgactaaaatagcgctgtcccgcatcatttttatggcatcggcgtcaatcatgtggtgggtctccggcgtcagcgggcagtgcaggctgacgaggtccgccgtgcgcagcagttcctccagcccgacgtaccgcaccaggccctccagcgcagggttgcggtactggtcataggccagcacggtcatgccgaagccgcagcagatgcgggccatggccgcgccgatgcgcccggtgcccacgatgccggcggcggagccgtacagcgtgtgacccagcaggccgtccagcgcaaagttattgttgcgcaccttgatgtaggctttgcagatgcggcggttggcggccatggccagcgccatggcgtgttcggccacggcctcggggctgtaaccaggcacccgcagcactgtgatgccgcagcgcttggcggcgtccaggtccacgttattgaacccggcgcagcgaagcagcagcaattttaccccgacggcagccagcgtttccagcaccggggccgagccgtcggcgttgacgaacgcgcacaccgcctcgcccccggccgccaagggtgcggtgtccttgtccagattagctgccaaaaagcggatgtcgcacccatattcaggatcggcagccagtacgtcaaagtataaatggtcatagtctctcgtgccataaaatgtaattttcatagaaaaatccccctggggtaagtatgcgcaggttgtacttttcttataagaaaagtacgcaaaagaattttaagatcactgcgtgagcaagggggatagaagcgaaaagttccttatggcataaataggggatacaataaaagggccccctcgcagagggggtcttcctatcatacctgcttaatttcaacataaacaatttccgtgcggccctgggtgcggaatttgtagccccaggtgccggtgccgccgcttacgatggcagtgcaggtatcggtgatctttttttggccgtagttgcgctcgtttttggcgaccatgcccaccgcaccggcaggccagacctgcccgccgtgagtgtggccgcttaaaatcagatccgcaccggcagctgcggcattcttaaagtcccgcggctcgtggtccagccagacagtatagcggtcatccggcccgccgggaatcaactgggcggcagtaaaacgctggccattcgtatacaaatagtctttgcggcccacgatgcgcacgccgcagggcagcataacgccggtatcttccagcaggcgcacgcccgctttggctaagccctgctccaagtccgcacggccgaagcttggctcccgccaatggtggaacaggtcgtgattgcccagcacgtagtatttgcccagaggcgcgtcgatctcgccgaacaggctgcagaatgcttccagttcctccggctcggtgaattcgtcgaaaatatcgccggtcaacaccagcaggtcggggcggcaggcggcaattttctcccgcagttcggggatgcgggtgtgatccatggctgcgcaggcgcgggggtggacatcgctgatctgcacgatgcgcaaagcgccatggggcaattttttatgcgtagttatattatattttgtggtacacagtttcagggcgcggcggcggccccaccacatgatgaaagccgtcagcagccatggtgttatgccatccagccagaaaatgcgccaaacgaattgcggcgtaccacccacccggcgcatgagcagcgcgatgccggtaccgatgcagtaaaaagtgaccaggtgcccggtgaacacgatgcccaggcccagcgggtcgcggctgatgtaggccagcagcagcataagcagcagcggcaggccgtaatacagcactggccatgcgctgaccagctgcaagggcggcagctgcaaaaagtttacatacagcagcacatccagcgccgcctggccaatacgcggcaggacgaattgaaagaaaggatgatacatggtggataccagcttttgtgtatttctattgtaggggcaaaaggctccccttgcgcgcagcgggtgaggggggattttagcagcgggcggcacacgggccacccctcagtcaccttcggtgacaactcccctcaaggggagccttatgcgatacttattagtataccattatatcccccaaatgtgacgaaatattgaaagcttctttgcttactttctttgaaaagaaagtaaggccccgtaccttttaacagtacggggccttaccctatgcgttataaattacttctctttgcccatgatggcggcatcgatggcacgggcggcttccttgccggcgcccatggccaggatgacggtggcagcgccggtaacggcatcgccgccagcgtagaccatcgggcggctggtcaggccgtcagggccgttggtgatcaggcaaccgtgcttgtcggcgtccagacccggcgtggtggagcggatcagcgggttggggctggtgcccagggccatgatcatggtgtccacatccaagacaaactcactgccctctttcacgatgggacggcggcggccggaagcatccggctcgcccagctccatctccacgcaggtcatacccttgacccagccgttctcgtcgcccagcacctcggtggggttggtcagcgtcttaaagatgatgccttcctcctcggcatgctcgacctcctccttacgggcaggcagctcagccatgccgcggcggtagacgatgtagacattctcggcgcccaagcgcttggcgcagcgggcggcgtccatggcaacgttgccgccgccgacaacggcgacagacttggacttcatgatgggcgtgcgggaatcttccttgtaagccttcatcaggttcacgcgggtcaggtactcgttggcggagtaaacgccgttcaggctctcgccgggaatgcccatgaagcggggcagaccggcaccggaggcaacatagacagcctcgaagccgtagtcgttcatcagctcgtcgatggtcaggaccttgccgacgaccatgttggtctcgatgtcaacgcccagctccttcaggccctcgacctcgtgctggacgatgtccttgggcagacggaactcagggatgccgtacatcagaacgccgccggccacatgcagggcctcgtaaacggtgaccttgtagcccagtttggccaggtcgccggcgacggtcaggccggagggaccagcgccgatgacagccaccttgtggccgttgggggcgggggcaacaggcttggtatgtacgttgttgcggtaccagtccgcaacaaagcgctccaaacggccgatgccgacggattcgcccttgatgccgcggacgcacttgccctcgcactgatgctcctgcgggcagacacggccgcagacggcgggcagcgcactggactgggcgatcacgttataggcggcctcaaaatcaccctcggcgacgtgcttgatgaagccgggaatatcgatctcaacagggcagccgctgcggcaggggtggttcttgcactgcaggcagcgcttggcttcgttaatggccatctcctcggtatagccgagggcgacctctttaaagtttttattacggacattcggctcctggctgggcatggggcactttttcgggtccatattcggcataattactgcacctcctgtttcagcagattgcactcggcctcgcgggcgtgggcctcaaaaggcttgtacatggtgccgcggtgcatagcttcgtcaaagtcgacctcaaaaccgtcaaagtcggggccgtccacacaggcaaacttggtctggccgccaacggtcagtcggcagccgccgcacatgccggtgccgtcgaccatgatcgggttcatggagacaacagtcttgacattgtggggtttggtggtcttgacgacgaatttcatcataatcagcggtccgatggtgatgacttcatcaaagttggcgccatcgacgatcttctgctccagcggggcggtaacaacacccttatcgccgtaagaaccgtcgtcggtcataaggatgaactcatcgcagcaggcgcggaactcatcctccaggatgaccaggtccttgttgcggaaaccgacaatgccggtcaccttggtgccctgggcatgcagtgcctgggcgatgggcagtgcgatagcacagccgacgccgccgccgacaacgcagacattcttcaagccctcgatctcggtggctttgcccaaggggccgacgaagtcgtggacagcctcgccctctttcagcgcgttcagctgcatggtgccggcacccaccacctggaagatgatggaaaccgtaccggcctcgcggtcgaaaccggcgatggtcagggggatgcgttcggaatcttccttcgcgcgaacaatgatgaactgaccggcctttgccttctttgcgatcaacggtgctttgatccaaagctcggtaacagtggggttcagctctctccgtttcatgatagtaaacaaagctctctctccttaccttagtggtatgtttgtattgtaacgtattctcgtgaaattgtaaagcgtcaacaaatccgcaacctatgcaaagattgacgtgttttattgtaaaaattgacagttttcttaaaattgcacttgggtgggggcgtgattctgccacaaggtatacccggccgggcaggcgatgccagagggggtgaggtttgtggtatccagtggtacatcgtcagataccagcagccaatcagcttcggccagatcggtgtaggcatggccggggtactccggcgcgggggcttcggtggtcaggtccagcacaccgtcatccagcagaccggtctgcaccagggtctcatattccgcgatataaaaatcgcggtcgacgtaagtttcaatgagttggctgttccgctggcggatgccgtaggggataaacagcaccgtaccgtccagctcgtgcaggctgtcgttcaggtcgctggctgcctgcatcgtttcggcatcgatgccgtaggtccagcggttgatgcgccactcgcctgcgtagcacaacacacagagggccagcaccgcgccagccatggcccgccgggctttgcggcgcagcagcagcagcgcgccgatgacggccgcaccaaccacaatgatgcaccgccagaccagcagccagccgttgagacccagcaccggcagacggtcgaggcggtcggccacaaagtcaaaccactgcagcagggtgttgtctcccgcgcccgcgccgatggcccggcagaaggcgatgaagccgacgccccacacagcggtcagcacggccagcaccctgcggcgggcggcggagagctgctcgtccagcgtgttcagcgtgaccagcagcagcggcataaacagcggctccagataccgcatgtgctgccggggcgagggggagtgcaggtcctcccgcacggtgatggaccaggcgatgacccccacaccgatgaagagcgacagtagcagaaacagcggcagctgggtgcgcaccgggtcgctgcccttggccgggcggcgcagccctgcggcgggcagcagcaccggaaacacgccaaaggccagtacggtgaacagcacatcgcagacgatggcaaagggtagaaagccccactgttcggcggtcagccagccggtctggttgtaggagttgcccagcccccggaacagggtgagcttggccagcacaaagcaaccggcaaagctgccgaacagcgccgcgttgcaggcaagctcgctgcgccaggtgctgcgagcttgccagagggcccaggcccgcaccagcacccaggcgatgagatagtagagggcgacttctttatttagatagagcagatagcaccacacgcccgccgccgcgcaccagcccacccgagccttgggcgcggcctgcatggcccgcagcataaagaaaatttgccacagggacagcggcagaaagaccgtctcgctcatgaacgtgaccgccgccgacatggtgggcagcagcgccaccacgcccacgaggaacaccgtgcggcggcggttctgccctgtggcgcggcagagcgcgtaggccgggaacaccgcgctggacgcatacaccgcgttcagccagccgatggctgtaatttgtgcggcggtggttttcagcgccagagcaggcaggatgaaaagcgggtacaaaatcttctggtagtcgctgggcatgttgcgcacccgcaggccgcggccctgccacaagctgcgggcgacgtccaggtagcgcagctcgtcactatagacggccagctcccgcgggtagctgctgagcgcgccgtacaccacggcgcacaccacaaacacccctgcgacccagacccagggagagatctttttatgtgtagatggcatggggacctccgaaaattcagctttcctttaggcaacaccgcacaattcccgcctagcggcttaagcaccgctccggcggctgcggcacggcatctgcgttgccaaaatgctcgataatacacaaagtattatctgcgcttttggcttaacatctgccgcacctcgctcgccgtatcggcacttagaattatgcggtattgcctttattataaagcatccaaccgcccctgtaaacaaaaaacaggcacagcccattggccatgcccggtatgtgatagaacttattctttgtccttcaactcaccccggcagcggtacagcgcgcccaggatgaacacgaagcagatcacccaggtgaccggctcacagaagcagaccgccgtgtagcccaccgcgggcacgatccacacgccgaagatgaccttgccgatgagttccagtccgctggccagcagcggctcgatggtgtgctggatgccctgcagcatgttccgcacgatgaccagcaccgccatgggcgggatgaccggggcgctgatcttcaaatacagcaccgcgttggagatgatgacctcgtcgttggtgccggtgatggcccgcaccgccggatcgctgaggaagaacacgaacaacatcacgaacacccaccacacaaagtagatgcccagcgccgtggtcacgcctttcatgatgcggctgcggtgtcccgcacccaggttctggctgctgtaggtggccacggcgatgcccagcgcaccgccggggataaagaacagttccgcaaagcggcgggcggcgacctgagccgcgatgtaggtgctgcccagcgcattgatactgctttgcagtaccacactgccgatgttgtagatggcgctcatcaagcccatgcttaggcctgcccagaacatattggcggcaaattttttgccgttggcaaaggcgttgcgggcaaaatgcagggccgggtagttgcggatgatgtaccacccgcacagcaccgcactgatgccctgggctaccacggtggcagccgccgcgccgcccacgcccagctgcagtgggcccataaaggcgatgtccagcccgatgttgagcaccgtgctgaacagcaaaaagtacagcggcgtcaggctattgccaatggcccgcagcagggcggcttccatattataagccatcgtcagcgggatgcccagcagaatcagcgtcaggtaggcaagggccccatctatcgacgcttccggcacctgcagcagcaccagcagcggacggcgcacaccaacgaaaaccaccgtcagcacagcagccgtagccccggccagcgccagcatccaggccgtggcgcggcgcacgcccttttcatcacctgcgccaaacaggcggctgaccgtcagcgccagaccgttattcatgccgaaagcaaagttcataatcagcccgtacagggcagccgtagccccgatttccgccagggcagcgtcccccaggatatgcccggccaaagcggtatccgccagattatagaactgctgcagcaggttgcttaaaaacagcggtgccgaaaagttcagcagcagccgtaccgggtcgccccgggtcatatcggtaacgcggctttgcgcggtagccataatgcgtacatctccttatacaaaaagggcaaaatcaaagaccagtttattgtatcacgccgccacagcccatacaagagaaaaaagcgcccggtttagacaaatatcccgccaaaatgttttttgccctctcttgttcccaaatttaacgattcaaggaaattgtaattgcttgcgggcaattgtgcagaaaagacacaagcctggccgaaattttgtgtaggaaataacagatgccgtaaattctcgtcattttgttagaaaaccctgttattatcttgtcaaatccgagaattgcatcggtttttggggcgtgctatgatgaatatgttgaaaacgcttacaaagtgttgcatcccacaggaggtatttcttgactatttatgatatagcccgggaagccggggtctcgattgccacggtctcccgggtgatgaacggcggcaaggtgggcaaagccacccgcatcaaggtgcaggctgtgctggacagctgcgattaccagcccagccaggtagcgaaaggcctggccacccggcaaagccgctgcgtagccgttatgacggtggacatccgtgatgtacaccacgccgccatcgcctatgagatcgagcgcacgatggccaccgccgggtacagcaccatcctgtgcaacctgggcggcacccccgcccgcaccggcgagtatctgcgtacgctgaacgcccagcagatcattggcgtattcttcgtcggttccatattcgtgacaccacagtgccgcgagtacattgccaaatatgttcccaatattccgattttgtttgccaacgcggttctgccgctgcccaacgcctacggtgtcctttccgatgaggaagacggcacctaccacgccgtcaagcggctggcccaggccgggcggcgcaacattgcctttgtcaatgatgacgagaccgagagtgaggagcacaagctgaacggctaccgccgtgccatccgggaatacggtttgacggagcgctgctaccgggccgaacgttccatcgagggtggtcagttcgtgaccacacacatcctgcagcaggacccaaacaccgatgctatcgtcttttccgaggataccaccgccgtgggctgcctgcacgcgctgcaggtcaccggcaagcgcatcccggacgaagtcgccgtcattggctgcaacaacagcgtctactgcaccatctgctacccgcagctgacctccatcgacaacagcctgcacgagaccggccgcatggccgccaagcagatgatccgccttttaaaccacgaatccgatgtggaaaagaccatctgcctgccctgccggttggttctgcgggataccaccccgccgatgctgtaggccgcaggcgaagcagacattttctttattacttcaaagccgcaaggcagcgcctgatctaccaggtgctgctttgtgtggtttatggggtattctttgtacaaaaacaacaaaaaacaggctattgacgacaaaacttctgcacgctatactggtattataggtgattttccggatggatttcgccagaaggagagaataagtatgttggacgttctgatcatcggtgcaggcgtttccggctgtgccgcagcgcgggaattatcgcgctgtaaagcagatattctggtgctggataaggaggaggatgtctgctgcggcacctccaaggccaacagcgccattgtccatgcaggctacgatgccacccacggcagcctgatggccaaattgaatgtggagggcagccgccgtatgcctgcccttgccaaagaattggattttgcctacgaccagtgcggcagcctggtggtgtgtttgagcgagcaggaccgcccgaatctggtaaagctgtatgaaaatagcgtggccaacggcgtagagggcctgcgcattatcgaacgcgacgagctggttaagatggagccgaacgtttccgataacgcggtggctgccctgtgggcacccaccggcggcatcgtctgcccctttggcctgacctatgcttttgccgagaacgccgcaaaaaatggcgtaaa

SEQ ID NO: 7892 - DNA, 534 bp, Unknown
  gut microbiota DNA sequence
cgaaaacggcgtggccaacggcgtagagggcctgcgcattatcgaacgcgacgagctggtcaagatggagccgaacgtttccgataacgcggtggctgccctgtgggcacccactggcggcatcgtctgcccctttggcctgacctatgcttttgccgagaacgccgcaaaaaatggcgtaaagttccagtttgataccaccgttaccggctttgcccccatcgagggcggctggcgcgtggagaccgacaagggcagctttgagacgcgcctggtggtgaacgccgccggtgtgcatgcggacgagctgcacaacgccgtggatgccgcccacccgatgcagatcattgcccggcgcggcgattacttcctgctggaccacgcggcggcagggcatgtgcaccacaccatcttccagctgccgggcaagtacggtaagggcgtgctggtcacccccaccgtgcacggcaacctgctggtcggccccacggccattgatgtggatgacaaagaggccaccgccaccacggcggc

SEQ ID NO: 7893 - DNA, 417 bp, Unknown
  gut microbiota DNA sequence
tggtaagggcgtgctggtcacccccaccgtgcatggcaacctgctggtcggccccacggccattgatgtggatgacaaagaggccaccgccaccacggcggcaggcctgaacgaagtgcgggagaagtctggtctggcggtgaaggacctgcccatgcgccagactatcaccagctttgcaggtctgcgcgcccacgagccgcggcacgatttcttcattggcgagattgcctccggctttgtggattgcgctgccatcgagtcccccggcctgtccagcgcccccgcggtgggcgctatggtggccgacatcgtgaaaaacagcctgcatctagaggacgatccgacatttgacccaacccgcaagggtatcctggaccccaagacgctgccttttgaagaacgcgccgcccttat

SEQ ID NO: 7894 - DNA, 1530 bp, Unknown
  gut microbiota DNA sequence
cggcctggcggtgaaggacctgcccatgcgccagactatcaccagctttgcaggcctgcgcgcccacgagccgcggcacgatttcttcattggcgagattgcctccggctttgtggattgcgctgccatcgagtcccccggcctgtccagcgcccccgccgtgggcgccatggtggccgacatcgtgaaaaacagcctgcatctggaggacgatccgacgtttgacccaacccgcaagggtatcctggaccccaagacgctgccttttgaagaacgcgccgcccttatcaaagagaaccccgcctacgggcagattatctgccgctgtgagagcgtgaccgagggcgaaattattgatgccatccaccgcgtgcccggtgcccgcagtctggacggcgtaaagcgccgcacccgtgccggtatgggccgctgtcaggcgggcttctgcagcccccgcgtgatggaaattctggcccgcgaactgggcgtgccccagagtgaaattaccaaggccggcggcaaatctaaaatcatcgtcggcaccaacaaggatacgttttaaaaggaggggctggatatgaacaacgtagatctcgtcatcatcggcggcggccccgcggggctggcggcagccgtggctgcccgcaaggccggtgtagaaaacctgctgattttagagcgcgacagcgaactgggcggcattttgaaccagtgcatccacaacggctttggcctgcacacctttaaagaggaactgaccggtcccgagtatgcggcccggttcatcgcccaggctgaggaattgcagattccctacaagctcgacaccatggtgctggacctggcagcggacaagaccgtgaccgccatgaacaaaacggacggcctgttccagctgcacccgaaagctgtcattctggccatgggctgccgggagcgcccgcgcggtgcgctgaacatccccggctaccgccccgccggcatctacaccgccggtacggcccagcggctggtgaacatggagggctatctccctggccgcaaggtggtcatccttggctccggtgatatcggcctgatcatggcccgccgcatgacgctggagggtgcccaggtgcaggtggtggccgaactgatgccctactccggcggcttaaagcgcaacattgtgcagtgtctcgatgacttcggcatcccgctgaagctgagccacaccgtcgtggacatccagggtaaggagcgggtcgagggcatcacgctggcccgtgtagaaaacggcaagcccgtccccggcactgaggaacactacgattgcgacacgctgctgctctcctgcggtctgctgcctgaaaacgagctgagccgcgccgccggtgtggtgttaagccccatcaccagcgggccgctggtcaacgaaagcctggagaccagcatccccggcgtgtttgccgcaggcaatgtgctgcatgtgcatgatctggtggactatgtttccgaggaagccggcgctgccggtgcccaggccgccgc

SEQ ID NO: 7895 - DNA, 8274 bp, Unknown
  gut microbiota DNA sequence
aggggctactcgcccctaagaaccccaaagttgtggtcagccgccccaaaagctaaaaattgcaggagtgctgcaattttcttaacgcttttaggccgtcttccatattgaccccttcggggcctagattcctctacaccaatactgtagggggcgatgctcgtcatcggcccgtgggcggctccgttgccatctactgcaaaccaacgcaggtaactgcctgtactgtttttgcaccctatatataccctaaaactagcaaaacaccccggtgtttgcaactgtttgtacagttataaaaacagttaaaattaacatatctatgcaatatattgaactgtttatctagttgtagagttttatctacgcgcgcgcggcctccaaggtcagctgctcgatgatgttttcggggactttctttgtgtcataccaaatcgcataagcacctttatgcccttggcgaatcgtggcattttcgaggcccattttcttggctgcttttcgcaggatggattcactaataacctcctttttagcgtcggcaatagcaatggatgtcttcacccagcctgtgttatttgtcagctcgcccaacaatgccacggcgcgattcccaacgaccggctctggccctctcgtgttgccgcccgcctgtgcccgcaagatctcatccgccgttaaagcacattcgtccatgagttccaccccgccatcgtggatggaaaacttgcggctggggccgggcgggcccaggctgcttttatcctgggcaaagacgcgcaggctgcggtcgtccgggtcgcagcctacaaaaatgatgcttcgcgctgcgttgcggaagtcgctggagccgaggatgcggtcgctggccgagccgccggacaggttgggcttgctgatgtggctgaccagcatcaccgcgcagtggtagcgggcggcgaagtttgccaggtggtccatcatggggcgcacgtcggcggcctggttcatgttggcgtgcttttcgaggtaactttgtatggggtcgaacaccaccagcgatggacggcatccggggcggctggccagcgcgtccagacgggcgtcgcacatggtcagcgccggggtgtcggccatttgctgcatgataacgatgttttccgggtcggcgcccagagattccagccgcggcgaaagcacgatgtgggggtcgttctcctgggtaaaataatacaccaggccgggcgtaccgtccctggtggcgcggccggtgctgatgtcggcggcccatttcagcgccagccaggtcttgcccatgcccgccacaccggccaaaatggtgatggcatccagcggcagatacggctcgatcaggtactcggcctgccgcgtttccacgtccgccatgggcgtgaagccaagctcctgcatggcctggcggcgcagcgccatccgcgcgatctttaagcaatagctggggtcggcgtcaaactgagatgtataattgtctcgtcggtcggcgtactcctgctcgctgatgcccagctgcaaggcccgcgtgcgcagcagcatcatgcggcgcaggcgctcctcatcggtggaaacattgcaggcatcgaaaaaagaaagcggagccaacaggcacgttttgtccatgctgttgatcttcgcgtcgaacatctgggcttcaagtgtcaattcattgggctgcatggggtcctccttacacaaatgttgttgaatacactacttatagtagtattataacgcgcgggcgctgtactgtacaatgaaataccgctgaaaatttactgcaatcttactgcaggggtttttagcggattttttgtttgtaggtcttgttatgggactgcaaaaataaaacatgccaaagcgtattgacaactattggtagttgtactatgatgggtgtactgacaaggagaacggcaaaacaaaatcggacactggaaaggagacatttgggaaaatgacgtacaaagaaaaggtagcatggctgcagcggtacctgaaggcgcgggagaaggcgaactttctggggggctgcgtgcaggagatggaggccgaggcacagggcatgcgcacccggctggacggcgtgcccggggccgggcgggacacggcacggctggcgcgaagtgtggaaaaggtcgaagaaacgcggaaaatgtggaacgaccaactggaccgctgcggcgagctgcgcatcgagctggtggccgagctggcgaagatccagcatccgcttgcacaggaggtgctgcgccgccgctacatgaacggcgaaagctacgccgagatctgcgacgcgctggccctggtggagcgccgcgtttaccagctgcaccgcctgggcgtgaacaaggtgtgcgagccggagaacggagggtgaaaggaattcagtaagatttcagcgcgatttcattgcaaagtacaactaaacgtggtagaatggtaacatcaaaactcgtggaagggcagacgccccgctgcgggttttttattttgcgctttttgccggaagggggggcagggatggaccgggtaacagaggaaaacgtcattgcagagctggcgggcattgcgtttgataacggttgtaatgatggttgtggtttggttgttaaaactgccgataagctccgggcgctggagctgctgtataaatatcttggcttgggggaccggggcggcggggtggataaggtcgtgattgtggatgatgtgtgattttggcggtcggctatcggtattccgccaccatgcggcccggcctgctttaccgtgcgcagaacgaaagccgcctatgtaaaggagtaacgaaacaaatggacattcatctcaaagaaacaattccaaaagtattccaaccgatccataaggctgtgcaaaacgaaggcataaaggaggtcgtggccaagggcgggcgcgggtcgggcaagtccagctacctgtcgctggagctggttttgcagctgctgcgccacccggactgccatgcggtggtgcttcgcaaagtggcaggcacgctgcgcaacagcgtgtataaccaggtggtctgggctatcgatgcgctggggtgtacggcctgctttcgctgcacagtttcgccgatggaatgtacttatttgcctaccggacagaagatcctttttttcggcctggatgatgccggcaagttgaaaagtttaaaacttcccttcggcagcgtcggtatctgctggttcgaggagctggaccagttcgacggccccgaggaggtgcgcaatgtggagcagagcattttccgcggcggcagctacagtttgactttaaaaagttttaacccgcccgccatggaacgcagctgggtcaaccgctacgcgctggaaaaacgggatggaaaattggtgcatcactccacctataaggacctgccccgcgccctgctgggcgagcgcttttgggccgacgccgagcacctgcgcgccaccaaccccgaggcctaccgccacgagtacgacggtgaggtggtgggcagcggtgcggccgtgtttgccaacctgcagctgcgcgctgtgccggacgacgaaattttgacgttcgaccgaatttatcacggcgtggactggggctggtggcccgacccgtgggcctacaacgcctgcgcttacgacccggcgcggcgcaggctggtgatttttgacgaactgacgcggtttcgctgccccaatgcggacacggcacagcttttgatcgagcgtggtgtgggcggcgacgagggcggctttttgatcgctgacggcgccgagccgaagtcctgcgcggattaccgcgccgccggcctgccctgccgcgccgcccgcaaaggccccggcagcctgcgcgaaagcacgaagtggctgcagagtttggccgagatcgtgatcgacccggcgcgatgccccgacaccgcccgtgagtttggcgagtacgaatatgcaaaagatgcacgtacaggcgaggttttgggcggataccccgatgcggggaaccatcatatcgatgcggtgaggtatgcggtggaaagtgtctggcggagacgcgggacctgaacttttggcttgtggccgggcggctttcggcgttccgccgccgggcagggccgaacggcatgcaacatacatacaaaaatagcaaaaggagtgacaaaatgcagacttatttggagcaggcgtttggaaagagcgattgttcgtcggtgaagatgcgtggggcggtgcgggagtggatggacttatattacggcgctacccgcagcggcgaggacggcagtgcgcggctggctgtgctgatcgtatcgaaactatgcagaacggttttcgctgagtacgacgtgcatcgggacaagcacgacgattgggcgcaggaatgttatacggacgccctgaataaggtggcaaaaacagcgatgcagtatgctttaatcggcggcgagtgccttttgaaggtggtggacgaccattttgtgccgatccggcgcgattgctacctgccgctgggacgcgacgacaggggcaatttgactagcgtaggtatgatgcagacgctgtacgagaacggaaaaaaatatgtacttttggagcgccgcaccgacatggaggacaacacgctgatcgaaaatcggctgtttgaggtcaacggccaggcgttgggacgccgcgttccgctggacacgctgacggcctgcaaaatgctgtcggacgatgaatttttgcccaacgtgccctgcatggggctggccgtgctgcggatgcccaccgtgaattgcgtggacggcagcgccgacccggtaagcatctacgcgcccgccgtggggctgatgcacgcgctggcacggtgcgaggaccagctgaaccatgaatttttgaacggcgcgtcgagggtgtttgcttcggaggacctgctgcggcccgatgccgccggggcgcgcgggctgcgggatgacctgtttgtgggcctgcccgacgaccctgccaacgtgggtgtgaccgtgtacagccccaccctgcgggagggcagctacctggcccgcaagcaggatattttgcgaagctgcgagagtttgttgagcctgcgccgcggcattttgagcgagaccaacgccgagacccagccccgcaccgctaccgaaattaccgctgccagcgttgactacgatttgaccatacgcagtttgcagaaggcgtgggaagattgcgcaggcgatgctttgtttatctgctcgtgcctggatagagcttatcacaaggatgattggtggccgaccgagctgcgcatcgactggggcgacggcgtgctgtacgaccgaagccgcgtttgggccgagcagcagcagatggtggcgagcggcctgctgcggccggagatcgcgctggcgtggtactacgacctgcccgccgagaccgaggctgatttgcaggctgtgcgcgaaaagtacatgccggctgcgaagggaggtgaaaaacatgagtgaagaaaagcttgaccgaaagcctgcgcccgcgccctatgcggccggtaccggcagtgtgcctgtcggccccgaccgcgcggcctttgagcggatgagctaccgcgagagggtggcgttcaagcgggaggacccagaggggtatgccctgatgaaagcggcgctttgagggtgctgttggctgaagggcggcttcgtcaaacgaaaaaacgaagcacaacaaatcaacaaagaatcaacacgtacacacaacgaaaggacaaaaaccatggcagattttattacgaagctttccgatatgatcgatcctgaagtgatggcggatatggtttctgcgcggattcctaaaaaattgcgcgtagcaccgtttgctaagatcgacgataccctggcgggcgtgccgggggataccatcaccgtgcccgcctacacctacattggcgatgccgccgacgtggccgagggcggcgaggtggctattgaaaaaatgaccacctccacccgcaaggccaccatcaaaaaggccatgaagggcatcggcctgaccgacgaggccgtgctgtccggctacggcaaccctgtgggcgaggccaacacccagctggccctggctatcgccgccaagatcgacagcgactgcatggatgccttgcagacggccagcttgatttacgatggtacggcaaaaaccatcagctacaatgccatcgtcgacgccgtggacctgtttgaggatgagatgggctgcagcgaaaaagtcatgttcatccaccccaaacaggtcacgcagctgcgcaaaaaccccgactttttgagcgctgataagtacacccccggcgtcgcgctgaccggcgagatcggcatgatcgcgggctgccgcctggtgcccagcaaaaaagtgccgctggatggtggaatttacgcctgccccatcgtcaagctggaggacgaccccgaggtcgacgacgagatcccggcactgaccatctaccgcaagcgcgaggtcaacatcgagaccgaacgcaagcccaagacccgcaccaccgagatcaccgccgacgaattttacgtggctgtgctgtccaacgaggcgaaggtggtgctggccaagttcaaggcataaggaggaagaaacagtgccggattatcgttactacgttgaaacttacctgggcgaggacatcccggaggccgactttccgcgattgatccggcgtgcgcaggccgagcttgcccgcatgcgggatgtctacgcggtgcagccccgccccggcctggaccccgcagaggccgacgccatggcggtgtgcgccgtcgctgacgcgatgtacgagtttgaccaggaggacgccgcccgcggcctggccaaggtgaccgtgggcagcgtgagcgagacctacaccgcaccgcccgagctgtgcgccgccaccctggcgctgcgggccgcgcacttccgccgcgaggccgggtactacctgcagattggacggtgggtgcatgcgtaagcgcggcttgtacggccagaccgtgaccgtgtaccacccggtgccgataaaaaagcgcgttgacaggtatgttttgcgcgacgtgttttgccagatcggcagccgcgaggtgcccgatgcagccggcgccaagagcggcgcggcgatgctgctggtggtgcccgaaacggatgtaacacgatatcgtgttgattataagctggcggcaggggacagggtgatgcttggtgaagggccggaggtagagtgggcggcgtggccgtcctttgtgccggccgaggtggacggcctgggtgcgataacttacgtactgccgttgtatttgtgcggggcggtgcaccatgtggaagccggggcctggtggagtgccggtggagcgggcgccgggcggctggcaaggtaaacaagaaaggatgacaagatgatcgacgaaatgctgacatttttggcccgtgcccccactttgggggacctctccctcacctggggcggggccggtccgcggctgggcaccggcggtgtgtacctgcggggcgtaaaggtgctgcaaaccaaaaccgacctgctgggctgccaaaaacagcgctgccgtgcagaatttctgctgcggctctgcctgccgctgccagcgggggacaccgacgccgccctgcaaaacgcccgccgcctggcggcactgcaggcgtgggtcgcggccgaaagcgccgcaggccgcgcgcctcggctgggcaactgcgaacccctcaccgagcaggtccgcaccgagggcggccagctggaccgcgccgacccgggcggcaccgcgctgtacagcatccgcgtgatggccgagtacaccatgcggtacgacgcataacaaacttaacacgaaaaggagcaaaacatgaaaattgaacgtagatacatggctcattacctcaatgccggatttggcggcgcagaaaactactgccgcctgggcgctgacctggaggaatacagccccgaactgaccgccaatgttgagaaaaaatccaacatcctgggccagacgtccgtcaccatcgacggctaccagaagcagggcgaggtcagcccctactacgccgaggccggtgacccgctgtttgaaaagctgcaggagatcatcgacggcgacctggtgctcgacgacctgaagaccgacatcgtcgaggtgaagctgtggggcgagaccgccgacaccacctaccccgccgtgcgcgaggagtgctacatcgaggtcgtcagctacggcggcgacaccaccgggtatcagat

SEQ ID NO: 7896 - DNA, 1174 bp, Unknown
  gut microbiota DNA sequence
atttctgttgtgtgctgttcaattgttaaaaacttacgcgcccagggtggccgccatcacggccttgatggtgtgcatgcggttctcggcttcctggaagacgatggactgcgggccgttgaagacctcgtcggtcacttccatggcatcgcggttgaacttctcgcccatctccttgcccacggcggtcttgtggtcgtggtaggcgggcaggcagtgcatgaacacggcgctgggcttggccttggccatcagttcggcgttgacctggtagggggacagggcctcaatgcgctcggcccagacttccaccggctcgcccatgctgacccacacgtcggtgtagatgacatccgcaccggccacagcgttggtgtcctcggacagggtgatggaggcgccgctgcgctcggcaaactctttgcacttttccaccagggcggggtcaggccagtaagccttgggggcgcaggccacgaaatccaggcccatcttggcgcagccgatcatcaggctgttgcccatgttgtagcgggcgtcgcccatgtaggcaaacttgaggccctgcagcttgccgaaatgctcccgcagggtgaggaagtcggccaggatctgggtggggtggtactcgttggtcaggccgttccagacgggcacgctggcatacctggccagctcctccacgatggcctggccgtagccgcggtactcgatgccctcaaacatgccggaaagcacctgggcggtgtcggcgatggactcctttttgccgatctggctgccggtggggtccaggtaggtggtgcccatgcccagatcgtgggcggcgacctcaaagctgcagcgggtgcgggtggaagttttctcaaaaatgagcgccacgtttttgccgcgcagcgtatcgtgggggatgccggccttctttttggctttcagctcagcagccaggtccagcaggctgccaatctcggccggggtaaagtccagcagcgttaaaaagtcgcgtccgatcaggtccatggtggggaacctcctttaaatatatactgtataattgaataattatacatgctattataccactttccgtgtggggttgcaagtggtataataaaaagtaaaggatggctccccttgaggacagactcccccgatacgggggaggtggcacgaa

SEQ ID NO: 7897 - DNA, 8852 bp, Unknown
  gut microbiota DNA sequence
attaattaaagcttctttggttactttcttctcgaagaaagtaacttagcccggctgcttgccgatgtaggccaggatgccgccatcgacgtagaggatcaggccgttgacaaagtcagaggcctcagatgccaggaagacggcggggccgcccagatcctcggcattgccccagcggccagcgggggtcttggcaacgatgaactggtcaaacggatgacggctgccgtccggctggatctcacgcagcggtgcggtctgcggggtagcaatgtagccaggtccaatgccgttgcactggatattgtactggccgtactcggaagcgatgttcttggtcagcatcttcaggccgcccttagcagcagcgtaggcggagacagtctcacggcccagctcgctcatcatagagcagatgttgataatcttaccgccgccctgctcgatcatgtcagggataacggacttggccacgatgaacggggcgttcaggtcaacgtcgatgacctgacggaactgagcagcgctcatctcggtcatcgggatacgcttgatgataccggcgttgttgaccagaatgttgatgtgaccaacttcctcggtaacctgcttgacgagtgccttgacagcgtcctcgttggtgacgtcgcagacatagccgtgggcatcaatgccggcctctttgtaggcggccaggcccttgtcgaccagctcctgtttgatgtcgttgaaaacgatggtggcgccgttgttggccatagcggtagcaatagcaaaaccgatgccgtaggaagcgccggtgatcagggcgaccttgccggtcagatcaaaagatttcggggtgcaaacagacatgtttaaaacctcctaaaattcaataaaaatatccgaaacgcctgcggggcagacgcggaaaacaaaagcagttgcgcaaactgcgcacatttttgcagcaaaactaccgcaaaatcgttgcgtttagcgcaggtcggtggtggcgatgttgtccatatcatcgaactcctggttctcgccgcccatggcccagataaaggtgtagttcgaggtgccgacaccgctgtggatgctccaggacgggctgataacagcgtcgtagttgtgcatcacgatgtgacgggtctgctgcggctcgccgcacatatggaagaccacctggtcatccggcaggtcgaagtaggtgtagatctccatgcggcgctcatgggtgtggctgggcatggtgttccagttgctgcccggctccaggcaggtcatgcccatggacagctggcaggtcttcagcacgctgggatggatgaactggttgatggtgcgcttgttgcaggtctccaggctgcccaggggacgcttggcggcctgctccagggtgatcagcttggtctcgtagcggcagtgtgccggggcggagaccatgtagaacttggcgggatgctcggagtcatcgctcttgaaggtgaccttctgggtgccctgggtaatgtacaggcagtctttgacattcaggtgatattccacaccgtcggccgtgatggtgccggcgccgtcaccaatgttgaagatgccgatctcgcggcgctccaggaagtaatgggtgccgaagtttgcccagatgtcgatgcccttgtcgatggaaacttcctcatgtacaggcatgcagcccaaggtgaccatgcggtccacgtggctgtaaacggccacgacctcatcagccttgtacaggccggtgatcagcatctcatcgcggacttcctcggtggtgtagcgcttaaaatcgcgctgattgcaggaatagcggatgtccataaaagtgaatcctccttaccgccaaagcggatgttttttgccttatttcctttttattatagcgcgtttgtcaaggctggaaaattagcaatattccacaaagatgcgaaaagattcttgtgaacggtgccaataacatttaaacatgaaaattattcactttacaaattagtaaaactcaactataatcaagtatatcacagctgcaacggtgcagccgatgcccgatcctgtacgcagggtcgggctgaactattgcaatttcaagggggagcagcccaatgctgacactggacaagatctaccacgccaaattcgtactgaaaaaagtcgcccgcaagaccgacctgatcgccgcgccccggctttgccccggcacagatctctacttgaagaccgaaaacctgcaggtgaccggcagcttcaaggtccgcggtgcctactataaaatcagccagctgagcgaggaagaacgcgccaagggcgtgatcgcctgctcggccggcaaccatgcccagggcgtggcgctggccgccaccagcatgggcattaaaagtgtggtctgcatgcccgacggtgcccctattatgaaagtggaaagcaccaagcgcctgggcgcggaggtagagctggtcaagggtacctacgacgacgcccacgaccgcgccgtcgagctccagcaggagaccggcatgaccttcatccacccctacgatgacgagctggtcatcgcgggccagggcaccatcggcctggagatcctggaccagctgcccgatgtggatgcggtcatcgtgcccatcggcggcggcggcctgatctccggcgtggctttcgccatcaagagcctgcgccccgaggtcaaggtctacggtgtgcaggctgccggtgcccccagcatggagcacgccttccacgaccacaagtacgagacgctggaccacgtagacaccttcgccgacggcatcgcggtcaagacgcccggcgagaccacctatgagatggtcagccagtacgtggatgacgtggtcacggtcagcgaggacgagatcgccgcggccatcctggcgctgatggagaaccagaagctggtggccgagggggccggtgccacgccggtggcggccgcactgttcaacaagctgccgctggcaggcaaaaagaccgtctgcctgatctccggcggcaacatcgatgtgaacatcctgtcccgcgttatcacccgcggtatggtcatgagtggccgcaagaccaacctgatgatcgccctggaggacaagcccggccagctgagcctggtcagcgacattgtctcggcctgcggtgccaacgtggtcagcgtccaccacgaccgcagcgatgccaacatggccatcaccagctgcttcctcaagctggggctggagacccgcgatgccgcccagatcgagcagatcaagcaaaagctcaccgaagcgggatttaagctggtgacggagagagcgtgatgggcaggtaaatatgtagggggcgatgcttgcatcgacccacgggcggatgcaagcatccgctcctacagaaatcgtgttacaaaataaaaaggccccctctgcaagggggcacatcattacaccttcacacccgctgccagcagttccacaaactgcttggctacgcgggggctgcggccgccggcgcgcagggcaaaagcctggcctttgatgaacagctggtcgctgggcatctgcacgccgtactgcttggccagctccagcaaaatggtgtcatagcggtctttatccggctgctggaaggtcaccgtcaggccgaaccgcgccgccaggctcatcagctcctggcgggtatcggcggcatgcaggtcgtcgccactgcggtcgctcatgctttccttgaccagatggcggcggttgctggtggcatacacggccacgttgtggctgcggccgcccacgctgccctccagaatggctttcagcgcggcaaagttgtcgtcgttggccgagaagctcaggtcgtcgatgaacaaaatgaacttcagcggattcttcgccagctcgtccatcagggcggggatctggtacagctggttcttcttcacctcgatcagccgcaggccgtcaggcgcaaactcgttggcaatggccttgaccgtgctggatttgcccgtaccggcgtcgccgtacagcagcacattgttggtgggcttgctctccagcagggcgcgggtgttggcaatgaccttttcccgctcccgctcgtagccgggcagttcgctcaggcgctggggatcggggtagcgcaccggcacaaggcggccatcctcgatggtaaacacatggtggcgggcaaacatgccgtagcccttctggcccacggccgcgcggcgcgcctgataggcggctgcatagttggcgtcagggcttacctcccaccgcggcagaaaggccggggcttcggggcaaaggtcatccagcccagcagtgccaagctgctgcaaaaattccagttcgttttccagtgccttttccagcaccggcccggtatccccgccggcagccgtgcgcaggcagagattctcgtcctccagcacggcgtccagcaggacttcggtccagttggtgccctgggtaaacagggcgctttcaaaggcggccaccgcgccggtcagcccggcagcatctgccgccaaagccgcgcgcagagaggctagcggttcgctttgcagcaggccgcgaaacacgaccagcccgtccacacgggcggcccaatctttacgttgcataaacgctttatcatcctttcccaaagagacttacacactcagtataaacgccgccgcaaaaagttgcaagatttccacaaaaaaacttgacaaccctgaaaaattgcggtatagtttaacacaaatctaaatgcttggatgggaagttagtaacagtcacgttccctgcagagaactgccggtcggtgcaaggcagaaggagaaacgagctgcgaactgatcccggagcagatcacccgaacgaaacctattagggggatacgggcgcacccgttacagtgccgggctttgttggaagcccatgaggtgggagcaggcgctccaaaaagagtggtaccgcagagagctgattcacagcctttgtctctttgaacgaaagaggcaaaggctgttttttatacccgcaagacttttttgccttagaggcgggcaagttcaggaaggagcaaacacgatgaaattgaccggttcacagatcttcgtcgaggtcctggtcgagcagggcgtggataccctgttcggctaccccggcggcgcggttctgaatctttacgatgagctgtacaaaaattctgaccgaatccgccacgtgctgaccgcccacgagcagggcgcttcccatgcggccgacggttacgcccgcgccacgggccgcaccggcgtggtgctggccaccagcggccccggtgccaccaacctggtcaccggcatcgccaccgcttacatggacagcgtgcccatggtcgccttcaccggcaacgtggccaccaccctgctgggcaaggactccttccaggaagcctacatcgagggcatcacgatgcctatcaccaaacataactacaccgtgcgccgggtcgaggatctggccgacacgatgcgtgcggctttccgcattgcccaatccggccgcaaaggcccggtactggtggacatccccaaggacgtcaccgccgcggtctgcgagttcacccccaaagagccggagctgatccgcaccgttacctcttataatgaggaggacgtgcagaaagccgccgccatgatcaacgaggccaagcgccccatcgtctacttcggcggcggtgtgcgcagtgcggtgggctgccagcccctgcgcgacctgctgaccaaggccgacatccccgctacctacaccctgatggccgccggtgtgctgagctacggcgaggagcataacctcggcctgctgggcatgcacggctgctacactgccaacaaggccatcgatgaggccgacctggtcatcgccgtgggcacacgcttcagcgaccgcgtggccctgaaccctgacgccttcgccaaacgtgccaaaatcatccagatcgacatcgaccccagcgagctgggcaagaacgtggacatcgacctgagcctgaccggcgacgccagctacgttttgcaggccatcctgccccacgttaaagaggccaagcacgccgattggatggatcagatccacgcctggcaggccatggactacaaacctgtggatagtgacaccgaactgaaaccccatcagatcatcaacgagatctgcgaacaggccgggcctgaagctgtttatgttaccgacgtcggccagcatcagatgtgggctgcgcaatatctgcaccacaccaaatcccgcggattcctcaccagcggcggcctgggcacgatgggcttcggctacggcgcggccatcggcgcgcaaatggccctgggccgcgatgcccgtgtggtcatgctcaccggcgacggctccttccacatgaacctcaacgaaggctgcaccgctgtcagctacgacctgcccatcatcacggtcatcttcaacaaccaggtgttgggcatggtccgccagtggcagacgaccttctacgagaagcgctactccgacaccgacccccaccgcaagaccgatttcgtcaagctggccgaggcctttggcgccaagggctaccgtgccactactccggcggagttcaaggtcgctttcaccgatgccatgaagcagcaaggccccagctggatcgactgccgcatcgacaaggacgaaaaagtgctgcccatgatccccggcggcggcacgatcgaagacatcatcatggaatgaggtgagctgcatggaacagacacaaaaccccaataaccagcgccgggtcatcagcctgctggtggataacagcaacggtgttctggcccgcgtggccagcctgttctgccgccgcggcttcaacatcgacagcctgacggtctcggccaccaacgacccctccatcagccgtatcacggtcacgctgcgcggcagcgagcaggccctcagccagctgatcttgcagaccgagcggctggaagtcacccgccaggtctttgagctggaccccgaaaagagcctgcagcgcgagctgttgcttttaaaggtggcttgcgacaaccacagccgcgccgagctgcgggaaatttccagcatctacaaggccaagatcatcgatctgtcgccggacagcatggtctttgagctgaccggcaagcccgataagatcgacgcgttcctgaccatgttcaatggctacgagatcttggagctctgccgtaccggcgtaaccgcgctggagcgcggcggcaaacaccagcacatgcaaaagcccgcacaggaggtgcgggatgcgcagttgcctctgccgggcacccattgcccgcagtaatagcaaaaaggttgaaggcaacaccacacaattcccgcctaacggcttaagcaccgctccggcggatctccgcgccaagagccgccgcaagcggcggttgcgctccgaagcgcctcgctgcggctcggtgtgcggcacggcatctgcgttgccaaaatgctcgataatgtcgggttgcggtacccgcatcgtgcttcggggacaaaagcccctcgcactctgcgaccgctgcccctgcttcggttcgctgtatccgccactggcggcgctcacctttgcagcacaaagtattatctgcgcttttggcttagcatctgccgcacctcgctcgccgtatcggcacttagaattatgcggtattgcctgaaatcttccaccaatccgtaggggtcgatgcttgtatccgcccctacaaaacggtatccacacaatttgtttttcgttaaaaattaaaaataaaaaaattcaacattaaaaaggagacacccaccatggctatcaacaagtattatgattccgactgcaacctcggcgttctcgacggcaagacggttgctgtcatcggttttggttcccagggccacgcccactccgaaaacctggccgagagcggcgtcaacgtcgtcgttggtctgcgcaaaggctctgcccactgggagaaagcctctgagttcgccgccacccacgagaacttcaaggtcatggaagtcgaagaggctgccaaggccggcgacgttgttatgatgctggttcccgacgagctgtgcgctgacatctacaacagccaggtcgccccctacatgaccgagggcaaggccctggccttcgctcacggcttcaacatccacttcaagaccatcaccccgccgaagaacgtcgacgtcatcatgatcgcccccaagggccccggccacattgtccgccgcctgtacaccgagggcgagggctgcccctctctgatctgcgtcgagcaggactacaccggcaaggctaaggagatcgccctggcttacgcttccggcatcggcgccggccgtgcaggcatcctggagaccaccttcaaggaggagaccgagaccgacctgttcggcgagcaggctgtcctctgcggcggcgtctgcgagctgatccaggctggcttcgacaccctggtcgaggctggttacgcccccgagatggcttacttcgagacctgccacgagatgaagctgatcgttgacctgatcaacgagggcggcttctccaagatgcgctactccatctccaacactgctgagtacggcgactaccgcactggcaagcgcctgatcaccgaggagacccgtaaggagatgaagcaggtcctgaaggagatccaggacggcaccttcgcttccgagttcctgaccgagatgagccccaagggtggccgcaagacccacttcctggcacagcgccgcatggctgccgagcaccccatcgagaaggtcggcgccgagctgcgtaagatgatgagctggctgaagaagtaattttaacaaaacaacgccttcccc

SEQ ID NO: 7898 - DNA, 1398 bp, Unknown
  gut microbiota DNA sequence
aggaaatgctggaagatggcagcgacggcgatgcttactttgtggaccttagtttatgaaacaacgcaccaaagcacttttagcggcggtcatctccggcgcggcctttgcagggctggtcggcgggctgatcttctggctcccctcgtataaagagaaaaaagagatggaagccattaaaccccaagaatcccaaaacaccgtcgcgccccctacgggcgaacccgaagcgacccctgacccggccgccgaggaagccgcccagcgggccaaatacgccgacctcatcgcccgcaaccccgagttcgcaggctggatcgagatccccggtgtggacattgacctgcctatcctgcaaaccaccgataactacttttacttataccacgacctggaccgcgccgatgataagcgcggcatgccctttgcggattatgagtgcgacatgcaaaacggccgccatctcatcatctacgggcataacatgggcgttaataataccgaccgcttctccaacctgcaaaagtaccgcgatgccgattactacaccgcgcacccctacttgcagctggacacgctatataaaagcgagatttacaaaatcgtagcggtctacgccgtcacctcccgcgagagcgacggcgatgtcttccacttcaaccagtatatcgacctggacgatgccgccgagcagacgtttttggatgaagtggcaaagcgcgcgttttacaccaccggcgattacgcctaccccaccgagcggctgctgaccttaagcacctgcacctaccagatggacgatgcccgcatggtcattctggcccgccccctgcgggacggcgagaccaccgaggccgacacggtgcatgtcaacagcgacccgctcctgcccgcccgctggcctgcgggtaaatgattttcgcaataaccgaaaagccctagggcttttgttattccttgcttgcacaaggaataatgggttctattggtaagttctctccctcagtcagcttcgctgacagctccctcgcagagggagccattaggcgctgcgcgccagaaaggccccctctgcgagggggctcccgcgaagcgggtgggggagagagcctaagaccagcaaccctcttaaaagggccccttgtgtaaagggagcctttacccatccttggttcaccacctccatcccaagtgggggtgttggatatatgtccgtatctactgcgcaagcaggcgggtgcgcttggggcatccacctgcaaaacgctttagataaattttaaagaataggagaaattaacatgcagaaaacgaacttcaaaactcgtctgctggctctgctgacggccgctttcatgctcgtcatgtgcgtcccgtttgcagcgtttgcagaagatg

SEQ ID NO: 7899 - DNA, 4844 bp, Unknown
  gut microbiota DNA sequence
tttctttcctatccgcgttttattcgccctgcgggccttgagtattgaacttgaccctgtggtgtgttatactttcatcgtatacttatttataataataggataatagggagattgtgtgatggagaacctccgatccaaaccgttctgggaccgctcgccgctggaaagcctggcggacggctataaaaagcttccgcggaacttcaagctgtgcatgctggcgacctttatcatcggcctggccgcgcacatgtactgctacaccaatatgctgaccggggcggatgatgcgttcctgttttccgacacgcgcacctttgccgacggtgcttctggtacacgttggctccttgcgatatactttgccttaattaaaacgatccgcatgccctggctgctgggcgtcatgaccctgctgctatacggcgttgcggcatggcttgtgtgcgagactttgtccatcacctcttcagtaggtattatccttgtttccgggctgatggtcacctcccccacgatgatttcctccaacttttacctgaccagcgcccacatgtatgccggtgccctgctgtttgcctgtctggccgcgtatgcctacaaaaagtggcggcacagctggattgccgcgtttgtatttatgctgctatccgaaggtagttacgctgcttacatcagcatgacgctgtgcctgtttttcctgtgcagcttgaaagaattgctgtttgaccaggaggccaatgacaaacacaatcttgtccgccatttcggcatgctgttcctgttcggcggctcgatggttgctactaccgtgatctgcaacctgatcaccgctaacaacacggccggccgtgtgcaggatgcccaagcacaggctgccaccgattacattgataacatcatcacttcagtacagcaggtatttgccttctttctacccggcacctccaactcctatttccatggcgaacgagtcatgtactcgctgttcttgctctgcgcagcgttatctgccgtgctggtcatctggctgctggtaaaacagcagctgtggaagcgcccgctagggttgtttttgctggtggcagacattgtctgcctgcctctggccatgaacgtcatcggcatcgtatccaagtgggtacacaccttgatgacttttgcctacctgacgccgtggctgttttttgtgatggccgttgagcagctttaccgccgggacgacctgcgcaaagattgggaaaggctgctgcggtgggggtattccctgctggcctgcgtggtagccgggctgactgttttgtgcggcatccgattggcaaacatatgttacaccaaggcgtatgcacggtacaccgaaggccttgccgattccatccgcttgacaaacttgattgaagccattccgaattatgtgaagggtgaaacgcccgttgcatttgttggtgtcagcgacaatgatttcccgtggcaggatgcttatgaacttaccagcgacattgctggcattggcgatttgtattattggcaaggcatgtacacagcgccttttgtcttggacagttatgtaaatcagcatttgcgtgccaacatgcttatcttccctcaagatgccgctatttttaccgcagatactatagcagatcagttaaatgatgcaggcatcaatgcttctgctgatgaaatcaaagaacttctgcaggatctgcacgcatttccgaaagaggactgctggacctggtataacgacgtacttcttattaaattatttgcaaattaaagtgaattgaggatgttctatgatgcaggatatgtgtatccttgttgtctcctgtgataaatatgccgattgctggacgccgttttcggactgtatgcgcaagttctggccggactgtccttatccagtgtatctgtgcactgagagtggagagccggaaaatggggcagtgtacagtaaggtattccacgagcagacccagatttggaccgcccgtgtgcgcaaagcctgcgagaaaatcaaggagtcacacatcctcgtcgttctcgaagaccagtggccttctctttcggtttctactgctaccgtgcaaaacatccttggtcttatgcaatcgcaggaaaacatcggcatcgtttacctcgataaagaagttcacggcatgccgttatggcagcagaacagccacttttatctgctccctcccgaaactccctatcgcatgtcggtcgtccctgccatttgggaccgagattttctgttgacagcatttcatgaagatttaagtgcctgggattttgaacgggtcggttcctttgaaaaaagcacctattccaaaacggttcttgtcactgttgaccgggtttttgcccgtgtatgtgaaaccggtgccgtcatgcagggcaaatggctgcgcggagttgcagcctttgctaaagagaataatttaaaaatcgacttttccaagcgcgaaacattgagcagcaaagacctatttttaaaagattgcaaatcgtttgtctacaacctcaatcccgctttgatcgtcaagatccagaactggctgtaccatcacagccagaagaagtaaaacgtcgctgtatgccaggaggtaccccatggcaaaactgtcaggcaagctttccgtactgatgcctgcttataatgaagaagccatcatctatgccaatgcgctggaagctgcgcggcagatcagcccgctggcggatgattacgagctgctggtcatcgacgacggtagcagcgaccgcaccaaagcggagatcgagcgcgccgcagccgagaatccgaagattcgctgcatcagctaccagcccaaccagggcaaaggcggtgcactgcgggaaggcacagcccacgccacgggtgactatattgctttctgtgatgccgatttggatttagcgcccgaacagctggcagactttatcgatcgtatgcagcgggaaaatgctgatgttgtcattggcagcaagatgcacccggaatccaaggtcgattacccggccatccggcgcgtgtacagctggggttattatattctgctgttaattcttttccgcttgaacgtgcgggacacccagaccggcctgaagctgtttaaggccgaggtcctcaagccggtcatgcggcagatcctggtcaagcgttttgcgtttgatattgaggttttggctatcatcaatgcgcgcggatataaaatcacttccgcaccgattgaagttgtgttccaccgggtctcatttggccgcatcggtttcagcgacatccgcaacatgtttattgatacgctggcaattttttatcggctgcatattttacattattatgataaagtcgaagcacatccagaattgaaggagtaaaacctatggcgggtgtcataaaacttgaatctgatcctcgcatcaccgttttagctttgtcttggcgggacattaaagccccgaaagctggcggcgctgaaattcatacacatgaaatgctcagccgtgcagaccataagaaaatccgtattatccatttttctccgctttttgatagtgcttcgcctgatgaaacaatagacggtgtgcgctatctgcggcagggaaatatcttttctgttatatcggcggcacacgctttttatcgggccaaccgggatagaatcgattttgtaattgaccagtgcaacacacatcgcttttttacaccattttgggtcccgcaggaaaaacggattttttatatccatcagcttacaagagaaatttgggatattcaggccacatttcctgtcagcacactcgggaagcatctggaaacgccgatgctgcgaatgaatcggaacgaccgtgccatcattacggtttctgagtctaccaaaaaggacctcgttgccgttggttttcccgcagagcgaattactattgtgcccaatgctttatcaagggatacccgcgcttgtgcgcagaatattccagaaaaagtgactcctgccacttttatttacgtggggcgttttgcccattataagggaattgatgccgctattgaggcgttaggcatcgtaaagaaaacataccccgacgcacgcctatggtgtgtcggcaaaaaagacgacacctatattgccaacacattgcatccgatttgtgagcgctacggcttgaccgaaggtgcccccgaaagcaatgccgatgtgatttattggggatttgtaagtgatgcccagaagatgcagctacaggggcaggcgaaagcgctcctgttcccttctgtacgcgagggctggggtatcattgtgctggaagcgggtatcatgaacactcccagcatcgtctacgatgccccaggctgccgcgatgccgtagacaatggaaaaactggctacctttgccgcgagaataccccacaggaacttgcacggcttatgtctcaaatccttgataatcccagtgaatacgcatccatgcaaaaggtggcccgcgatttttccaagcaattcagctgggacaaatctgcaaaaatctttacagatctcattctaaatctggggaaaggatcggtctaaccattggaaaatgtaactccgaaagcgccgcttatcagtatcgtcatgcccgcatacaatgccgagcgcacgattgaactggcgctgcgcagcatccgtatgcagacgattgctgaccaaatcgaaattttggtcattgacggcggcagcaccgatgctacccgtgagattgccaggcagtatggtgctgtgattttggaaaatcctcatcgtttgccggaaccggcaaagctgattggcatccaacgggctaaggggcggtat

SEQ ID NO: 7900 - DNA, 1583 bp, Unknown
  gut microbiota DNA sequence
acatgtccaaaaacagcatgatgggcagtgtgattttaaaggtcagcctgtccgccgccttacagaactccttgggcagaaagccccactgccgcagcagccagcccgccaccatggtcaaaaataccggcagggtggcgtttaagctgaagattaaattttgcacaggtatctccccttttgttcccctatagacaaaattctaccacccgcgcccgcgtttgacaagcgcaaaaaatctgcgcgacagggccaaaaacgcaggatttgtgccttgacaaagtgcatgggaattgatataataaattgctgtgctgagaacagcacagttatccttgcctttcgcataagtcggaaggccaaaagtccaaaaggaggtgctacagaatatggcaaagtacgaaaccatgatggttaccaccgcgaacctcgacgaagaggcttccaacgctctgatcaacaagttcaagaacctgatcgcagcgaatggtacgatcgattctgttgatgattggggcaagaagcgtcttgcttaccccatcaacgatgagaccgagggtgtgtacactgtgatcaacttcaccagcgagcccgatttcccggccgagctggatcgcgttttcaagatcactgagggcgttcttcgcagcatgactcttgctgttgaggagtaaggagaaaccgaaatgctgaatgttgttgcaattatgggccgccttgcgcgtgacccggaactgcgccagaccacgacaggcaaaaacgtcgcttctttccgcatcgcttgcgatcgcggacgccgtgacgccaacggccagagccaggcagactggatcgatgtggtcgcgtgggatcgccaggcagaatttgtctgcaagtatttccagaagggttccctgatcgtagtggacggccgtttgcagagccgctcctaccaggataagaccggcgcaaaccgcacggctgttgaggtcgtggcaaacaacatcaatttcgcgggccccaaatcctcgaaccccgcaccgatgggtgataacggctatgccgcacccatggcagcccccgcccgcccggcagcgcagcaggcaccggcgcccagctattccgctggcagcaacgatgactttgccctgatcgaggacgaaggcgacctgcccttctaaaaatcgaaagtatcaatctataaggaggttaccacaatggctatggatcgttcttcccgcccgatgcatcgcggccgtaaaaaggtctgcagcttctgcgtcgatcgcgttgagcacattgattacaaggatctgccccgcctgcgcaagtacgtaagcgagcgcgctaagatcattccccgccgtgtgaccggtacctgcgctttccatcagcgtgagctgacggttgccatcaagcgtgcccgttatatggctctgatgccctacgtgagcgactaattcgcgcgtctggtattcacaagcacaaaaaatccgagcagcccgtttcggcgggctgctcgatttttatttataaatgatttggctgcatgtaggggttgatgccagcatccacccttacagaacatatacacaaaattaaaa

SEQ ID NO: 7901 - DNA, 787 bp, Unknown
  gut microbiota DNA sequence
tccgcgggatcttccttcaaatcgtcatccatctggctgcgcagggcgcggttaccgctctccaggtcatccagattcaggtggctcagcttgccgtagccggggtcagacttcacgcggaagtacacatcgccgttgcgggccacgtaagcatggccggagtcgaccaggtccttgacgatgtggatgatctcaccgatatgctcggtagcgcgggggcgcacggtaggtgccttgacattcagaccgtcagagtccttgatgtactcggcctcaaacttgcgggccacctcctgcatactggtgccctcttcctggccttttttaatcagtttatcgtcaatatcggtgatgttggaaacatagtagaccttattgccgcaatattccagatagcggcgcagggtgtcaaacacgatcatcgggcgggcattgccgatgtggatgtagttataaaccgtagggccgcagacgtagatacggtattcaccgggagtctgcggaacaaattcctctttctggcgggacatggtgttaaagatctgcatgatacactttcctctctcaaaaaggtttccttggtttctattatagccgccgcagcgggcggttgcaagacttaagttgcttttataagcagggtgcgccgaatgggcgtgactttttgcccgcaggcaaggcgcttttccgcagcaatcttgacggattgtaagggaaagcaacgcagtatgcgagcaaaaaggccacttaggcggtgcgcaatgcttatggcaataccgcataattc

SEQ ID NO: 7902 - DNA, 3362 bp, Unknown
  gut microbiota DNA sequence
acttgattttctcaagtctgccagtcaccggcatgatctgcaacggcggcaaacagggctgcacgatgaagggtgttgtggccgtggatgcagcttggcaggctgtaggtatggcaatacaggacgttttcatatataatgtacatgggatcaacggcgcgacgccggaggaaactatgcgcaacatgggccgcatcgccacccccggcatggtagcaccgaaaagaccattgtggacattctcagagacaaaaagatggagtaaggagaaaaagccctatggataagagcggaaagatttataagacttacgttcagaccctgaaagaagaacttatccctgcaatgggctgcaccgagcccattgccatcgcctacgctgcggccaaggcccgcgaggtgctgggctgtgagccggacctcgtgaaaatcggcgtcagcaacaacatcatcaaaaacgtcaagagcgttgtcgtgcccaatacggacggaatgaaaggcatcgaggctgccgccgtggcaggcatcctcggcggaaatgctgccaaagagctggaagtcatctcggaggtcacagtaaaccagaaagctgccatgcggcgtttcctgtccaatgttcccatctcggtggaggccatcgacaacggcattatctttgacattatcatcgccctgtactgcggcacagattctgctgtcgtccgcatcagccagtaccacaccaacattgtctacatcaagaaaaatgatgaggttctgctggacaacacggctaggcagacctcggccgcctgcaatacggaggcggaaagcggcctgacggaccgcagcctgctgacgattgccaatatctacgactttgccgagacctgcgacctggacgatgtgcgcccgctgctggacacccagattttgtacaacacccagatttccgaggaagggctgctgggggactacggcgcaaatgtcggctccacctacctaaaattttacggcaacgatgtgcgcaaccgcgctattgccaaggctgcagcgggttccgacgcgcgcatgagcggctgtgagctgcccgtcgtcatcaactccggcagcggcaaccagggcattacggtgtcggtcccggtcattgagtacgccaaggcgctggcctgccccaaggagaggctgtaccgcgcgctggtgctctcgaacctgatcgccatccatgaaaagacgggtatcggacgtctgtccgcctactgcggtgcggtcagcgccgggtgtgccgccgggtgtgccattgcttacttacagggagcggatctgaaagctgtctcccacaccctcgtcaacgcgctggccatcgtgtccggtatcatctgcgacggcgccaagcccagctgcgcggccaagattgcctccagcgtcgaggctgggattctgggctaccacatgtaccagaacggccagcagttccgcggcggcgacggcatcgtcagcaagggcgtggagaacaccatccgcaacatcggtatgctgggccacgacggcatgcgggagaccgataaggagatcgtcaagatcatgatgcagaagccgtgaggtgtcattatgaaatttaccaaaatgcatggtctgggcaatgactatatcttcgtggactgctttacggagacggtcacagaccccagccgcaccgcgcagctgttgagcccggcgcatttcggcgtaggggcagatggcctaattttaatcgagccgtcggcaaaagccgactgccgtatgcggatgttcaacgccgacggcaccgaagggcggatgtgcggcaacggtatccgctgcgtcggcaaatatatgtatgaccacgggcgggccgtcaaggcagaaatcacggtggagacgctggacggtatcaagacgctgcaaatcacccccgaaaacgacaaggccgccaaaatccgggtggacatgggcgtgccggtactggaatccccgcagccggaaaaaatcacagtagccgggagcgagtgggaattttccgccgtggatgtcggcagcccccacgccgtgtatctggtgcccaactgtgaggaggtgccactggagaagattggcgtcctgttcgagcatgccgcccgctttccgaatcgcgtcaacagcgaatttgtgcagatccttgaccgtactcatctgcggatgcgtgtctgggagcgcggcagcggaatcactctggcctgtgggaccggagccgtggcaagcgttgttgccagccatgctctgggcctgacagacgcttctgtggaagtgcagatggacggcggtgccctgcgcattgagatcgacgacaccacaggacacaccttcatgaccggcccggcagttgaggtatttcagggtgagaccactcttatggattgagaaaggagtttgaacaggatgcagattcggactgctgttcccgcagacttgcagggaattgtaaatattgaggcagaatgcttccctgctgcggaagccgccaccgaagccagtctatccggcagattggcgttttatcccaatcacttctgggtgcagctggatggcgaccggatgatcggctttgtcaacggcatggtcacagatgaacctgacctccgggatgagatgtatgaggatgcttctctacacaacgaaaacggtgcgtggcagatgatttttggtgtagataccatcccggaatatcgctgccgcggctgtgcagctgccttgctgaaccatgtcatctgcgaagcgaaagcgcaagggagaaagggccttgtgctcacctgcaaagacaaactggtacactattacgccaagtttggttttgtgagcgagggcgtttccggttctacccacggaaatgtggtctggtatcagatgcggctgcggttttgatttttatggcagattaaaagattgctgccacggtcaccgctgtactgaccagcacggacagcatcaccccgcgcattgatctacgggaagtttccaacgccgttgtgtggggttgaaagtctctgtgaaatctccacaaaggacagttttgggattaccagtgtgtacgagaaaaaatttgcctcagcagcatgttgtatttattttaacataacaattagtatgaaaccgcttgccgtaatgcaggcggttttttctgtacaaaagggtcaaccgcagcaaaggtgttcttcttgtgcagcattgcttttttccaacatcccctgtacctgagcgatttttcttactttggatgactgaatcgtatgcttttttgcgcatatgatttttcattcgatgtaaaatcagagaaaaatttgggccttttctattgacacgagtaaccatcgtgtgtatgatagtaa

SEQ ID NO: 7903 - DNA, 2884 bp, Unknown
  gut microbiota DNA sequence
tttcacagttatccgccgcaacggtaacggtgtatataccggcttccagttctgcgttttcctctacaggttctccgttcaccgtgataacaacattcgtcatatcagcaggtgccacaacaaaggtgaccatgtatttcggcgcaggcagcacaggcgtactcggcgtattatactgatactggccaccgcctgctgtaagttcgttataaaaatcctcgctgcacatagcttcataggttctggctttaccggcttctacgcccttaccacaggcagtaacctcgttgctttctgcatagtagttgttctcaaaagccgttgtctctttcgccgaaccagcaattgcacccaagcgaccatacggggcgctggccgtatactggctcatatccatttcaccggcaaagtagcaatgctggattgctgcactgccagcgctgccgcctgccgtacctacaataccgccaagatcctccgttcccttgccgtagggcgtcagttttcctgttgcatagcagttgatgacctttgcattacccgccagctgaccagcaattccgccgccatgactggccgccagcgacagttcacccgtatttacgcaatagcgaatctcgctgtcaccatctgcaaagccaacaataccacctgcatacaggctgcccgcgtcccccgtgagcagcagatcacctgtattccgacagtaatcaatcaccgtatcgcttgcctggccacacagtcctatcataccgtacacaagattttcgttattggtaaacgacacatctgccgtgcagtcaaaaattgtgcagccgccagcaaaaccggcaatcgcaccgtaatacgtatactcccgctcggaattaacgttgatcgttccctgcacagtcaggctggaaatctcagcattttcaatatcgccaaaaaaaccgcagagaaccgttgccccatacacatccgaaagatccaggttgcttacggtgtggccattgccgtagaatttgccgctgaagcagtgctctacttcaccgtccgcattcaccgttgatccaatcggcgtccattcgattcccgtcaaatccaggtcagctgccagttccaccacagcatccgttttgccgtcataatcgcctgcatccaccgcacgggcaaactgctgcaaatcctccactgtagcaatgacggttcggtcactcgctgcttcgtcttctgccagtgccgtggtcggcagcagggtcaggcagagcggcagcgcaagaagcagacttgcaatacgttttttcatggtttcctccttctttgcggtcagttaatccgcacatccataatttatcgatgtactccgcaatttgagataattttacccccccccgtcaaaaaatgtcaatcaaaaattcgccgtttttcggcagtatccttatttcggttcacctttttgcatcacaaagcaaaaagacagcccgcactgttttctgcagtacgggctgtccctaaatctcttaaatctattccgttatacggtcgtcaccagcgtctggcaggtgccggtcacggcgtaggggccgctggcggcgggcaggaagtagctctcgcccttcttcacagccacggtctcgccgccgctggtcagggtgccttcgccatcggtgatgagcagcgaaacaaagcttttctcgtccgccacaccctcaaaggcgccgtttctggcatccacagtgaaatactcacactgggccagatgttcgccaaaatcatgctttaccggcggggtgcacagggtcacatccagcgccttttccacatgcagggctcggggcttgccgtcggcaccgacgcggccgtagtcgtaaacgcggtaggtcacgttggagttctgctgtacctcggccaccacgatgcccttgccgatggcatgcagcgtgcccgacgggataaaaaagcaatcccccttgtgcacaggcacggcgttcaaaacctccgtcagggtgttgtttttgatgcgctcggcaaattcctttttgctgatctcatggtcaaagccatagtacagaaaggcgttcggctcacaatccagcacgtaccacatctcagtcttgccgtactggtgctcatttttcagtgcgtactcattgaaggggtgtacctggatggacaaatcgttccttgcatcgataaattttatcaaaaccgggaactgttcaaattttgcgcaatcggtgcccagggcttccgggtgagcggccgcataatcagccagggtggtaccgtcgggcaggtagctggggccgtccgggtggcaggagagcacccaggcttcggccagcgggtccagatcgctctgcacgccaaaatcggtgcgcagacggctaccgccccacaggtagtctttgcagctgggggtcagtttgatgattgccataaacaggttgctccttttttaaatagaaggtcttttgcaggcacctcgccgtagtcccctccacaggggcaagcccagggtgtgcagcacaaagccggcgctgctataaaggcggcttccggcgcggtgaagctttcgccgggagccagcgtccaggcaaaatggtaggggtggataccctacggtttgcatgtacctgtattatactcccccggtctcgggcaaatcaacccgaattcagctaatatttaagcggccattttagttaattggcaaaaaaagacgtccccgtcggctgcttggggcaacgacggggacgtcagcatgcagaaaaagctgattcagctttatgggaaattgcggttcgggttactggtggttacgctttttcagggcaaaggccacgccaaaggcacccaaagcacccaggcaggcaaccgccagcgggacgataggcatatc

SEQ ID NO: 7904 - DNA, 2309 bp, Unknown
  gut microbiota DNA sequence
ctcatctgctgtattcctttttatcacgttctcaaccaccagttcatcacaacgtccgaactgggcttttcttctaccagggccgtgatggtcccggccccggtgtagaccagacccccgttgatcttgtccatcgaatcggcgaggatcacatcggtggcgaacacgccagtcttgttggtcgagccgaggctcaaaaacatgctgttggcggtcagggtcggtgcgaccgagatcttcttcgaggggtacacggtctgcttgtaggcaaagccctgggcctgctcgtccgtggaggcctctgtccagttgtccacgtaaaaggtggcgtaatactcccacggcagggcaacgtagaggactttgttctgcactgggttggcactggtgccggacagcgtgctatcgaccgtggttttgttggctcctgattcaatgccgctcagtttggagtattgatccgagctcattaaaccattgttgtaggccgaggccaggccgtaggtcgtatcggaactcgggatgcccaggtcggtgatgtcgcttttctgcacagcagaaacagcgatgacatgccccaggctgtccacggtgattttgtacaggccgctggtccgggccgtatgcgtgggatgagtgtacttgttcgcgccctcatcgatgcctttcagctttgtcacagcgctgggcggcattaggcccgcgtccgtttccgtggcctctggaatcgtaacggactcactagcgggtgtaacgtaaagtacatcctcatccagcgtaccggcctctttcattgactcgtactcatcctgagataccgcaacaaccaactttttttcaggggtaaaatataattgattggggtcgatctggttattctttttcgcatcggcatactgctccgcggtaagaatgttcattgtgaattcgccaatcgtttctgtagtctttgccaaaatctcacccctttacgtaattggtatcagtgctaaacaagcttgcaatatcactctgttctacccaaataccgcttacttttttgtagaccttggatacattgacccagctgccatttaccttagtgctcagcacagggccagaagatccgccgccagtgtagtttacagtcagatcagcgccgtaaaaacgcaaagtctggctgttgcttgcggatatcggaccgcgtgtacaagtaatcagcaagataagatcgtccaggctctcacgatcccaccaaccggtatcgttaaaagtctgagccactggggatgttcccaactcaatttcgccgctcaacccagccgtgccgcaatacaactgcgcaacaccgctcaaaatatacggtgatgcattcgagattctggcctttatcttgcaagagatagaatcgatcttggcatctgtcggaatcttcgacacatcaaatttgactgctagcttagaaactgcaccactacctttgttcaggtttagcaccgtaaaagtgtcactgcttgaactggtaagtccgtttgaaagtggataagatgcatctacagaaatatacgatgagtgttggccatcatatcctgtaggaaccaatgtcacacttgccatacattagcccccagtctgcaaatacaaatcgccgttgctgccggttgaagaacttggtgcagagctgccggtgtagtatttctggatgacaacggtccccgtcaccccaaagatggacttgcctgccagaatgttgccgccaacgaggttggcatcccccttaatggtctgcgccccggacaaatactgcccagctgcaatgacctggtcggtgcttttcggggtataggtcgccgtcgcctttttggtgacaccgctgccaatgtaccccgcgggcacggcatccaccgtgacctggctcatgccatcgtagccggtgtcgggggtcacggtttgctggcgctcggtcggcgtgaccgtcttttcctgcagcttggcagcgccagcccccgcaaaaatgctgactttcttgtcgcctaagtaaacgggcatattctcaccacctgcaaattttaattgtcgtctgcgcttctggcgtggcccagctgccatcgccgcacaggtacttcttttcgtccccggcagcgggtggcggtaccaggccggatgtgcccgcggcctcggcgctggccccggtgaacacatccgggggcgtatattcgccctcgatctgttccccggccgcattgtgggcggtgtgtccggccagcagggtgtccctggtcacggtgtccccggtcagatccagcagggtctcactgcccagcaccacc

SEQ ID NO: 7905 - DNA, 2310 bp, Unknown
  gut microbiota DNA sequence
cccgccgccagtgtagtctacagtcagatcagcgccgtaaaaacgcaaagtatggctgttgtttgcggatagcgagccgcgtgtacaggtaatcagtaagataagatcgtccaggctctcacgatcccaccagccggtatcgttaaaagtctgagctactggggatgttcccagctcaatttcgccgctcaaccctgccgtgccgcaatacaactgtgcaacaccgctcaaaatatacggtgacgcattcgagattctggcctttatcttacaagagatagaattgatcttggcgtcggtcggaatctttgacatatcgaatttgactgccagcttagaaaccgcaccaccacctttgttcaggtttagcaccgcaaaggtgtcactgcttgaactggtaaggccatttgaaagcggataagacgcatctaccgaaatatacgatgagcgttgaccatcgtatcctgcaggaaccaatgttacacttgccatacattagcccccagtctgcaaatacaaatcgccattgctgccggtcgaagaactgggctcggaactaccgatgtagtatttctggatgacaacggtccccgccaccccaaagatggacttgcctgccagaatattgccgccaacgaggttggtatcgcctttaatggtttgcgccccggacaaatactgcccagctgcaatgacctggtcggtgcttttcggggtataggtcgccgccgcctttttggtgacaccgctgccaatgtaccccgcgggcacggcatccaccgtgacctggctcatgccatcgtagccggtgtcgggggtcacggtttgctggcgctcggtcggcgtgaccgtcttttcctgcagcttggcagcgccagcccccgcaaaaatgctgactttcttgtcgcctaagtaaacgggcatattctcaccacctgcaaattttaatcgttgtctgcgcttcgggcgtggcccagctgccatcgccgcacaggtacttcttttcgtccccggcagcgggcggcggcaccaggccggacgtgcccgcgccctcggcgctggccccggtgaacacgcccgggggtgtatattcgccctcaatctgttccccggccgcattgtgggcgctccgcccggccagcagggtgcccttggtcacggtgtccccggtcagatccagcagggtctcactgcccagcaccaccttgttcaccgccatggttagcctcccaccgtcagggtctggccgccggcggcgttgtccacgtagttggtcgggatggccgccaccgtgacttgcgacaggcagttgtagtcgctgtctggcagcacggtctgctgctcaaaggtcggggtcacgctcttggcctggggcttcatgccctcggaggaggacatggaaccctccacgcccaggatggtgacaccctcgcggatgttggcagacaccagcttggcctgctcggtctcatcgatggcggcgctgccgctgccatcgtggaagcccatggggatggtgtacttgccgtccttttgggtgattttcccggctacggccccgttgttgggcattgtgccggtcatcttggcaccacgtgcgtagaacgtcttgccgtccagcacctcggccaccgcagccgtagcatctgtggaatccacgtccttagtgctggtgccggtgatgggcgcgccggtcttatcgtgggcagtaatgcccttggccagcttgtccggggtcacgctgtcggcggtcaggtcgagcttgacctctttgccgatgatgactttgtttacatattggttagccattgaaatattcatctcccataatcagggtcaagccgccgcaatcgttggagacctcgtaccggggaatctttcgcacggtcacatcgtccggcatcagcttgtctttggtttccaggcgggtctcctcgtaggtgcgcggggtcacggtggtctcgcccttgtactgcggcgcggtggataaaatggtggtctgccccaggtcggcggccagatcggcatcggtgccaaactccaccacaaaggcggagggtgcggcaaactgtacgtctaacgtcatgtaagcacaccatctttcagaatctggctgaccggcacacggaacacttgcgaggccatgcgggcagatccaacgccaacgcgcagctgaatttgcagttccgtgtccccgcgaagctgcagcgtttccgcctcggtcaatgtgcaggaaagcaccttaccggacatcgtcacgtccggcaggccgcgctcaaacagcagctcgccgccctgtttgaacgcaac

SEQ ID NO: 7906 - DNA, 580 bp, Unknown
  gut microbiota DNA sequence
tgtttcctcctcggtcaatgtgcaggaaagtacattaccggacatcgtcacgtccggcaggccgcgctcaaacagcagctcgccgccctgtttgaacgcaacggacagcttggagatggtctcgcactcaatgggcagcgtaaaagtaaaagttggggttgtaccgcgatacatcaactcaccacctcaaaccaatcggtatcatccagtgcaggtgctgcgccgtcctgcagggccagatacaacttgtccgcatccgtacagtagtacccggtgcataccatcatgctccctccatctctgcccttacggcctcacgccatttctccggcactttgtccagcgtaatcagcccgcgcttgatgcagcagatataaaactgtaccatatcattcacctccggccagcatctgggccagctccaaaatggccgccgcgttggcgtccacctgttcctgcagcgtgggtttttcccgctcggccagttcctctgtcgtgtaagcgtggtagaactggcagtcctcgtacacatcgtagccggagatgatgtgctcaaggcctttggggtcgtcctcggtga

SEQ ID NO: 7907 - DNA, 927 bp, Unknown
  gut microbiota DNA sequence
gatgggcagcgtaaaggtaaaggtcggggtcgtaccgcgatacatatcacaccacctcgaaccactcggtatcggtcagcgccggggccgcgccgtcctgcagggccatgtacagtttgtcgccgtcggtgtagtagtagccggtgcagacggtcatgccgtccacccagtacagcgggcggtcgttggttccgtaggcgttggggtcttcctgcagttcccacgcaaaacccaccgtgccgctgtaggtcggcacccacttgtagcccagtttcgggggtatggtgggcttggcctcggtggggatctcggccaacatcagggagagtttggtcgcatcgtccagcacaatggtgcttgcctcgatctccgcctgctgccgctcggccagttcggccacggtgtagcggtggtacagctggcagtcctcgtacacatcgtagccggagatgatgtgctcaaggcctttggggtcgtcctcggtgacagtgccctgcatcacttcccggctctccggcacatgctcggcaacctgcctggcggtgtagagataaccggctgacaggtcgggagaggtcagttcctcgttggtgatttcatcgtagattttcattttgtacctcgttatttgtagacgtaaatttctacagttaaggacagattgttggcgtggtagtcatactgtgtatatgtccccttcagggttaaaaccgagttggaaaaaccggtaatttccaaattcgtgaaactacggctttgcttttcggcagggctggaagtaaaaccggaaatacgaacgaaaaagtcctccgccttttttcctgccacattaaattctgaaaggtcatacgtctgaaacgagcttgtggcggtactgctgccgttaataggtgtaaatgtaacggtcgtaagcagctgcaatttttt

SEQ ID NO: 7908 - DNA, 18810 bp, Unknown
  gut microbiota DNA sequence
tcttgctttcgccggggttcagttcctcgtggtggccgggctcgttgacggagttggcccagccgttcgagggttccatgcagacgaagttctcggcgttctgctgccagaggacacccttgccgaaggcagcctcatcaaaggcgaccgtgaccttatggccattgccggaatcagtcagcaccatggggctcttcacgccggtcagcaggcggatggaatccgcggcatcatcctttttggtcagggtgatctgggcgggggcggcgggctgattgcccttggcgttctcgctgcaggtggcagcgttgatgtcgaagctgacattttccagcttggtcacaccaaaatagggatggaagccaacgctgaacggcatcggcttatctccggtgttcttcacggtcagggccaggcccgccttgctgcctgccagggtgtagcgcatggtcagagcaaaatcaaacgggtagacgaacttggtcaggccattaggggtcagggacagctcgatggcgtcctcggtggcggacttgacctgccagggcagcaggtcggccaggccgtggacctcgatgggatgatcggcaccgccgaagtgatgcgcgccgccatccggcttgccgcagttggggaacaggatgggcacgccgcagcggggacggtcggtggattcaaagttcttgtcacgcagccagagatactcctcgccggccttggtgaaagacgttgccatgccgcccttttccggtgtgacggtcagggcatagtcgccatctgtcagggtcagggtcttgtagttgacgccatacttctcgtagacgccctcggtcaatttagccatattacaaccttctattcaacccatcgcgcactttcccgcgtcatatgccgcttggttttacgcttttgggcattttatattaaggcaacaccgcacaattcccgctttacagcttaagcaccgctgctacggctgcgaagcacaatctgcgttgcaaaaatgctcgataatacacaaagtattatctgcgctttttgcttagcagcttgtacttctcgctcgccgcatcggcacttagaattatgcggtgttgccttaaaagtttcttcggttctttcttttcaaagaaggaacataacccccgtaatcaaagcacgacgccgtccttgaagatggagatctcgcggaagcccttcttctcggcgcaggtctgcttgccggaagcgacatccagcaccagctggtacaggtcagcgccagcctcgtccagggtacgctcgccgtctgcgaccacaccggcattgaagtcgatccaggtctttttcttagcggccagctggctgttggtagcgatcttcagcgtcggggcgggtgcgccgaacggcgtgccgcggccggtggagaacagcaccatgtgggcaccggcggcggtcagcgcagtggcggagaccaggtcgttgccggggccatacagcatgttcaggcccttggtggtgacaggctcaccataatcgatgacatccatgatgggggcagagccgcccttctggacgcagccgcaggacttgtcctccagcgtggtgataccgccctgcttgttgcccgggctggggttgtcgtaaacgacctcgttgtggctgatgaagtactctttgaagccgttgatcatcttaacagccttctcaaagacctgctcattctggcagcgatccatcaggaagccctcggcgccgaacatctcgggcacctcggtcagcacggtggaaccgccgcgggcgcacagcatatcgctgaagcggccgatggtggggttggcggtgatgccggacagaccgtcggagccgccgcacttcatgccgatgaccagctcgctggcggggatcggctcgcgcttgaactgggcagcgtaagcggccagctctttcaggatctcgcggcctgcgaccagctcgtcctcgacatcctggcaggtcaggaacttgacgcggtcagcgtcgtagtcgcccagttcttccaggaactgctcatgggtcaggttctcgcagcccagagagagcaccagcacagcgccggcgttggggtggcgaaccagcgaagccagcagcttgcgggtctgggcatggtcatggccggtctgggagcagccgaagggatgggtgaaggtgtacaggccgtcgatggagccggtgaccagatcctggttgtcccgcacgagggctttggcgcagtcgttgacgcagccgacggtggggatgatccagatctcgttgcggatggcggcacggccgtccttgcggcggtagcccatgaaagtttccggggccgccggggtcaggggatgtacgtcgggatggtagctgtactcgatctcgccggacaggttggtcttgacgttgtgggtgtgcatccaggtgccgggcacggcgtcagcggtggcatgtccgatggggaagccgtacttgatgacattctcgcctgccttgatgggagcgatggccattttgtggccctgggggatatcctcaacagcggtgacggtggtgttatcgacaggaactgcagtgcccttggcgatggggtgcagggcaacgaccacgttatctttggggttgatcttaatagcgatgggcataataagactatctccttaatctagttatggcaataccgcataattctaagtgccgatacggcgagcgaggtgcggcagatgctaagccaaaagcgcagataatactttgtgtattatcgagcattttggcaacgcagttgccgtgccgcggccgccggagcggtgcttaagccgttaggcgggaattgtgcggtgttgccttataataaaattggggccggagggcatcctccggccccagtggggtttattttatgcgttgtcgcgctggaatcacaggcagctcttgtaagcagccagagcgccctgctcgcggatcatggtcaggttcttgacggtagcttcctcgaagcctgcaaccttggtcaggtcctggccccacatctgctcgttggtcatgacggcatggacgagagtcgggatgtcgtcgttcttgtgctcgttgtagaattccagagcccagcgatcatcggagacggtgtactcgttgcccttggcgcgcttgcagaccaggcctttgtcggtcaaaccctggacatcgttgctgtagaaggcaatgtaagcagcgaagctcatggtcaggcaggtgggcagcttgccgttcttctcgatgtactcgaggaaggaaggcatgttgcgggcacgccacttggaggtggagttcagggagatgctcatcagctcatggttgacgaacgggttgttgaagcggtcctccacagcagcggcgaacttcttgcagtcgtcctgatccaggggcaggatgggcacgacctcatccagcagcatcttgttcatgtagcccaggatggtgtcgtcatgcatgcagtcgcgcacgatgtcgtagccggccaggtatgcgcccagaacaaaaccggtgtgggcgccgttcaggatacgtaccttgcgcttcttgtacgggctcatatcgggggtaacgaagacgtgatcctcgaggccagccttgcggaagggcagaatgtcgttcagcttggtgtcaccctcgatgacccagacgccgaagacttcgccgacatccagcaggggatcagcgtagccgtgcttctgctccagttcagcaacttccttcgggtcgcggatgcggccgggaacgatgcggtcgaccagagagccgcagaaggtgcagtcctcgttgacgtacttcttgaagccgtcctccaggccccactgctcgatgtactggttgacacacttcagcagttccttgccgttgttgtcgatcagctcgcaggccagcatgatgatgcccttcttgcctgccttatagcggtgatacagcacctgggtcagcttgccggggaagctggatgcgggaacgtcctccagcttgcaggcgggatcatagacgatgccggcctcggtggtgttggagacgatgatctcgaggtcgtcgctggcggcaacggccatcatcttgtcaaaatcctctttctcatacgggttcaggcagcgggacacgctggagatcacacgcttgtcatcgacctttttgccgttttcgctgccgcgcaggtacagggtgtagaggccctcctgctcgttgatcatcttggccaggccgggggcgatgggctggaccagcacgcacttgccgttccagtcagccttctcgttagccaagtcgaaccagtagtcaacgaaagcacgcaggaagttgccctcaccgaactgcaggaccttttcgggggcatcttttaggacataaccgtcatagccggactttttcagaacctcgtaattcagagtttccatattgctttctccttatcacttcatagtttcagcgtgcgcaccgcacgccttgcttaattatcattttagagtctttcccgcctgccgtcaaggttcttttctggattctttttcagcaaatcgcacatattttgcaagttatttttttatctatgttcctttagcaccctgcacagctttaccttgcaaaattcagcaattttgacgcgcataccgcaatttttacaacttgttgaattgcttttctttatgtataataatagcagagtatgtgctttcggcgttaaaaccctgtgcaagtatcgttcgcttgccaaagggccgcgccggggggcgcagcccgccacaacctatattatctgtaaggagcgttttgtacatgaaagcttttatggacaaggactttctgctggagacccctaccgcccagcacctgtatcacgactattcggccaagctgcccatcgtagactatcactgccacattcccccgcaggagatctacgagaaccgccgctttgagaacatcgcccaggtgtggctgggcggccatcaggtcctggccgatggctctgactactactttggcgaccactacaagtggcgcgtgatgcgttccaacggcgtaccagaggagtacatcaccggcgacaagcccgaccgcgagcgtttccagaagtttgccgaggccctgcccatggccatcggcaacccgatgtacacctggtgccatctggagctgaagaagtactttggctacgagggcgtgctgaacggcgacaccgctgaggaagtttggaacctgtgcaacgagaagctgcagaatgacccgaagctgactgtccgcggcctgatcgagcagagcaatgttgccatggtcggcaccaccgatgaccccatcgattctctggagtggcacaagaagatcaaggctgacccgtccatcaaggtcgtcgtggccccctcctaccgccccgacaaggccctgaacatccgcaaggaaggctttgccgattacatccacaagctggaaaacgtggtcggccgcaagtttgcctgtgccaactgcgttgtcaacgctctggatgagcgcctgcagttcttcgtagagatgggctgccgcgcctctgaccacggcctggattacatcccctacgtggataccaacgctgagaaggctaccgctgctttcaagaaggccatggccggtgagaccctgacccaggaagagggcgacgagtacaccacctacgtgctgctggccctgggccgcctgtacaagaagtacaacgtggctatgcagctgcactacagctgcctgcgcaacgtcaacgagaagatgtaccgcaagctcggccccgataccggctacgatatgatcgccgtgaccgattgcagcgctaccatcagcagcctgctgagcaagctgaccgagaccgacgagtgcccgaaggtcatcctgtacagcctgaaccccgccgacttcgacatgctgggcaccctgatgggacccttccaggatgacgggctccccggcaagatccagctgggttccgcctggtggttctgcgataccgacgacggcatgtatcagcagatgaagaccctggctcgcctgggcctgctgggcaacttcatcggtatgctgaccgacagccgcagcttcctgagctatacccgccacgagctgttccgccgcctgatgtgcaacctgatcggcggctgggtcgagaacggccagtaccccaacgatgacaaggccctgaagcagatcgtcgagggcatcagctactacaacgccaagcgctacttcaacctgtaatttacgggagttttattcctttcttgaaagaaaggaaccgaaagaactttaaacaaataaaacagcaaaatgcccctgcctggggatggttcaaaaccaacctgggcaggggcgttttttatttctttttgcctaataattctttgcggatatacgcaaaacatgcatcctcgccctcatcgcgcaggatcagcaggcaggtctccagctgctttcttgtctcggggtgcaggatgtaatggtctttgctgtggtcgtagtattcccatgcagcggcatctgtgtagtttttgcctttgtagtttttgctggcggcaatgcggtcacacaccatctcggctacgtacttttccggcatgcgcataccggccatggcatggtcgccgtccggtgcgtagtcgatccagtattccagatggtgcttattgcgtcccttatggtgcagccaggcggcgctgtagccttctttctggcgctgggcgttgttggggctgcagatcccctgccagtacttggcaccagcccagaattccaccggggacagcttgcttaaatcgtgggtaaggccctgccagtacagcccgcagcggaagcagttttgcatcaccagcattttgtggtggtggatcgttttgtaatgtttaatgggatgccacaaggtcaggtctcctcctgaacagcaaagatacgatttcttttgtcatgaccaccagtgccaggcagctgaccggcaccagcgcaaagtgccacagcatcggcaccagatgggtatgtatggcggcgtgggccttggaaagcaccatccacgataccggcgcggccaagctcagcacccaggccatggccagcggggccagtttggccggctgcccgtggcgggccagcagtacggcgcagaggatgccctctgccagcaccgcagccagcagcggcagcagcgtaatcgtcacagggccgaactgcaaaagcggctccttgttttccacaaaatagaggtgcagcacctccgggatggtgacggcgcgcacagcgttatcgctgacgctgacgcggctggtgacagcctgggtcatgctggcgaaagcctcggcggcggtgccgaaatactgcacctcctgccagaaccacagccccagtgccgcggccatgccgcccagtgccgcggcgccggtgcctaccgtgcggcccagccagcggcgggcggcgggcaggtttcggtcaacgcaaagggattgcatgagtgcgcagcaaagcgggatctcacacaaaatcaaaaaggtggagacaaactcaaacccgcacatgcagcggatgagtaccgccagcgccaccagcccaaagcaccagccggacgtgcggcctttgcgcacggcaacgcggcaaagcagcagcgacgccagcaccggcagcagccaggtccacaggcaccagtacaggtctttcataccccgctggggccagggggcaaacacaacggccaacacccagaccagcgcagccgccgggcctgcctgccgccaggcagccagcgccagcagcagctcggctgcgtaaaacaggatgcagtttacggtgtacagccaggtctcccgcgtctcgccgctgggctgtaccagacgaaacgcgcggttaagcagcccgaatacccagccctgcaggccggattggtgggtgtaggcctggaaatcctcggcgttgaccggcgtgttttcccggaaccaggtgcggttctggctgtcgctccagtcctgggtatacacccccataaagccgccgggggcggattggtggttttccatctggagcatccggccaaacaccaacggctgggagccggtatcccaaaagccggtggcgtaggtgctggcgttctgccgccagtgggtcagcagcgccgccagcagcaccaccgccagcaaggtaagcacccgccgcagccaaaccggcaggcgggtaaacggttgatgaatcggcataaattgaaagttccttaaatctttgctttagcgtatctctaaaagcttccctctgcgagacagactcccccggtacgggggagatggcgcaaagcgccagagggggccaaagatgcacagctcacatattttatctatcccacttatcgcacaagctggcgatctggctggcgaacttggccaggtccttgttggcgccgccctggttgtggcggatgacttccatcaaacgctggcccatattgaccaggcggtcgtaagcggcgctggtgcgcacattggcttcggtgcgggtcttgacgattttttgcgtgttcccggtctcggcgcaggcggcgcggccatcgctgacgatccagacagcgccgttgtagggcgcgtcggcctcgtagccttcagcccgcagcttttcggcccagtgggcggccacggcatcctcgccatggttgacaaagacgaacttcggcttttcgtcaaaggcgtgcagccaggcggccaggccgtccttgtcggcgtggccggaaagcccgctcagctgccggatgctcgccttgacctgcaccggctcgccaaacagcttgacttcctgcgcgccgttgaccagcgcgttgcccagcgtgccggggctttggtagcccacgaacagcacggtgcactccggccgccaaaggttatactttaaatggtggcggatgcggcctgcgtcgcacatgcccgccgccgagatgatgaccttcggcacggggtcgccgttgatggccatggattcttctttggtctcgctgatgtgcaggccggggaactgcagcgggttccggcctgcctgcaccagggccagggcttcctcgtcatagcactcgctgaaattctcgcggaagatagtggtggacttgctggccagcgggctgtccacgtagaccgggaagtttccgtggccggtcacgcggccctcggccttgatctgccgcagaaagtacagcagctcctgggtgcggcccaccgcaaagctggggatgaccacgttaccgcccttatcaaaggtagattgcagcacatcggtcaactcgcccaggtagtccggcttggggccgtggctgcggtcgccgtaggtggactccataatcaggtagtcagcgtggccggggttggcggggtccttgatgagcggctggtgggtgttgccaatatcgccggagaaaacgatgatctccggctgcttgcccggctcggtaacgcgcagcgagatggaggcgctgcccagcaggtggcctacatcggtaaagcgcatctcgattttacccgttggtccatcaaacaggttttgccaggtctcataggggcagggcacgaactgctgcatgaccttctcggcatcctcgacggtataatcgggttcgaccatctcggcaccactgcgcatggccttacggtttttccactcagcctcctgctcctggatatgggccgagtcctccagcatgatggcacagaggtcgcgggtggcgtcggtggtgtaaatggggccgcggtagccgtttttgtacaggtacgggatgcggcccgagtggtcgatgtgggcgtgagtcagcagcagagcttcgtaggtgccgggggcatagggcaggtcggcgttttcgtagacgtcgcggccctgctccatgccgcagtcgatcaggatacgatgtcctgcagcttccagctgggtacagctgcccgtaacctcacggtcagcgcctaaaaaggtaatcttcatagaatacgcctccccatagaaaatcgtttagattcctctacgatcaaattttacggctcgctgccgtttttacttgttattccgtccgacgccatatcgcggggcttcgggcaggatgaaatcggtggtaaagttctcggtcaaatcgttgatgttcatgcgcacatcccagtacacatcgccgtaatcgcgcagcaccgtgtaattttcagtgccgatggaggccaacgtctgggtatcggtaacgatgagcacggtatcccctgccggttcgtactcgctcagggattcctgataggtgcgggagacaccgtcgaggcctgccagcgtgcgggcggtgtcggcgctgaccgaaaccagctgcacccgggctgccttgggcagcaggtccagcagcgtgccgcggctgatgtcgccgtactccggctcgcccacattgcctgccagtgccgtgaactcgctgccggtccagccctcgggccagtggtcgcggtcgttctcggcgatttcctgatacagcgccgccagatagttggcgaagctgatcgttttttcagcgtccgggttggccgcgtaggtgaacagcggcgtgtagtagatgctctggtcgtcggcatccagcccggccagcttggcggcggcgtaggcgtaggcctcggccccctgctgctgggcttcgtcgaccgtctccgcgggggtgctggtatcctttccgcccacagcctcggtgtccttgtccgggtcggcagcatcgccgccggtctgggtgtcatcggccgtgatggtcaggctctcccaggtggagcggctggcctgcagcgtatcggcggtcacagtgtcggccccgcgcacggccacaccgccgccctgggtgaacaccaggtcaaagcgggccacaccgtccagtcccagcgccgcaccggcgcgatagagagtatcctggccgctggcgctgctgctgccgtccacgatggcggtcacgcccaggtctttcagcgtggtttgcagcgcggcggtgtccacgccgggggtggcgatgcagatgatggcatccacgccctgggcctgcaaagcagccacctgttcgctggcggtctgggtcaggtcgttggcaaagggcgtttcctcgttgaccaggctgatcttgttgttgacggtgtcggcatcggccagcgagaagaacccgatgcggtagcccgcacgggtgattacgtagttcatgccgttggtgatgcggttgcggttccagctggtagagcggtagaagatcgctgcaccgtcagaatcccgcaagttggcagccagcgacggaccgcttcccatattggcgtcgctgcgcaggcgggagatgccgtaggccaggtcctcggccccgaaggcctgcaggtcgtacccggcagcggaaaagctgctgagcatatccatgccgccggtcatgctggccacggtggtaccgtgcaggctgccgcccgcgtccacgaggatcgaatccggcgtgctggctttcagcgcggccacatcggccaggctgacgttgtcgttggcccgctggcccgccagggagccggtggcaaaaatgggcacggtgatgtcgcccacccgcacaaggcactggatgctctcggtgccgtcggccagcgtggcggtgatggtacactcgccgctgtcggccttggcgcgcacaaggccgtgcttatccacggtcgccacactcttgtcgctggtggtccagaaaattttctgcccgccattttcctcgtccggctggttggtggtcagattcgcgtaggcatccttgccgtccagatgcagctccgtctggcgggtgtcgttgagcagcgtcggcgtggccgttttgccgttgcagctggaaatttcgccaaaagcaaacggccgcatgacgaaatcaatatccaccgtctcgctctcgacaccgtagtccgcgccaggctcggaatagctgcactgccacatatcgtaggtgccggtgtagcccagttcgtccgcaaagcgggcgatccagagattctcgcgccaggggtcgaacgccgcatcactgaagcgagcgcgcacccagttcagcgaggcatagatgccctgtttgccggtgtagcccagctcggtcaggcggtcaaaaaacgctttggtgatggcggccatctcgtccgggaagatgccgctgatgctcttgtcctccaggtcgtagtagacggggtaggacagccggtagggcgcggcggtgtagtcctcgagtccctcctgcggcggggcaaccaggcccagcaggcgggcaacgtggtcggcctcgctgcgggcttcgtcctcggtggtagcgtaggagtagatgtacgcgccgaacgggatgcccaaacgggtgcactcatcagcgttgcggcgccactggggatcgtcctggttccatccctgctcctggccgtcccactcaccgccgaaaccgcagcggatgatggcgaagtcgacgccgttgctcttggccttttcccaatcgaccgcgccctgatatttcgatacatcgatgcctttcagcacggcggcaggcatagcctcgccgctctcattaaagtagtagcccagttcattcttctgccaggcagccgccggggtaccgaagtctgccttggcaggcccggtgggaccagccgagcagcgggtaagtaccacagccagcacaatgaccagcaccagacaggcggcgcagaggcccaaaacagcccggctgcggcgttttttgctggtttttctgggcggctgtttgggtgtacggggcggcatacctgccccaccctgctgccgggccggcccggccccggaaacagccctttgcgcacgcgccgggctgcggtatactttgcgttcgtctgccacgatgatgccctctctttgtctatggcaacaccgcacaattcccgcctaacggcttaagcaccgctccagcggctgcggcacggcatctgcgttgccaaaatgctcgataatacacaaagtattatctgcgcttttggcttagcagctgccgcacctcgctcgccgtatcggcacttagaattatgcggtattgccctatatataaaaatgtgtatagccgtttatgtatgactggactttaaagccctctcccggatagggccttttaaggggatactaattaagaatagtgtatcattttgtcaaagaaaatacaatccaggagaggcggtagattttgtaaaaaatttagcaccccggcaaaactgcaggggtgccaaaacagccggcccgaaggccggctgccaagtatgtgtttacaaatcaaaagccgtgcttttccatcagcttgcggcccatcagtacgcccataacggaagccatcatcaggccgcgggtccagccagaggaatcgcccaggcagtgcagaccctcgatattcgtctccaggtcggtatccatcttgaccttgttggagtagaacttcagctcggggctgtacagcagggtctcggggctggcgaagccgggcacgacctcgtccatcatcttgatgaactcgatgatgttgaccatggcgcggtagggcatggcggcggtgatgtcaccagccacggcgtccttcagcgtcgggcgcacgttggtgcgggccagttccttggcccaggtacgcttgccgtccaggatgtcgccgtagcgctgcaccaggatgtggccggcacccagcatgttggtcaactcgccgactttctgtgcgtaggcgatgggctggttgaacggctcggtgaagttgtggctgaccagaatggccaggtttgtgttgttgctcttcttctccttgaagctgtggccgttgacgacagcgaggtcgttgtcgtagttttcctgggccacaaagccgccggggttctggcagaaagtacgcactttgttgtgccagggggccgggtagccgatcagcttgccctcgtacaggacctggttgatcttctccatgacctcgttgcggcactcgacgcggacaccaatgtcaacggtgccgggtttgtgggcaatgttgtgctcggcgcagagcttctccagccaatcggcgccgcggcggccggtggcgatgaccacctgcttggcgtagatgtcgcgggattcgtccttctcgcggatgcgcacacccttgcaggcggattcctcgaggatgatattctcgcactcggtgttgaacagcatctccacgccggcgtcggccagatagttctggatgttcaggtagagctgctgggccttctcggtgcccaggtggcggatggggcaatcgaccagctgcaggcccgcctggatagcgcgcttgcggatgtccttgatgtcggggccttcgtagacgccctctaccttcggatcagcgccgaattccaggtagatcttatcggtgtagtcgatcagttcctgggcaaagtcctcaccgatcaggtcgggcagttcgccgccgacctggtaggacagggacagcttgccgtccgagaatgcgcccgcgccggaaaagccggtggtgatggcgcaggtcggcttgcagtttacgcagacgccggttttatccttggggcagtggcgcttttccacaggcttgcccttttcgataagcaggatcttgtggggattgcagcttttgcgcagcatctccagcgcggtgaaaataccggcagggccggcgcctacgatgatcagatcatacatggatgggggttctctcctttaaaaatatgtggggacatttataacagggtgcaggcacccggtcaggttttgctggagtcctcgtcggacacgtcagtgctctcggcatcgtacacgacaggttcgccgtcccgggtcacgtccacgatgtcggtgcccgcggcctcggcttcgtccagggcatcgcccagggcggtcagggtcgcgttgacggcggcgttggccatgcggtccagcgtgcgcaactccatggccgcatacaggatgcagccaagattcaacgcaccttcgacgatcaacaggattccgcagagcatcaccacactgacagccgcgccgaacgggtgccagatgagcagcgcacccagcgcaatggacacaatgctgaacagcagcagcatccaccacttttcgcctttgcgctttgccaggtcaatagccgagccgatgcggctgcaaccatccaccacgataaagatgccaaacaccaccggcagaaagctggccaccacctggggttttgctaaagtgaacaggcccagccctgccgtgatgacaccgcccaccagcataaagggcgcggtgaagccggtgccccggatgcgggcgtactggatcagacagacaatgccggtgataagcaccaccacgccaaaggcgtagcagatccacagcagactggtttccggcatgatgagcagcatcagccccagcacgatataggcgatactcatcagcatcattccgcttttgacatagcgcagcatagcagcacgctccttacttgttcatggccttggcagcatccacaatcaggtcggcacaggtgtccagacccagcgcggcattcaggcacaggtcatagtttttggcttcgccccagcggttctcggtatagtagttgtagtagctggcacgggcacggtcgtgcttggccagttggctttcccacatgcggtcgggcatctccttggcatcggggcggacttttgcgcgccccacacggtcggccaccggtgcgtaaacaaaggtgcgcagcacattgggacgctcccgcagaacatagtcaccgcagcggcccaggatcacgcagggtccctgggaggccagttccttgatgacgttgctctgcagaatgtacacctgatcggccaggggcatagtattgcccatcatgtacaggctgtagatcaggctgccgctgcgctggttctcgctggcggcgatggcctcctcggtcaggccgctctttttggcggccagggtgatcagctccttattgtacagcgggatacccaacttatcggccacggcctgggcaatctcgctgccgccggaagcatactcacgtgccattgtaataaccataggttccttcataactgatacacctcacattcaatttgctgcacggcgggcaaccaccggtgcagactcttccatctatagtatacccccctttgtgcaaaagcgcaagaaaaaaatcatactattcgcgcaaaaactgtgcaatgtccggccccataaacagcaacaagctccccggatggggagcttgttttataccgttgctttctctttctgcggggcaagggcgatgtagatcaggttggctgccagcaccagcagcaggccgccgcccatgatgtacaacatctgcgccaccgtgtgatggaaccgggacaccagcacaaaaatcagcagataccccgccgccatgctgacggtgaagaagcctgaacggcccagcggcatcaggtagttgatgaggatcgtcaggcaggccaccggcaccacatagaacgagatgggcagcagcaggtcgatggcggcaaggtagcgttcgccaaacagcaggccgatcatcgggcggcccaccacgttcatgcccacagcgcacagcatcgcaacaccgccgccccaaagcatggcgcgcttgagcagctggcgggtatcgtggccggtggattggcgctcggccaccatcggcagcagcaccggcacgatggcgttggctaagtacagcgaaattttgccgatgacactgcccgaggagtagatgcccacctccgccggatcagcagcaaaggtcttgataagcaacacatcaccgttggccatcagcagcaaaaacatctgaaaccagaacgtgctgacaaagtagcgccgtatctcggtacggtccagatgcagctgctctattttgggtgcaaagaacaggtcacgtgcacaccagaagcagaacgccgccgtggcaaacgctgccaaaattacagctgccaggttgccgccgatgccgaaacccatccgcacaaaagtgatgctgagcagcaggcggatagcgatattgagcacaccgtttatgctgtaaggtacgaatcgcttaacaccttgcagcgtacagctgaaaaccggcgccacacagctgaacgccaccacgaccatggtggccagtatgtagcgggtctcctcgatctgcaaaacattggcgatgatactggacagcgccgcacctgcagcgaacaccacacaagccagcagcacactggcacgcagcattttgtgcataaagccgccgatcaattccggtttgccgacagcctgatacttggccgtgtaagtagctaccagcgtcgagatgatacccgacggcacaccgacaacaatagacagcgacagcagcgtgttgatggtgccgtaatctgccggggaaagcaggtttcccattacgatttgatatagatacgtaacgacattggctagcatggagatggcaaacacgatcgcgctgtttcgttcaaattcgccaagtttgaattttttcatagggttcctcgtactatggatgctttatttgtaacggcctttgtcgatggtctccagatgagagaacttgccgccgttccagataatagcggtgtaatagccgttgttcatggtactgataatgcaatcacactgggacagtagataaatatcgcccaggtattgttgcgtattctcgtatttactggatttatccgtcaagtcagacgaacggttcacatgatccgactcacccaacttgaagcggacagaatcggaatagaatacgttatcgaacttcgatgcaataaggtccagcgccgtctgttcctcggacttaacaaaaacgccaagttcccggccactcttcttccagcactgcaaacggtcttgcagcagcgggacagcttcgtcagcggtcaactgcactgcgtgaccgtaaaagcgtttgtttagatctgagccacgcatagcaatgccaatcaagtccatattttctggcacatccagcgaggcttttaccttgtcagcatacgcctgcatttccgcattgaacggcgcccgttccgccatctcgtgctgccatttcagcacttccgggtctttatcgccggtaaagttacagcgctggtcgctgccgttggagaggatgacgtttttgctctggtatacttcttccagcgtgtagcgcttgccggtggcggggtcgagcggctgctcaaagaaatactcccacacattggtcgtgccgtggatgggatggtcctcgttatacagggtctggtagttctgcatatccaccacagggatccagccgttatcataggcatatttcatatagcccagcacatagttatagtcggctaaaaagcctgctgccgggggatacagacggatgacgaagaaagtcttgtccgggtttttatttccaaaagactttttctgctccggcatggtcaggtttttgtaggcttcccacacggccatgctggccttgaacacccactctggggcatgggccggtatccaggaacgcatcttgtccagaaagctgttcatatcattgtccttttaacgcaaaaggctgctgcccggtgtttgcggtgcagcagcctcctttggttcagtgtgaaaaaatcacttattcttcttgctggcggccttcatgcggaggtcatggtccaggatgcgcttgcggatgcgcaggttttcgggggtgacttccagcagctcgtcgggggccaggaattccaggcagccctccaggctgaacttgctgacgggcaccaggcgcagggcatcgtcgctgccggaagcgcgggtgttggtcag

SEQ ID NO: 7909 - DNA, 1907 bp, Unknown
  gut microbiota DNA sequence
atttcatcaatctgggcagtcaaaatccgctcctgccgttctgcggacaccgggattttctcaaactgggaatgcccaatgatgactgcatcgtaatcgccagtggcaattcgtgcgcagaacttctttctgcgggcggtttcaaagtcctttttgcttgccaccagcagttttgcactcggatacaggcgcaggaactcatttgcccactgaagggttaagtgattcggaacgacaaacatggatttctggcacagccccagccgttttgcctccatagcagaagcggccatctcgaaagtcttgccggcacccacttcgtgggccagcagcgtattgccgccgtacagcacatgagcaatggcattctgctgatgttcccgcagccggatttccggattcatgccgccaaagcggatatgagaaccatcgtactcacggggacgggtactgttgaacagctcgttatacttttccaccagttccgcacggcgataagggtctttccacacccaattctggaacgcatccttaatggcctgctgtttctgctgggcgagggtggtctcctttttattcagaactcgcttttgcttaccgtctgcatcctccacggtatcgtagatacgaatatcccgcagatttagcgtatcctctaaaatccggtaggcattggcacggctggtgccgtaggtcatataggcatggacatcgttccggctcggtgtactcttgccggtaatctgccattctgccgtcatgggagagaatttcacttcaatatttcggcgcagatagaacggcggttcaaaggtttcttccataaactgctggatataatcccgattgacccatgtggcaccaagacgcacatcaatctccgaagcatccaggtcttttggctgtgccttcttcaaatattccgcgttcaccgcaaaggcagggtcagaggccgcagccaactctgccacacggagcttttcccggacattgccggacagatattcatcagctgttacccagccggtttcctcgctgccctgcgtcatcgggtctttgaaaatgacaccatgcagttcctgctggattttttcatattcccctggtgtacctaaaagctccgacatatagggcaaatccactctgccgcgctctccaatggagattgccagagcttcagccggagtatccacgctggtaacagcccgttccggtcgaatcgtccgtttggtgaacatatccgccttggattccagcctgccgttttcatccacattttccagagagcagagcagataataagacgaatcttccgaaaaagcctgtgcatttgcacgggaattgataagcccatactgatcggcgaatcggtcataggctacattcagttcccgctgtttctgggcaatcgcttcctcctggtaatcgttcaactgatagtcgatcagttcctgcacaatggtgcgaagctccaccatgcctttgatcctgccggtggctgtcgcagaaaggtcagccttccgcatgatgctgttctcacggaagtagacatccccatccactacggcataggagaagttcttgacattggggtctgccggaatagtttcgccctgcaaggacaactcctcctccggtgccagctcctgtgcttcataatgaccgccgatgtgctgcaccgcctcatgcagctggtctcccagatccgcacctggaatcggaatgaccgtacattcttccttgccgtactgggtactttccgttgtaatctcacccagcaccatttccgggtggtcaacaaagtagccgttgagggttataccctccgatgtcagccccagatgcacccaatccggttcgatatcaatgggatggtctctcttttgcaggaaaatgatatccgacac

SEQ ID NO: 7910 - DNA, 13095 bp, Unknown
  gut microbiota DNA sequence
ggcttcgggcaggtagatgtggtgggggagaccctcgacgtagatgggggtgagttcggcctggacgaggggcagggcgtaggccaggaactcgtcggtcatggcggtgtggtcggcattgacccattccagcgggaccttcttttctaggttggcgacctcactgataggatgcaggctggtgccgcactggtacggtgcgttggagatgcggtccagggcgaccatctcaccggtatgaccctcaaaggcggccttggcggcggcaccgcccacctggtacgcctcggtgatgtcggtgcggctggtcaggtggccggcgcagcgctgcagggtcgaaagctcgatgcagcgggtcttggtgtccagacggcgggccaccgtgttggccaggaaacgggccgtgccggtcagggccttgtgaccgaaagcgtccactgcgtggacatcatcggccagctcgcaaacgtagcggccgtcctccagcttgacgccctcggagacggcgatgacgatggagggcttctctttctgcatgcgctcgatcttttcgacaaaatgatcgacgttgaaggggacttccggcaggcagatcatgtccacgccctcgcaatcctcggccttggccagggcagcggcggcggtcagccaaccggcattgcggcccatgatctccacaatggtgacgtacttggtgccgtacaccgtggcgtcacggatgatctctttcatgacaacgccgatatatttggcggcgctgccgtagccgggggtgtggtcagtgaccatcaggtcgttgtcgatggtcttgggcacgcccataaagcggatctcgctgccgatatgggtgccgtagtcggccagcttgccgatggtgtccatcgagtcgttgccgccgatgtagaagaaatagccgatgtccagctctttcaggatctcgaacagctggatgtagacggcctcgccctcgggggtgtgccaatccggcagcttgtagcggcagctgcccagatagctggacggcgtgcgcttgagcagctcaatgtccagggcggtcttgagcttttcgtccagcacgcaggtgcggcgctccagcagacccgccacgccgtgcagcatgccgtagaccttgccggcaccgcggcgcttgcagctctcatacacgccggccaggctggcattgatgaccgaagtgggaccgccggactgaccgacgattgcattttttgccatagtttctcctcctgcaatttccatggggtgggttgcgctgcgggtaccttccggcagcgcacgataattgtcatgtttagtgtagcatggagtacactttttttctattgcaggagttgccgaaaatttgtacgtgtctttgtataactttgcgttccacagtgcggaacgtgttttgcggggtggatggggctgtatggataaaaattccgctgtatggaatatttgtgccatgaggcgggacaaaatgagtgctgaaaccttgcaaaaattgcgcaggaaagttgactttcggcaaggtgaataaactttttgcgacgaaattgtgcggtatgacggaaaatagaaaaagcccaccccaaaaggggcgggcaaagtgcaaaatcaatccagatgaatatgccgcggcacaccgttgatgtagatgggggtcagctcggcctggatcagggggcgggcgtaacgctcaaaattggcgttgacgtgcatgccgtcggcggtgatccactcgtcggggaccttcttctcaaagttggcgacctgggtcacgtcgaccatcttggtctcgatgcggtagggctggtcgctcaggcgcttgatggcggacatcttggcggtctcgccacgcacggcggcttccacagcggcaccgcccacctggtaggcctcggtcacgtcggtgcggctggccaggtggctggcgcagcgctgcagggtcgagaactcgatggcgcgggtcttgcagcccaggcggacgcggatcaggtcggccaggtagcggctggtgccgctcaggatggccttgtggccgaaggcgtccagctgaccggcggtggagaccaggtcgcacaggaagacaccgtccttatttttaacgccctcgctggcggcaatgatgacattgtggcgctctttttccagctcggcgacgcgggccaggaaggcttcctcgtcaaaggggcgctccggcagcaggatcaggtcggggccgttgcagtccgggccggcggccaggctggcggcagcggccagccagccggtgtggcggcccatgatctcggccaccgtcacgctgcgcaggtcgtagacgctggaatcgcagatgacttcctttaaaatagtagcgatgtacttggcggcgctgccgtagccgggggtgtggtcggtcagcagcaggtcgttgtcgatggttttgggcacgccgatgaagcggatctcgctgccgatggtcttgccgtaggcggacagcttggagatggtatccatcgagtcgttgccgccaatgtagaacacggcaccgatgtcgtactgcttgaacaggtcaaacagctgcacaaagggggcctcgtccacatcgggctggggcagcttgtggcggcagctgcccaggaagctggacggcgtgcgcttcagcagctcaatgtccattttgtcggaaaggaccgcgtccagatcgacgagcttgccttccagcacaccggcgatgccgtactgcatgccgtagacgtgctcggcgccgcaggccttggcggtctcgtagacgcctgccaggctggagttgatgacggcagtgggaccgcccgactgcccgaccaatacgtttttcatggaacacctcattgatttataatgtgtatttttaacgatgcaaagcatatttctcgatggccaaggcgacgccgtcgtggttgttgtccgcagtgacggcatcggcggctgcgaggatctccggcgtggcgttgcccatggctacgcccaaaccggcatcctcgatcatcgaaagatcgttgccggaatcgcccacggccatgacctggtcacggcgcagacctagcttttcggccagggccagcaggccgctgcccttggtaacgccgggggcgttcagttcgatgttgctgcccaggctggtggtggcctctacgtccgggcaggcggccagcacggcgcgccaggcctcgtcccgcagctccactttggggtacatgacgctgaatttttccacctggccgaccttctcctgcaggacggtgcgcaggtcagggacctcgatgcgggtcttgcggaagtagtcccgcaggttttccggcaccagcacgtcgatgaggtcgttgtcggccttggtggcgtagcttttgccgcccacaaacaggctgaacacgccgccgaagggcttgatcgcatcatagacccgcagcgaatcctccagcgagaagggctggtcgacgatatgctcgccggtgcgcatgtctaccaccgaggccccgttggaggtcagcgcgtagtgtacgccggggatgccggtgaacgcctggggtacgccggtggcggtgcggccggtggcgggcagcacaatgatgcctgcctgtacggcggcctcgatagcagccaggttgcgcgggctgatgtgtttggcatcgtcaaaaaccgtgccgtccagatccaggccgattaagcggatgtcctgcatagatttaccactcccttgggcaacccagcacaattcgcgccctatgggcttaagcaccgctccggcggctggcacacctcgctcgccgtatcggtacttagaattatgccgtgttacccttaaccatctaagtgtaccgcaaatgcggaataattgcaagacgacgtggggtgtggtagaataaataaaaacattttgtaaggaacacgccaaaggcccccctgtgcaaagggggctccgcgaagcggtgggggattttggccttgcgggtgtagaccgaatggcctggtgaacgggacgatccctcagtcaccttcggtgacagctccctttacacaagggaccctttgcgaggctgcagtaaaggaaaaaacaatgacaaaacaacgcttatggcagctggatgcgctgcgggggctggcgctgttgaatatgctggcctaccacgcgatgtacgattgggtgtatgtgtttggccatgccggcagctggtacaatatcggcgcggcggggtgccatgtgtggcagcagtatatctgctggagctttattttgctctccggctacagctttatgctggcccgccgcccgctgaaaaatgggctgatcgcggccgggtgcgctgcggtgctgaccgtggtgacggtggggttcatgccgtcggagagcatctggttcggtgtactgcacttaaacgccgccgctgtgctgctgagctgcctgattaagccgctgttggacaaaatacccgctgtgccggggcttataggcagcgccatgctgtttgcgctgaccaatcaactgccctggggctggctggggtttgaacggtggcacattgctgcgctgcctgccgggtggtatgatgcaaacctgttctggctggggctgccggacctgacgcggtttagctcggcggattatttccccattctgccatgggtgtttttgttctggtgcgggctgtttctggcgcggctgtggcggccgcgcgcggggcaggcaccggcggcgctgcagccgctgtgcgcgataggcggccggacgctgctggtttacatgctgcaccagccggtaatttacggcattttgtggttgtggacgtccctgcgtggttgatagtttgtggaaaaacggaaaatttgttaaaaatttaaaaacgaccccttttcggcgaaaaatagtgttgacagagacgggaactatatagtataattgctgttactggttaatgtttttgaccggcaaactcctgtctcaggtcaagggagggaagaagatgtcggagatccgtgtcaaagagggcgagtccctcgagagcgcactgcgccgttttaagcgcagcactgctcgcagcggcgtgttggctgaggttcgcaagcgcgaggcttatgagaagccgtccgttaagcgtaagaagaagtccgaggctgcccgcaagcgcaagtttaagtaaggtttcttaccaatgaacgactgtgcagacccgcgcaatgcgcgggtctgcacttttttcttgcgctgcgcgatgcgcagtgcgcaaagaaggggttcgtcgcttgtggctgttggctgacgagaaagtggcttgtagggggcgatgcttgcatcgccccgcaaacaggcagccgcccagacgggccgatggcgggcatcggcccctgcatcaccgcccgcaaagtggattataacgcaaagtcccgcaggcgaacaatgttcacccctgcacactctacaagagatacgtgcagctttttgtgcgagaccgctttataaggggagaaaaccgtatgattttaactcctgaaatcgtatttcggaaaattgagtgcatccacccggactatctgaaagcgcatggcattacggcgctggtgctggatgtggataatacgctgactggggataacagccaggtgctggaacccaccgtgcaggcctggctggacgagatgcgggcggcgggcatcagcctgacgatcgtgtccaacaacacggccaagcgggtgcgcccttttgccgagcgtatcggcctggattgggtgcccctggcctgcaagccgctgaccatcggtctgatggtggcgcggcatcgtctgggcgtgaaaaaaagccagatggccatggtgggcgaccagatctttgccgaccgcatggccgccgggctgtacggctgcccctgcctgtacctgctgccccgcaccccccgcgaccgtaacaaatttgtccggttcaaacgcaagtatgaaccctactggctggaccgatactataaaaagggagggactgtgcatgaatgagccgcgttttggcacggccggcctggcggacagttacaccgtcaaaaagtttgaccccgccgccatcgccgcctacaccgccggttttggcctgaccgcctttgaataccagtgcggccgcggcgtgcggctggcccacgacaaggcacacgctttgggcgaagcctgcgccgcgcggggcatcgccctctcggtgcacgcgccctactatatcagcatgtccagcctcgaggaggacaagcggctgcacagcatcgactatctgctgcaaagctgcgcactggtcaaggcgctgggcggtaagcgggtcatcttccactccggctcctgcggcaagcagagccgcgaagaagcgctggaaaaggcgctggacacgatggcgcgcgctgtgaaagcctgcgatgaggcgggctacggggactgcatcctctgccccgagacgatgggcaaggtgaaccagctgggcacgctggacgaggtgctggccctgtgcggcgtggatgagcgcatcacgccctgcatcgattttggccacctgtacgcccgcagcctgggcactcagtttgccgagggcaccgcagccgccgactacgccgccctgctggacacgctgcaggccgggctgggggatgaacgggcaaagcagttccacgcccatttctcccgcatcgcctacaccaagggcggcgagaagtgccacctgacctttgccgataccgagtacggcccgccccatgcaccactgctggcactgctgaaagagcgcgggctgacccccaccatcatctgcgaaagtgcgggcacccaggccgaggatgcggcggaactggcgaaaacgtatgccgcgttataagagactaggacagtgacacataatcctgagtaccgatacgacgagcgaaacatgccagctgctaagcaaaaagcgcagagaatactttgtgtattctcgagcatttttgcaacgcagatggcgtgttgtagccgccggagcggtgctcaagccgtcaggcggggattgtgtggagctgttcaaagaaaaaataccaaatttcgcgcaaaaaaatcggctcagggcttgaaaaagtccattgtatcctgtaaaataaatacaggtatgtattttgtaatttatggaggaatttttatatgatttctgcaggcgaattccgcaacggcgtcaccttcgagcaggacggccaggtccttcaggtcgttgagttccagcacgtcaagcccggcaagggcgccgcttttgtgcgcaccaagaccaagaacgtcatcaccggctctgtcgttgagaccagctacaaccccaccgctaagttccctcaggctttcatcgagcgcaaagaggtcacctactcctacgaggatggcgatctgtaccacttcatggatgttgagacctacgacgacatccccgttggcgctgccgatgtgcccgacaacttcaagttctgcaaggagaacgatacctgcaagctgctgagctacaagggcaaagtcttcagcgttgagatccccaactttgttgagttggaagtcaccgctaccgagccgggtgtcaagggcaacaccgccaccaacaccctgaagcccgccaccgtcgagaccggcgctgagatccgcgtgcccctgttcatcaacgagggcgacaagatccgcatcgatacccgcaccggcgagtatatggagcgcgtgaactgattttgttccacaagccgggcctggcataccgccgcgcccggcattttttgaacggaggatttctgttatggctatggacttgaatgcaaaggctgcctacatccgcggcctgatgaccggtatggagtttgaccccgccagcaagaacggcaaggtcattgccgccatgatggacctgctggaagagatggctgcccaggtggtcgagcatgacaacgccctggaccaggtctacgatgagctggagaccctggaccaggatgtggacgacatcgtgagcgacctgtacgctgacgatgacgaggacgacgacgccgaagaggacagcgacgagggtctgtacgaggtcacctgccccaactgcggcaaagtctccactgtggacgaggagaccctgctggatcagacccaggagttggtctgcccctactgcaatgcctcttttgacattgagctggaaggcaccgaggacgagcagcccgaggataacgaccagtaagtaaaaacgatgcggcccggtggaaacaccgggcctttttggtatgcaaaggaggtggggcggatgctgacggcggcaaaacttgtgctgcccgctttggcggcagcactgtttgtgtggggcgcggcgtggtgcgtggtgcgcacgctgcggccgcagatggcggatactgtggctgttggcggtgagccaccctgtagcagcaaggccatggcggcgctggccgggctgctgtttgtgtgcgtactgcagctggtgttctgccatgcggcgcaggcaaacaaccccggcgtggggctggcccaggccatggagtggcagttttacggcaacaccgacgcgcggcattacatcgacctggcgcagtacggctacggcaccggcggcgcgtttgcggagcaggaattgatgatcgtgttctttccgctgttcccggcgctgctgcgggtcgtgcatttgctggtgggaggcagctatccgctgttggggctggccgtgcaggggccgctgtttgcctgggcggcggtatcgctgtacaccctggtcagccgccgctggggcgagcgccaggcggtgctgacgctggccctgctgatggccagcccggcggctgtattttttgccgtgccgatgaccgaaagcctgtttttgctggtgactgtgcgctacgtgctggcgtgggatcggcggcagtggggccgctgtgcggtgctgggtgtgctggctgggttgtgccgcgcccccggcggactgctgctggggctggcggcgctggaactggcggccgcatggcgccggggaaagcggcccgcgctggcaagtatcccggctatgctggccccggcggcggggctggggctgtactttgggctgaaccaggctgtgtatggccgctggaaccagtacagcgtataccagtgggagcactggggccaaaaactgggcctgtttaccaatacggtgcgctaccatttggattatatggccagctggtgggaggataaccgcaaggcggcggtgggcatctgcctggcggcgatactctgcatcctgttggcgctggggctgctggcggcttctgtgcggcggctgcctgcggcctggctggggtttggcctggcctacctggccgtgacgatgggcgcgacctggctgttgagcgccccgcggtacgcagtggggctgttctgcctgccggtggcactggcgctgctgctgcaggaccgcccccggctgacctgcggggtgctggcggtgcaggtgatggtgagcgtggtgtatacctggcagtatctgcacggctggccgatctactgagctgttgcaggataagaaaagagcctgtctcggggaaggagacaggctcttttgttgttggtatggtgaaaaattactttttctgcagtgcgccctgcagcatgatgtcgccgaaggacagggcgttgtacaggcccaccttattggcctggcggacgatgcgctccggcaggggcttggtgtcgtctgtggaaagcaggacgatgtggaccttatcggccacgtcgacgccgttctctttggtggtgctgagcacctgcaggtacactacgtagggatcgctcatcgagccgtagtagatatcgttgccgcagcgcaccagcgggcggcctttataggtcagtttcggggtataagccatggctgaaaccttctttcttcgtgttgtctaataatacattatagcatagatgcagttgtattacaaatctaatttttcccgctcgactttttcctcgttgagggcgacctgctcggtcaggatacggactttgctgtccagctggctgaggcggatggacatgaagaactgcttggccagcagcaaaaagatgatgactacatacacaaagttgatggggctcatgaagcccagcaggttggcggcccagtaggcgatgccggggaagatggccaaaatcagcaaagcggcgctgaacagcagccagaagatcgtatcctcgatctggacttttgcctggcgcacgcggcgcaggatgtaccacgctgtgaccaggctgccgaagattaggcagatgcggataagcgtttggtcgaacatttttacaggctcctttcgggatacggggtcgcggtgtcgcgcttgcggaaccactggatcagcaagatggagatggacattttgaccatatactgcacgctgcgccagaacgtcaggtagctttggccagcggtgcgctcgcccatttccacctgcacttccttgactttggcaccgtttttgatcaggtagctgatggtgtccggctcgggaccgtagttcaggttttgggcaaactcctgcatcaggcggcggttgaacatccgcatgccgctggtggggtcgcagatggcgcggccggtggtgagccggatggaccagctgatgatgtagctgcccagcatgcgcagggtcttgggttttttcacggtcaggaaccggctgccgatgacgatgtcgttgccctcctccagcgcctccagcatgggggcaatgaactccggcttatgctggccgtcggcgtccagctgcatggcgcagtcgtagtcgttctcggccgcatagcgcaggccggtctggaacgcgcccgccagccccaggttgaccggcagatcgatgagccggtagccgtgggcgcggcagacggcggcggtcttgtcgcggctgccatcgttgacaacgacataatcatactggggatagtgggtggtcagttcctcgaccacggaaacgatgctttcttcctcattataagcggggatgacgatgagtaatttagacatcttagctccttttggctgcttgggccgcggttttctccattgtagcaaagacggcctgccatgtaaagtgggcgcacaggttggtgtaagcggcgtcggcccgggtgcgggcggcgtcgggatctgccaggaccgcctgcagggccgcggccagcgcggcaggggcggtgctttccaagtaggcagcgtaggtcccatcgggcagcagctcgccggtgcccgccgtgtgggtggtgacgatggggcagcggcaggcggcggcttctaataacgtggtggggaagccctcggcgtactccgtcggcaggcaatagcaactggcttgcgttaacagctggacgatctgcgggtggggcagggcacccagcgcgtagatgggggcgccgagctggcgcagggcgttttcctcggggccggtgccggcgatgaaaagggcgcaggacgtgccgttttggtttagctgccgcacggcttcggccagcttggccgcgcctttttcggggatgagccgccccacaaaggctatgatgggggtggcgggggcgagatcgaattctgcccggaagtcgcgggggtggtcgctggctaaggcggccagttccgccgggtccacggcgttgggcaggcagccagcggcggtgatgccgaaggtgcgcagccagctgcagacatcgccggagacgccgtagaaggggaacctgcaggctttgataatattgcaggccaggtgctcgtacattttgcccgcaaggcccgccgcgccgccgtgcatcatatagccggtggagtggtccagcaccagcgcggggatgccccggcgcttgcactgccgcgcggcccagacgctttgggtgtacatgcgggtctggatgacggcaaagtcgatgccctgcgcccacaggtccgctgcgggcgggtggggcttgaggaccggaaaccggccgttcatcaccggccaggcgggcaagcgccagatctcgatgccgtcggcgtccgtttcccgcgcgggcagaccgggcaggctgctggtgaccaccagcgcccggtgcccggcagccaggcatcggcgcgccaggttccaggtgtaccgctcgaccccgccgggagtgggcagatattgggttgtgaaaaagcagaaagtcataagcaggtgtcagcgggcgatgaccgccagcataatgttgaggatgacgccccactgtaccagcgccagcgcgccggtcaggcgggcttgggcagaggcttcgtccggcacggcggccaggcggcggggcaggcaggtcagcagcagggcgggcagcacgggcaggaaataccgcccctgcaggccgtacagggtctcgtaatgggtgggagtccacagcaggcagccagtcacggccagcaggcagctcaggacggccgccgccgcaccaaagccccgcagcctgcccgtaggcagcttgccgttttgggcgggcagcgccgcataggccagcagcaggtagagcgccaccacccagaaccaggccagatccagcgtgtagtagcttaggctgccgcctaccagcgtgcgcaggtaatggtcgccgttttgcacgatgctgcgcacaaacagcagggcggtggcaggcaggtggtgcaggatgtagccgggggtgtaggtggcttcgtcggcggcatcggtcacactttgggtggcgcgggtggcgcgggcagcttccacctcggcggctacggtctcgcggtccagcgggatgcggtcgtccatggtgcctacgtccagccccagcgcggcgaaccgctccacgcaggtgggcaggttaaacagctgcttgtaggcctgcatggcaccgccctcggcaaaatagggcaggtaggcgtcggcgttgccggtggtgacatcggtgcccagcagggcgtaggaggccatggtgtagaaagcctgcgcatcggtgtagctgttggctttgtcggtggtgaaaatgaagctctggcccagcacggcgggggtgacgtccccctcagcgagggcctgcacccagaagtccacctcgctctgggcggggtcgcgggtgtccgct

SEQ ID NO: 7911 - DNA, 8945 bp, Unknown
  gut microbiota DNA sequence
cggctcagccggggcgtttttggcgctgcgggcgtcgtcggaggtttcctcggtgacagctgccgcgttgtcagcggcgggggagccgagggcaccggtgagggtgccggtgttcaacaccagcgccagcgccaggcaggcggccaggtagcccatctttttcgctttggcgtggtggcccagcgcggcggcggggaccagcacaaacagcgcggccaggggcagatagaccatcttgcccggggccagcaaaatgccggcgacggccagtgcggccatgcgtttcggcgtgggctggccgtagacggcatccagcaataaggccgtaaagccgaagcacagccccagcagcacagcgtcgcggctgaagctggcggcgaggtgcagcgtcatgggcagcagggccgccgcagtaaagatgcgcttgccgcagggcgcagccttgacggcgaaggccgccagcaacgaaaacacgataaggtttgccagccgccccagcgccagcgccggggtaaagcccaagtgcaaaagatacgcaaggaacaccgcaccgccgctggccagatacaacagcgggttctggtcagtctgcagctcgtggtattcctgatgactggtgtagggggcgtcggtggtggtgaacagcgtgtcggtgaactcctgccaggtgaagacggtggtattttcgtcctgcaaaagctcgtcggtgtcggtctcccggcggaaactggtggtggtgggcaccttgcccatctgccagtcatcgtgggagatcatattggcccacttggtggctaaggtaaagctttggttgatgtggtacttttcatccggtgcagcgtagggcggcagaatgaccgagtagatgaggccaaagcccagcaccagtacaaaaacaaggcggtgcagcgatactttgcggctgaggcaggcatacacggcaaaggccgccagcagcgcggccgtgccgcccgccagcaaaaagaaccgcgtcaggtagccgcccatgcgctggtaggtcacctgcatggctaaagtaccgtccaccggctcgccgttcagggtcatctgctctttccagagggcgacgccgttgctgtggccgatggcaaggactgcatccgaggtatagtgcgccgtgacggacagccggtagcggcggccctcctgggcgggcacgacgggatccagccccagggtggtgtactggtccgggatgatgttttgcatcacgccggtggagcgggccagttcctcgccggtgtcggcgtcggacaggatcacttccagctcaccctgcggctgggcgccgggcaggtagaactccagcccgatggtgtagagcgccttgtcgtaggtaaagacctgggcggcggtgtcgccgtctgccagcagctccgagcggtcgaagttatcgcaaagggtctcggtacggcccttgcccagctgggggcgcacgacggccagccagatgagcagggtagatgccagcaggaccaccagcgtaaggagcgcggccgggagcgggcggtatttggttttggtgttgggttggggcatgggggcctccggatcgtagagatgagagagcctccctttgcacaagggggccttttaaagggtggtagaaattacacgtctacgtgaaacgccgctttaacggcatcgtgccagcggccgtcggtgcgcagaatgtgctcgaccgcaccgcgaacggcaccttcgccgccgcgctggggacactggtagtcggcgcgggcctttacttcgggcgcagcatccgccgggcaggccacaaagccgcacagcgccatggcagccaggtcgttcaggtcgtcgccgcagtaggcgatctcctcgcgggcatagccgttttcggcaaaaaaattctgcaaaaagtccgccttgtgggggacgttctggtaaatatcggtgatcttcaggtcggcagcgcggcggcggacggcttcgcactcgcgcccggtgcagatcatcacgcggatgcctgcggtacgggccagcaccagcccggcgccgtctttcacgccgaactttttcagctcgttgccggtggaatcgtagtagatgccgccgtcggtcagtgtgccgtccacgtccagcaccagtaaacggatcataaattacgccctttcgtattcgctgggggtgatgaagcgcaccggcagcccggcggcgcggatggccccggccagctgggcgttgtaggcggcgccgcgccccgtgtgggtgtgcaggcccgtgtccgcgtaggcggcagtgccgggacggtagccgtcggcgcccgccagcaacacttcagctgcattgcacaggcgcagcagccgcagcagcatcagcacactgttgccgccctgggcatcggtgccggaaagccggtcgtagttgacgacggtggcatcggcagcagcgcgcaggttgctggtcagaatcagcgggcaggggtaggcggtgctttcgtcaaaccgcttggcgttggtgaaaaacgcatagtccggctttacaaagtccggcacaaagttggccgaaatggtcacgtcggcgtcggcggccgccacggcggcgcggccttcctcggcagccagggtggcaccgggggccaggatcagcacccgcttgcccgcaaaggcagtgtgcagggcggcgagggcagcttcgtcgtcgatgcggcggttcttgtactcggtgtagagcttgtccgcgtaggcggcgtcgaaggcggtctttttgccgggggcgatggcggccagcagatggttgatgtcccggttggtcaggtcgcccttgtggaggtaatgctcggcgtaattgcggtgcaggttgaaccgggcggacaggaagtaggccggggaatagccccaggcgctttcgcccttgatgggggcaatgtgatcctggatggcgtccatgatctcatccagatcgtagtgggtgttgaggttttcgttgcagtagtcggccaccagttccagcggcaggttgccgggggtgcggcccatgccgttcaggctgccgtccacggtcttgtcccgcagcagcggcctatcgagaaactcctgcgccaggcagaagctgagggccatgttctcatgcagatgcaggcccagccggatatcgggggccaggttatggtcagcgaggctgacgatacgctctaaatcccggcggcgcatgctgccgaaggtatccacaatggagaactgccacgggtggatagcgttgacctggtcaaagatccacagcaggtccttgtcggcgtagcccataatgttgatggggttgatggacagcttgtagccccgggccttgacctcgcgggcaaagtccatgccgtcgcggatgtcgtagtcatgggcggtgatgcggatgatctcgataccgtggccgtcatagggggagagcttcgagatgtcgtagttggagcgcatggccatgccggagtagatggtgtggccgcgctgggattccggcggcagcaggcggttcagctcctcgatggtgttgcagacggtgacgtcggggtcgtagccgtccacattgcgcaggaagccgacctcgacgatgtcggtgccggcacgggtcagggattggatgatgcggcgggcggagccaaggccccagtgccaatcgttgatataaccgccgtcacgcagggtgcaatccagcagttttacatcagccatgctgtttctcctttaaaatcgtgttgacaagggccagatccttgggggtgtccacgctgacggtcttgtaggggcttacgatggcgtggaccttgtggccattctcaataaagcgcatcatatcgttctcttcggctttttccaggatggatttgggggtggcgtggtagaacgccagcgcctgcttgctgtacagctggatgccggtgaccttctcgtactcgaagtcgagggtgcctttcgggtaggggatggggctgcgggagatgagcaggatctcccgcgccgcattggtgacgaccttctggttggagaagtcgatgacatcggcgggatgctccataatgttggtgaggacggcgacgtagcaggggtcctcgggcagggtatccggcaggatgaggtcaaaggcggcggggttgaccagcggctcgtcgcccatcagctgcaggtaaaggtcggcatcctcgacggtgctgacctcccagatgcggccggtaggggtatcgtggtcggggctggtcatcagatagcgcatgccgtaggtcttgcaggcatcggcgatgcgctcgtcatcggtagcaatgaggacgtcgtccagcttggggcaggccttggcggcctggtagacccaccagatcatgggtttgcccagcacatccgccagcggcttgccgggcatacgggtgcttgcataacgggcagggatcacagcgattgttttcataaagatacctcgctttgcagggcgctgccaattgtctggcatacgccgggaaaatttttatctatatccagattggtgaagcgtaatacggtaagatggttggcggtaaaatacgcagtgcggcgggcatctgcctgctgttgttccggcgtataatgctgggaaccgtccaattcaacgataaggcgggcgctggcacagtagaaatcggcaatgtagccgccaatggccttttggcgctgaaatcgcacaggacagttgcgaagatagttataccaaagtttgcgctcccacggtgtcatgttcttgcgcagatgccgcgcaagaggaatgttgcgtgggttgtaggtgcgcatgggggcctccttgggtgagatagagaatgagactctggaattggcggacgcagaatcacagccgcgcagcgggagaccccgtcggcgggcgggagagacagacttacggattaacggctgctggatttgctgtctctcccttgcatgcctccaacggaagtagcagctaaaggcactgtctctcccccacccgcctccggcgggagccccctcgcagagggggcctctctaacgctctgcaattttatagtagtcgtctaaaattgtagaggaatctagccccaacggggctgtttcggaggaggatgcaaagacgttaagaaaaacgcagcactcctgcgttttttagtctttgcattctccgacctcatcttcggggttcctaggggcgtgcagcccctagggcggggtccgctgcctcgcaacagcgggacttttttcgcatccttttttggtcacaaaaaaggatgacctgacggcaggatgccgttaagaaagagagagcgggcgcagggtgcccgcgaacggggggcggacatttaattcaaaagagcctgggcctcctcaagggagagaagaatcttctcatccgccgcagtaaacgcacgaagcacaaagctttggaccgtgacggcgcgggcgaatttgaagggaaggcagaagttcagcacttcgctgggcatcgtgcgctctaagatcaccgcgtcggggaacagggcgtggtagtcggtggtgtcccgcgggtgggtcttgatgaacagcggcccggcggtgtatttggcggcgaccgctttgaacatcgcgttctgctcagcttgtgtcatcaggccgtcctccacaaagctgcggggcaaaagcagggtggccccggcggcattttcaggcaggggctgggtgagaaaaacactgcgcaccatcgttttttcggcgtcggtcaggctttccagcagttcgcgcttgctgtcggttaccaagcggctggcggggaacagcgtgcatttcgtggcgtcctcgctttccacttttgcgcaccaagggctgtcgccccagtaaaggtagccttttccggtgcgccgcttcccggcaaaatcgggggcggcgcgctggtcggtgacaaggtgctggtcggggccgagggtgctggcgaaggtgtcctcgcacaggatatacccggcatggcagtcctgcaggtagcggcccagcacgctccaatcgttgtggatgcgcacctcgttataggcggcgcgggtaaagcgccagccgcacagcttctcgaacgcccggcgggcgcgccgggcggcgaagggaccggtgacggtgcccggccagcgggtctcgtccacgataacgactttgacagcgccggtggcctccagctttttagccagagattgcggctccggcacggcggcggaaagcaccatggtgtggggctggccgtcagtgcgggaggcccgcagcaggtcgacaagcacctgataggcggtgtggcagatgtaaagattcggcttcatgaaaaattattctccgtccgccagcagcttgaccggcgggaagtggatgcggccccagccggaggcccactcgggcatggtcaggtcgctgttggtgacctcgaaggcaaactcggtcacgggcttgtccaggcagacggcctgggccagcgcgccatcgaagatgtcgaggtagaagaaatactggccctcgcccaaaagacttgggtcgaactcaaacaccgtggtgtagagtttgcccggctcggcggcgcccaggtccaccgggtgggtgatgcccacggggctggaatcccgcgcgtggaggttcatcttcatgtggatgccggtgaaaggctcggacacgcgccaggtgattttaattttcatcttctcggtgtcggcaaacacgctggattccttgcccacaaagtcgagggtctccagccgcaggcgcttgccggcgctgccggtcatgcgggccacatcagccaggtcgtagtggacgacgttaacgtcggtagtgtccatgtagacggcgatggcctgttcgacgtcgccgtcgaagatgaccctgcctttatccagcaccacgcagcgggtgcacagctggcggatggtggacatgttgtggctgacgtagagcacggtgcggccgtcctggttggcaacatcgctcattttgcccaggcatttctgctggaacttcatgtcgcccacggccaggacctcgtccatgaccatgatctcgctgtccagatgggcagcgacggcgaaggccagcttgacgaacatgccgctggaatagcgcttgacgggggtgtcgatgaagtcgccgcactccgaaaattcgatgatctggggcagtttggcgtcgatctcggccttggtcatgcccaagatcgcgccgttcatatagatgttttcgcggccggtcatttcgttgttgaagccggtgccgacttccagcatggaggccacgcggccgcgaattttgatctcgccctcggtgggggcggtgatgcgggacagcagcttgagcagcgtggatttgcccgcgccgttgcggccgatgatgcccagggcctcgccctggtagacggtcaggtccacgccgttcagtgccataaaggtctggccgaagaggcgctggtcggtgccaatgacggtgttggggtcctctttgccgcggacgcgcgcccaccagctttgcaggtcgtgggtcagtgtgccgccgccgatctggccgagtttgtactgcttttttaaccccgtgacttcgataacggggcgtttttcggttgtagtcatcttgcgcccctccttacacggtatccataaaggtcttttcgatgcggctgaacagcaccacgcccagcaccagcgccgccgcggtgaacaccaggctgtacacgatgccaaaggtggtgaccgtgccggtacccagcgttgccatgcggaaaatttcgatgggcgaggtcatggggttgagctggaccagaactttcaggcgggggctggattccaacatggacagcgggtagaccacgggggaggcgtacatccacagctgtacgccgaagcccacggcaatggcgaggtcgcggtacttggtggtgagcgacgacacgatgatgccgacgcccaggcccagcagcatgacctcgaggatgacaaagggtatggccagcagccacagcgtgaagtgtatgccgctgccggtagccaagaagtaaatccagaagatcaggtacatggccgcctggatgaagaagttgatgaggctggtcagcacctggctgacaggcatcgtcaggcgcggaaagtacaccttgccgaatatctgcgagttggtgacaaaggtgttggccgtgttgttgacgcagttggcgaagaaagtccacaaggtgttgccggccatgtaaaacaggaaaccgggcacgccgtcggtgggcatattggccatgccgccgaacaccacgttgaagatgatggtggtgataagcgggttgaggatgatccacgcggggcctaaaatcgtttgtttatacagcacggtgaagttgcgcttgacgaacatcacgataaggtcacggtattgccaaagctcgtgcaggtcgatgtcaaaccacccggttttggggcggatgacggtcgtccagccatcggcagggagggtatgattgttttcagccatggagggcaccttttccttttatataatgggcgatagtttgcatactgatagatattatattttaccatgaaatgggggaaaaagcaactgaccgtggacgagaacggtcagtccgtgacggtgaaaggcaccgatggtactgtgtatgtgcaggggaccagtgatgtgaccgttactgtggggagctacagcactaatgtggatacctccggtgccgccaccgccgacagctggtccgactacgccgtggacaaggcataaaccaacgtagtaaatttcagcataaaataagccctgcaccggaacctacagctaccggtgcagggcttattatggtataatgaagaaaatgcggaggtacccctatggtactgcctcctcaggaatgtatttttttgactgttgcaggtgttcgtgcgtttataacagtcagataaatcggaatttttagaactaaggaggaatttatga

SEQ ID NO: 7912 - DNA, 443 bp, Unknown
  gut microbiota DNA sequence
agggcttgctgtctgtgaattgcaggcggcaagccctttagctttgccttgatcctgcggttgttgtagtaatctagatattcgatcagttccagtttgaagtgttccatggagcggaactcctgcaaatacagcagctcacttttgagcagcccgaagaaattttctatcacagcattgtccagacagtttcccttgcggctcatgctctggcgaacacctttctcccggagcatctgttggtattgtttgtgttggtactgccagccctggtcagaatggagaatcaggtttgtttcggccgggatctttgcaaacgcctcgtccagcatggtggttaccatggtgagtgcaggacgatccgatatggtgtaactgaccagatcgctgctgcacagatcaaggatgggagagagatagagcttctctccaaacaaactgaa

SEQ ID NO: 7913 - DNA, 155 bp, Unknown
  gut microbiota DNA sequence
gtgcaagcgttgtccggaattactgggtgtaaagggagcgcaggcggaccggcaagttggaagtgaaaactatgggctcaacccataaattgctttcaaaactgctggccttgagtagtgcagaggtaggtggaattcccggtgtagcggtggaa

SEQ ID NO: 7914 - DNA, 3634 bp, Unknown
  gut microbiota DNA sequence
ctatccaagggaaagtaagatgtttactggaatctgcatagcttattttcccgatatgaaatagtctcccatatttcaaggtgaattgtaatatctaaacagaatatggtaaaacatattatcaaataaagagcgccgcctccacagactcgtgggagcggcgctttaccgctattgttgcttttcattaacgatagacttgtacttcattaacgaagtgttgtaataaatattaacgctagagttgaaaaattcctttctgattccctgatggcaaaaagaccgcctccacctttcggtagaagcggccttgcttgtttaagatgttttgtcttatttaagatataattgtagatttacattacaaaaaatgctgtttacagatgcagcacgcggtccttgatctcggcggtgcggccttggttccagaactgggtgccgatgtagccgcaggtgcggcgggcaacgttcagcttgttctggtcgcggttgtggcacttggggcactcccaaaccagcttgccgtcctcctgcacgatgctgatctcgccgtcgtagccgcacacctggcagtagtcgctcttggtgttcagttcagcgtacatgatgttctcgtagatgaactgcatcaccttgatgacagcctcaaggttatcctgcatgttgggcacttccacgtagctgatggcaccgcccggggacaggcgctggaactcgctctcgaacttcagcttggtgaaagcgtcgatcggctcggtcacatggacgtggtaggagttggtgatatagttgcggtcggtgataccgggcaccaggccgaagcgcttctgcaggcacttggcaaacttgtaggtggtggactccagcggcgtgccgtacaggctgaaatcgatgttgtgctgctctttccacttggtgcaggcatcgttcatgtgctgcattacgtgcagggcaaagggcttggcggcggggtcggtgtggctttttccggtcatatatttgcagcactcatacaggcctgcgtaacccaggctgatggtggagtaaccgccgtacagcagcttgtcgatgggttcgcccttcttcaggcgggccagggcaccgtactgccacaggatgggggcggcgtcgctcagggtgcccttcaggcggttgtggcggcacatcagggccttgtggcacagctccaggcgctcgtcaaaaatcttccagaacttatcaaagtcgccgccgctggacagggccacatccaccaggttgatggtgacaacgccctggttgaagcggccgtaatacttgggcttgccgttctcgtccacgtagggggtcaggaagctgcggcagcccatgcaggtgaagcaatggccctcgccgtttttgtccaccttgtactccagcatcttcttttcgctgatgtagtcaggtaccatgcgtttggcggtgcacttggcagccagcttggtcaggtagtagtagggctggccctcgtagatattgtcatcctccagcacgtagatcagcttggggaaggcgggggtgatccagacgccggcctcgttcttgacgccctggtaacgctggcgcagcatttcctcaatgacgatggccaggtcggacttcaggcgctggttgtcgccggcctcgttcaggtacatgaacacggtgatgaacggggcctggccgttggtggtcatcagggtgacgacctgatactggatggtctgcacgccgcgcttgatctcctcacgcaggcgcttttccacaatctcagaaattttctcctcgccgggatcaatgcccagatcgcgcatctcggcctcgacatcgcggcggatcttcttgcggctgacgtccacgaagggggccaggtgggtcaggctgatgctctgaccgccgtactggctggacgccacctgggcgatgatctgggtggcaatgttgcaggcggtggagaaggaatggggcttctcaatcagcgtgccgctgatgacggtgccgttctgcagcatgtcgtccagattgaccaggtcgcagttgtgcatgtgctgggcgtagtagtcggcatcgtggaagtggatgatgccttcctcatgagccttgacgatctccggggggagcagcatacgcatggtcaagtccttgctgacttcgccggccatgtagtcgcgctgcacgctgttgacggtggggttcttgttggagttctcctgcttgacttcctcgttattgcactcgatgagggagaggatcttgtcgtccgtcgtgttgtgggtgcgcttcaggctctgcacatagcggtaagtgatatatttacgggcaacctcaaaggcgccggtctgcatgatctcatcctcgaccaggtcctggatctcctccacgttcatggcgtggccgcgggacagacagctggtctgcacatggtcgctgatctcgatgatctgctctttggtcaaacgctggctttccggcacgacatggttggccttggtaatggctgcaataatttttgtaatgtcgaagacggcctcactgccgttgcgtttgatgattttcatgctgacactcctaacactgatctatctgaaatatacaaactgtatacaagttccaaacgtacaaactccgtttggcgagcaaatctatcttatcgcagcgggggaaaaaagtcaagggagaaaaccactatatatagtggtgctaaatttcgacacgacaaaatattgcatttcgaacgttccaacgatgaaaatgccgcggctacaaccgcgtagaaaataagcctgtttttttggctattttggggagatgttgccaattgacaggatttgcgtcgatgcagcgcgaaatatcgcgcgctctgcgtcggggtggggcttgcagtgggcggcataaactggtatactgttagcagatattgaatcaccctggcacaaaaacacaagatgttgagacgatactgcatgtgccgtttataaggagagccttgccccatgaactatgcaaccatcaaatactgtgacatcgccaacggcgagggggtgcgcaccagcctgtttgtttcgggctgccgccgccactgccccaattgctttaacgctgtggcgtgggattttaactatggcgagccttttaccaaagaggtccgcaacaaaattttagaaagcctggccccgggctacatcaacggcctttcgctgctgggcggcgagccgttcgagccggaaaaccagcgggaactgctgcctttcgtcaaaaacgtcaaggcgctgtaccccaacaagacaatatggtgctataccggcaaccattttgagcaggaaattttgcggcccggctgcggccgctgcgaggtgaccgacgagttcctacaatatatagatgtgctcgtggacggcgatttcgtgcaggacaagtatgacatcagcctgcggttccgcggctccagcaatcagcgcattattgatatgaaccgcacccgcgctgccggtcatgtggtgctgtggcaggatgatccaatcttcgcggaccacaagatgtagtacatacaagcccgtatagcaaacggcccccgccaggaatctatcccggcaggggccgttttatgcgcagattaaggcaacaccgcacaattccc

SEQ ID NO: 7915 - DNA, 3182 bp, Unknown
  gut microbiota DNA sequence
gtctatttgcaggccgatggctttatgcttcgcaagccgtgggatgattcccgtatcccgccggaaaagcggcatcttctgtacgaaaactaccacccgctgttcatctaccgccagcgaatgagcaagcaggccgatgccatcatgggtatgatgctgtacagtgcgctgtttaccgatgaggaactgctgcgcaattacgacttctatcagaccgtaacgctgcatcattcttcgctttccacctgcatcttcggtattctggcaagccgcatcggacgccacgaggacgcctatacctattttgcccagtctgcccgtatggatctggatgattaccatgacaacttctacgctggtatccatgccgccaatatggccggcacctggcagagcattgtgtttggctttgctggtctgcgtcttgtaaacggcgtgccggagttcaaattctatattcccgaagcatggaacggctatcacttcactgtgaaaatcaaacgatccgtgctggcagtggatgtgctgccggatggctggaccatcacgctgcaaagcggcgatgccgtcaactttcttgtcgagggcaagccttacaaactgaccgagaaaggggcaacctgccatgaagcactataaagcaatcttttttgattgggacggcacagcggttctctcccgcaaagcgcctgtggaggatgccgtcaacgccatgcgcccgctgctggataaaggggtaaaactatgcatcgtcagcggcacgacctacgagaacattgcaggcggcaagctgcacagctactttacgccgaagcagctggaaaacctgtaccttggtctggggcgcggtgcgttcgattatgggtataatacggctggcgagccgacggttcttgtggatcgtgtaccagatgctaaaggcatccttgctgtacacgatgcctgctaccgcatccaccgcgaactgctggagaagtacggcatgaataccgatattgttttcagccgaccgaattactgcaagatcgacctgatgcctgccaacaaccgcggcgaaaatctgttcttacaggagggcgaggctgcccgcctgcagcacattttgcagcagcacggcattgacagcatcgaaacggtcattgcgatggcagaatccttcggtacggcggaaatgccgctgcgcgctacaaccgatgcaaaatatctggaggtcggccccaccggcaaaagcgacaatgtcgatgctctgtttgcccgttttggctttgctgccgaggattgctgcttctggggggatgagtttatcggcgttacggattccatcttcggcagtgatgccggtatgctgaccgaaaagaccaagagcggtgatttttacgatgtctctgacctagagggcgtaagacccgaacaggtaaagcatctgggcggtgggatccagactttcctggagttcttgcaggcgcagtaaagtacctttcccctatccattaaagccaaaaaagttgccgcgtgaatgaggtcattcacacggcaacttttatattgtctttatttttatgcggcggctgtctgctgcttttgcagctgggtcagctcgcgaagctcacggagggtgaagaagccgcagacaatggcggtggcggcatcggcgatggggccggcgtacataacgccatcgatgccgaagatgagcgggaaaatgacgatcagcggcagcaggaacaaaatctgtcgcgtcagcgacataaatacgcccagctgcgccttaccgatagagctgaagaaattggccgtgacaggctggatgccattgataagcgtgaggaacatatagatgcggaagtagcgctccgagaactggaaatacatctcactgcctgatccgaacacgctgatgatctgccgcgggaacagctggaagcagagaaacgcgatcatcgacagcactgtggccgtacccagcgccagcaaataggtgtgcttaacgcggtggtacagcttagcgccgtaattgtagccgatgatgggctggatgccctgcgaaatgccgatgacaaaggacatgaagatcatgttcaccttggagatgatgcccgcacaggccagcgggatgtcgctgccgtagaccgagagtgcaccgtagtgggccaacgtgttgttcatgacgatctgcaccacggccatggccacctggttgaagccggcgctggcaccgtagctgcaaattttgcaggtgcggtcccaggaaaggcgcaggcaatccttgtgcagcttcacggttttaaagtggaacagataccgcagactgatgcagaacgagacgatctggccaataatcgtcgccagcgccgcgccccgcatgcccatgttcatgccgaagatgaagagcggatcgagaatagtgttgacgatggcacccgccagcatcgaggtcatcgagtagcgggggcttccgtccgccagaatcagcttactgatgccggtgttggcgatgaggaacgggaacccgatagccgtgatgcgggtgtattcctcggcatagggcagcacgtccggggttgcgccgaagaatttgagcatcggcgttaaaaacagggtcgtgaccagaaacagcgcgatgccgcaaattgtcatcaggcataagccggtgccggcatactcgacggccttcttttcctcccctgcacccagatgcagcgagaagttggacgccgcaccgatgcccagcagtaaggaaatggccgtacaggcaatggaaagcgggaacgcaatgttggtagccgcattgcccagcatgcccacgccctggccaatgaagatctggtcgacaatgttatacagcgaggtcaccagcatcgagatgatgcagggcaccgcaaagtcaacgatcagcttgctctctttctccacccgcagcggatttacttcgtcgttttccaccgggcgggagatggttttttctctcatagattatccccttgtctttgcgcttttgcttgtgatttattgcagcagataatgagcggcagggcaaccataccctgccgcaaaataactctgttttagtataccctatattccctcaaaatgcaacggccgttatagccgctgccttatgctgcgcataacaactgcctgccgcgggtacagcggcaggcagtttgatttttgcgttatca

SEQ ID NO: 7916 - DNA, 234 bp, Unknown
  gut microbiota DNA sequence
aagaaactgcaaattgtctgccccaagcaaaccgatgacctcatcgcagaaggacaggctttgcaccactgtgtcggcacctatattgagcgagtggcagcgaaaaaatgtctgatcgtgtttgtccgccgcgtggaagaaccaaaaaagccgtatgtgaccgtggaggtgcgcaatggtaaaatcgagcaaatccatggcgaccacaacagcgaccctacggaagaagtaaaa

SEQ ID NO: 7917 - DNA, 1251 bp, Unknown
  gut microbiota DNA sequence
gagcagcagcgcggcgaggaatatcgtcaacagcttttattccgccttgtgacaggaacaggcttggggaaagcacacattacggaagaatggttttctggacagacgctttgcttacttcatgtgcagaccgagaatgactactttgctaccaatgaagatgcgttttgtcaaatgctgaaggattgtacgcaatataagtttgaatacatcaatacttacccagatgaagcattcgtcctcttttacagcaaatatgatttgtctgatcgtctgggcgataagctgaaagacatacaggaaaaactccggcagaatggctgcgaggcatcgctgctgttgggcatagatttcaccggcttggagaatatctctgcccgtgcgcaagcactgtcaagaattcgcaacgaactgtatgaagcacccgatgcgctcctgctggagaaggagatcggtgagtcggtcagctactatgcagaagccatagaaaagctccgtgccgaggtgcaggccgcattgaatgaacatcacccggagatttttctgtccgcggtacaacgcctgatacagcagcttgggcagaaccgttctttgagcaagatgtatatgtatcatgtcctgtatgatctgctcgcgcagatgtaccgtgcttatggcatacaggaccgcaacgagattgggcgcggtatcaatcggattttaagctgtaatacggcagcagccatgtgcggtgtgctggaagaaatcatggcatctttgcagggaacaccagaaccgcaaacggaggacagctccgctatcattcgtcaggtgcagaaaattgtggatgccgaatacggcgaaccgttgagtctggaatacatcgcggaaaaagtatatattacgccttcgtacctgagttacatctttaagcagatgactgggcagaatcttatcaaatacatcacagacctgcgtatgtacaaggcgcggcgcatggtagcagatggcaatttgaaaatttcccaaattgctaagaactgcggttacgacaacccctcctacttcaataagctgttcaagaactatttcggcgtaacgccccgtcagtacagggagggcgaacgcgatgaaagcattgtataaatggttcgcctataagctgcccatccgcagtaagctgctgatcagcttcagcattctggttatggtgccgatccttgtgctgggcatttacagctaccagcagtcgaaggaaaacaccgagcgcca

SEQ ID NO: 7918 - DNA, 4746 bp, Unknown
  gut microbiota DNA sequence
ctgatcttgtcggaggtgttcagctccaatatccaggcagcattgccgactttcagcagcttggcccgtctggctttgacgagcggcgcagtggcactgctgggcgttaagatttttttgctgacagactacgaggcccgctggcagccgattttggcggcgctggtgctggcctacacggcttttgccacctggtacggcgatgatgtgtggtttttcttggccgcactggtagggctgggcgcgaaagacatcgacataaaagccgcccttcgcgtctatctggctgcagccgtagcgggcctgctggtggtgcagctgctgcactttgctaccccgctgatgccctacaacttctactgccgcaactgggatttcggctacggccactacaacggcttcggtgcgcggttggcgggcgtgttcttcgcctggggctggctgcggcacgataaactgtgcgctatcgactggatgggcctggccgcgctagctatttttacctacaaggtccccggcagccgcggcgcattcggcggtatggcggtcatgctcctgctgttcgccgtgcagaaattcttccccaagctgtttgataacaaaatttggtacgcctttgtgctggctgtgccagtgatgctggtggtgttcagcctctacgccgggtacatttataaccccgagtggccctacgaccacatggcgattctgctgctgagcatcttcctgtccggccggttcgagatttggcacaacgtgttttggggttctcccctcaccctgctgggcggtctgcctactgacggcgacgagcaccacgccattgacaacaccttcctggctgtgccgatgaacaagggcatcctgggcgctattttggtggcggcgttcttcctgctgctgctctggcggttagccaaaaagcatcgctccaccgagacgatctgcctgctggccttaacgctttatctgttcatggaaaacaagcctttcctcctctctgccaatccgttcttactgttggcgcccatcgtgttttttggcggggtagcggcagagaaaaagccggacaaaacctgacctaaaccaaaaaaacagccccgccgtttggcggggctgctgctgtttataagggtaaaatcaacggttctgcgggccgtttttcaggatgacgtcgtggctgccgccctcaacgatagaggtagaggaaacgacggtcaggcgggctttctcctgcagctcgggaatggagagcgcaccgcagttgcacatggtggagcgcaccttgtacagggtggtctgcacgccgtcggccagggggccggcgtagggcacgtaggagtcaacaccttcctcgaagctcagcttctgggcgccgcccaggtcgtagcgctgccagttgcgggcccggttggaaccctcgccccagtactccttgacgtagttgccgcccacgcgcagcttgttcgtgggggattcgtcaaagcgggcaaagtagcggcccagcatgacgaagtcggcgcccatagccagggccagagtgatgtggtaatcctgcacgataccaccgtcggagcagatgggaatatagatgccggtctccttgtagtactcgtcgcgagccttggcaacctcaatgacagcggtagcctggccgcggccaatgcccttggtctcgcgggtgatgcagatggagccgccgccgatgccgatcttgatgaagtcagcgccagccttggccaagaagaggaagccctcgcggtcgacaacattgccagcgccgaccttcaccttatcgccgtagttctcgcggatccaggcgatggtgcgggactgccactcgctgaagccctcagaggagtcgatgcagaggacatccacaccggcgtccaccagagcaggtacgcgctcggcgtagtcgcgggtgttgatgccggcgcctacgacgtagctcttgttctcgtccagcagttcgttgatgttctccttgtgggagtcatagtccttgcggaagaccatatactgcaggtgaccttcggcgtccaccaggggcagagagttgatcttgttgtcccagatgatgtcgttgcaatcatgcaggctggtggtgtcgggagcggtgaccagcttgtccagcggggtcatgaattcggtgaccttgaggtccatcgtcatgcgggacaggcggtagtcgcgggaggcaacgatgcccagcagcttgccgtgggccgtgccgtcatcggtgatggccacggtggagtggccggtgcgggtcttcaggtccagcacatcgccgagggtagcctccggcggcaggttggagtcagaagtgacaaagccctttttgtaggccttgacgcggcggaccatgtcggcttcctgctcgatggtctgagagccgtagatgaaggaaacgccgccctgcttggccagcgcaatggccagcttctcgccggaaacggactgcatgatggcagagaccatcgggatgttcatttcaagagggcaatcctcctcgcccttgcggtacttgaccagcggggtcttcaggctgacagccgtggggacacactccgaagaagaatagccggggaccagcagatactcaccaaaggtgcgggacggttcagagaaataatatgccatgttacacgctcctgactcctacaatttcttaatcttactgattagaaagattgtaccacattcgcggacaaaatacaaaaccttttggcgaaaatctttcttgcaccgcaaaaaagaaagttgtggatattgcaccaaagattttaagggaagtatgactttgacatgcgatgatggaaatcgcgcggaagatgcaggggcacggaacggctttattccgtcgtcgtcagcaccacatctcccatcccggcggtcaaggtcacgcggcgggcggtggtaggcgtttggctgtagctggtgctcagcgccttgccgttaaaggcgacctcgcccatcgaggcctgcaggtccagcgtgtagtcatcggccttgccgtccaccgtcaggccaatgttgcccatcccggccttgacggtgcagattttggaactcttcagccgtcccaggtcaaagttgcctatggcaacctcggcggtaaagctgctgctctgcacaaggccgccggtaaagttgcccatcgagactgtggcgttgaaattttccgcttccaccgtgctgcaggtaaagtcgcccatagccaggttcagttcgatgctgtcggcggtgatggtctcattgttgtcaaactccacatcgcccatggcggaagtgatggagagccttttaaagtggaaggtctctgtatccggcacggacaaaacaaactccggttctggctcgccgctcaaatcgcagttggcaggcactttgtagcggatggtcaacggctcattctcagtgtaggtaacgtcgagccgcttgttatacacgttctcgcagtgcaggacggcgctggtggcgccggggtcaatgacgatggtcaggcggccgtaatcaatgtccagcacggcatcctgcgaggtgatgttgtcaaaggacatgtctgtcgtgtgggggctgttgtcatccacagcaccggaggggccttcggcggcagtaccgttttcctcaacgatttcactgtcggggggcgcggtggtagaggcagcatcctggggttgctcgacgaccgactcggcagccgagacgacgaaagtttcggcggtgttggcaatagaactgcggcgcacgccgaaaaagccgatcagtaagacgcagactacgaccagcacggcggcaagagccaacaacacgcccataaccggcgggatggcggccgggccgtggagctcaggcttggtagttgggggattttctccagttggttggggggcagcatcctgcgcggtgtcggcagcatcgctgctctcccctgctgcggcttgggcggagtccagcatcaggccctcgccctccaaaattttgcgggcggcgtcggcggggtcgcctagctcggcggcggtggcgtcttcagcttccgggcctgcggcgtcaaagtattcttcgtagtagttcagcgcatcctggcgctcctgctcgggcagaggggcgagcagctgcgccagcttggctaaataagtttgtttgttcattgtgtctccccctcaaatagtcggtcgatcttggctgtgtaggcgtcccattcggcgcgataccccgccagctgggcacggccggtgggtgtgatttggtagtagcggcggttgcggccgttgaacggctcatcgtggacggtcagacagccgtccttttgcaggcggcgcaaaacgggatacagcgtggattcggatatgtccagtacggcgcgcacatcctgggtgatgcggtagccgtaggtgcccgtttcctcccgcccgacgacggccagcacgatggcatccagcagcgccgccccggtattgaatgacatggcgtttctcctttagacatagatgatgtatgaacctatatattatatatcatataatattgtaaaaagcaatagctgcttataaaaaagtgccccgggataaacaggaagccgatatctatataggtagaggttctgcgagccgcaagtttaaagaacaagggaaagcaaagcctaatgatttgctcttttgacaaagtaaaaaacagggctttgctccagaatgtccgttttcaggaacattctgagaacaaagccctggttttgttatt

SEQ ID NO: 7919 - DNA, 1034 bp, Unknown
  gut microbiota DNA sequence
gggatgcaaagcaaaaggcagggcaccaccttcatggtgataccctgcctttactcgttcctgtccactgttccgagtagtgccttctcagaacttcctgtaaacaaaaaacgtacccgaaccctttttcataaagaattgggttcgagtacgaactgaatggtggacggtacaggactcgaacctgtgacctcctgcacgtcaagcagatgctctaccagctgagctaaccgtccatattttgttgtcggcgccgtgtctcccggcgacgtatgctataataccagacacaaagagaaaagtcaagcacttttttcaagaaatttgaaatttttctgaaaaaagtcgaaaacgtcccctcaagcggccaaaaaccgccccgccactgtggacgcacacacctttttgtggtatactataccagttaaagtggggaggtgtagagacttgcgggtccttggtatcgatcccggctacgcaattgtaggctggggcgttgtggaatatgtgggcaaccggttcgcgccggtgggctacggggcggtcgttaccgagaaagacaccccctttgagcagcgcctggtcgagatctacgagggcgtgctggacatctgcaaacgctacaagcccgaagccctctccatcgagaagctttactaccagcacaaccagaccaccgtcatcggcgtggccgaggcacgcggggtcatcctgctggcggcggcccagtgcggtgtgccgatctatgaatacacgcccatgcaggtcaagcaggccatcaccggctatggcaaggccgtaaaaaagcagatccaggaaatgacccgcatgatgctgcacctggagaccatacccaagcccgacgacaccgccgacgccctgggtatggccatcgcccattgccattgcagccgcagccgcctgatgggtacgccggtacgataacctactttctttgaaaagaaagtaggcaaagaaacttttactatagcaaaccgtaaagtgggcggcagggcatagtccctgcaaaaaac

SEQ ID NO: 7920 - DNA, 15328 bp, Unknown
  gut microbiota DNA sequence
gaattatgcggtattgccctaaagttattattactataaaaaaggaagccaaccatgatctattgtctgactggcaaaattttgaaaaaatccctggattctgtcgtcatcagctgcgcgggtgtggggtactatgtgcagatcccggctaccaccggcgaggccctgcctgccccggggcaggagggcacggtctataccatcatgaacgtgaccgagaacgatgtttccctctatggctttgccaacgaggaacagcgcgactgcttcaagatgctgacggctgttaccggcgtcggccccaaagcgggcctgtccatcttgtccattatgtccccggaaaaggtcgcgctggcggcctccagcggcgactacaaggcgtttaccaaggccagcggcgttggcccaaagctggcccagcgcattgccctggaactgaaagacaaagtgggcaagggcctggccaatggcaacggcttctccggcgatatgggtacgcccgcgcccagctcggccccggcgcaggctgtggcggcgctggtcagcctgggctacacccccagcgatgccgccgccgcggtggcccgcgtggacgagacactgcccgtacaggatattatcaaggtggcgctgcgcagcctgtcccgcgcacgctgaaaggggtaaacaatgaatcaggaatatatggtagaccccgcccgccttgtcagcccggacgccatgcccgccgatgccgaggagatcagcctgcgtcccaaaacgctggatgactacgtcggccaggagaaagccaaaggcaacctgaaagtctatctgcgggcggcgcagcagcgtggcgagccgatggaccacatcctgctctacggcccgcccggcctgggcaaaaccacgctggcaggcattgtggcgcaggagatgggcgtgcagatccgcatcacctccggcccggccatcgagaagcccggcgacctggcagcgctgctgaccaatttgcaggagggcgacatcctctttatcgatgagatccaccgtctgtcccgccaggtggaggaagtactttacccggcgctggaagatttcgcgctggacatcatgatcggcaaagggccgagtgcccaaagcatccgcatcaacctgcccaagttcacgctggtgggcgcgactacccgcgccggtcagctgacaggccccctgcgtgatcgcttcggcatcctgctcaagctggagctgtacagcccccaggagttggggcgcatcatcacccgtagtgcgggtattttgggcgtgcccatcaccgacgaaggtgcgctggaactggcccgctgtgcccgcggcacgccacgtatcgccaaccgcctgctgaaacgcgcccgcgactttgccatggtggagagcgagggcaccatcgacgaagagaccgccattgcggcccgcaagtggatggacatcgacgagctgggtctggacgaactcgatcgcagcctgctgcgcgccatcatcgagatgtacaacggcggcccggtcggtctcgaaacgctggccgctgcattgggcgaggagagcgtcacgctggaagacatctgtgagccgtacctgatgcagatgggcatgctgacccgcaccccccgtggccgctgcgtgacccgcttggcctatgagcatctgcacatggctgtaccgcgccgttttgatgaggatgacggacagcagagcatgttctgacgtgcttcgggcgaaaaatcactgaccccatgccgacaagcggcatagaatgataaatcaaccgaatcaaccaataggaaaggatctgacgagaatgggtaaattgtttggtactgatggtgtccgcggtgtggcgggcaaggacctcacctgcgaactggcgcttcagatcggccgcggtaccgctgccgtgcttaccagcctggacggccaccgccccaaaatcctgatcggcaaagatacccgtgtgtccggcgatatgctggaatccaccctggccgccggcctgtgcagtgtcggcgctgacgtagagctgctgggcgttatccccacccccggcgtggcctacctggtccgcaaataccatgccgacgccggcatcatgatctccgcctcccacaacccgatggagttcaacggcatcaagatcttcaagggcgacggctacaaactgcccgatgaggtcgagaaccagatcgaagcccacgtcttcaacaactgcacggacattcgtctggccgagggcgcggacatcggccgcatcaagatgtgccgcaccggcgtaaaggattacgtcgacttcctgcaggagcatatcgacgccgacctcaccggtctgaaagtgctgttcgactgcgccaacggcgcctccgccagggtcgcgcaggaattgttcccgcgccttggctgcgagtgcggcttcatcggcacccagcaggacggcgtctccgtcaacgacggctgcggctccacccatctggaaacgctggaagcggccgtcaagcagggcggctacgattgcggcatcgcctttgacggcgacgcggaccgctgcctggcctgcgacgaaaacggcgccgagatcgacggcgacaagatcatcgcactggtcggcaccgatatgaaggagcgcggccgcctggatggaaacaccgtcgtcgtcaccgtcatgtccaacctgggcttcatgaaatacatgcagtctttaggcattgagaccgcccgcactgccgtgggcgaccgctacgtgctggaagagatgcgcgcccgcggctatgccatcggcggcgagcagagcggtcacgtgatcttcctgcatcactccaccaccggcgacggcgaactgaccgccggcaagctgctgaaggtgctggcccgcaagaaggccgagaacggcgccaagatgagcgacctgaacgccgtgtacaccaagttcccccaggtgctcatcaacctgactgccgacaaggcccagaaagaagcctacaaagaggatgagtatatcgccggcttcatcgagagccagcagcagaacctgatgggcatgggccgcgtcctcgtccgcgtttccggcaccgagccgaagatccgcgttatggtcgagggcgaggaccaggaggccatcaagtccagcgccgaccgcatcgccgacatgatcaaacagcgtatcttgaataaataagacgttgtaccgtatagaataaaaggagaattgcctatgcgccctgccgacagctggcgggattatgaactgttggacgccaccaaccacaaccgcctggagcggtgggggcagactttgctgatccgccccgacccgcaggtcatctggaaaaacgacgagaccagccccctgtgggccagggccgatgccgtgtactaccgctcggccaagggcggcgggcagtggaactaccacaagcggctgccccagaaatggcagatccactggggcgagctgaccctcatcgtcagccccaccggctttaagcacaccggcgttttcccggagcaggccgtcaactgggcctggtaccaggaaaaaattaaggctgccggccgtcccatccgggtcctgaacctctttggctacaccggcggcgccacgctggcctgcctggccgcaggggccagcgtcacccatgtggacgccagcaaaggcatggtggcctgggcgagggagaacgctgccgccagtgatctggctgaccgcccctgccgctggatcgtggacgactgtgtcaagttcgtgcagcgggagatccgccgcggcagcaagtacgacgccgtcatcatggacccgcccagctatggccgcggccccggcggtgagatctggaagctggaggacaacgtctacgacctcatcaccctgaccgagcaggtcctcagcgacgatccgctgttctttgccatcaactcctacaccgagggtctcagccctgcggtgatggaatacatcgttaaaacgacgctttgccccactgcgggcgggcacactcactgtgatgagatcggcctgccggtctcggctaccggcggtgtggtgccctgcggcgccaccgctatttgggagaagtaaactatgccaaaggaagaaccgatgatccgcgtacaggacgtcaagttccgctatgaccccgaacaacccacctacactgtggacggcgtaagcctgaacgtccgccgcggtgagtttgtagccgtgctgggtgccaacggctgcggaaaaagcacactggccaagcatttcaacgccatcctgctgccggagaccggcactgtgctggtggaaaacatggatacccggggcgaggaccacctctatgacatccgccagaaggtgggcatggtgttccagaacccggacaaccagatcgtggcgaccattgtggaagaagatgtggcctttgcgccggaaaacctgggcgtcccggccgaggagatccgcacccgcatcgacgaagccatgaagctggcgggcatctacgaaaagcgcgaagccgcgccctataagctttccggcggccagaagcagcgcgttgccattgcaggcgtgatcgccatgcggccggactgcctggtgctggatgaagccaccgccatgctggacccccacggccgcagccaggtcatgcgcacgattcatcagctgcgggaagccggcatctccatcatctctatcacccattatatggaggaagccgcccaggccgaccgtgtgctggtcatgagccggggccgcatcgtgatggaaggcacgccggaagaggtgttcagccagacccaacggctgcacagctaccatctggatgtaccccaggcggcggaactgcgggacgagttggtaaaaatcggtattccaatgccggaaaatgtcatcacccccgaccgctgcgccgaggaactgtataaactgctgcagtaagctgcgcaaggaaaaatcccatcataggcagaaacggcacccatcgcgggcggtattctgcgggaaaggaataaacagtgtcagagatcattcgtgtagaacatctgaaatacgtctacaatcccggcatgccggatgaaacgaccgcgctggacgatgtgagcttccgtgtggaagaaggcgactttgtcggcatcatcggctccaccggcagcggtaaatccaccctcatcagccatttcaatggcctgaaccgccccacctccggccgcatcctcatcgacggcaaggatatgtgggagcagggggccgacctgcgggcgttccgcttccaggtgggcctggtcatgcagtacccggagtaccagctgtttgaggagacctgcgccaaggacatcgcctacggcccgcgcaacatggggctggacgaagccgaaatcgaccgccgcgtgaaggaggccgctgctttcgtcggcctgtcggacgagctgctgcagaaaagcccgtttgaactttccggcgggcagaagcgccgcgtggcgattgcgggcgttatggccatgcacccccgcgtgctggtgctggatgaacccgccgccggtctggaccccgagggccgcgacacgattttaagccagatccgcgactaccacgaaaagaccggcatcacggtactgctggtcagccactcgatggaggatatcgccaagtacgccaaccgcgtgctggtgatgagccacgccaagctggctatgtacgacacggtggaaaaggtgttcggccacgcgcaggagctgctggagctggggctttcggtgccgcaggtcacgcagatcttcctcaagctgcgccagatggggctggacatccccaccgatgtttacacgatgccctacgctgtcaagaccatccagaaggcgctggcggccaagcaggcaaagggggtgcagtaaatgctgcgtgatattaccatcggccagcatttcccgggcaactcggtgctgcaccgctgcgacccgcgcttaaagctggtggccaccatcgcctacatcgtggtgctgtttgtggcgcccaaccccctgggcctggcgctgtccattgccctgctggcggcgctgtataaggtggccaaaatccccggcaagctgattttgaagagcttaaagcccattgtgcccatcgtgctgttcacggcggtgctcaacctgttttttgtcaccggcgagggcgagccgcttgtccacatctgggtgttgaaaatttacggggagggcatccgctatgccatcctgctgacggtgcgcgtctgtgcattgatcgcaggtacgagccttttgacctacaccaccagccccatcgtgctgacggacgcgattgagaatctgctgcgcccgctggcgaaaattcatttcccggtgcatgagctggccatgatgatgaccattgcgctgcggttcatcccgactttgatcgaagagaccgagaagatcatgaacgcccagaaagcccgcggtgccatgatcgacaatggcactttcacccagcgcatcaaggcgctggtgccggtactgatcccgctgttcatctcggccttccgccgcgcggacgagctggccatggccatggagtgccgctgctaccacggcggcgagggccgcacccggttaaagcagctgaagttcacggccgaggatacccgctgcgccgttatcatcacggcagcgctgctggtgatctgcgccacccgcttctttgtgccggggttggcgtaataattttttgaagagcccctgtaggggcggacatggttcgcccgtggccgttcatccggtcaaaaactttgcgggcgagcaatgcctgcccctactatgtgttttgtaaacgtatgacttaccttttatggatcgcctataaaggcacgaattacggcgggtttcaggtgcagcccaatgcgccgaccgtctgcgccgctgtgcaggacgccatgcagcgggtgctgggctgccgccccgatgtaaagggctgctcccgcaccgatgccggcgttcatgcgcggcgtttcgcgcttagtttctgctatactggcaaggtcccggcggaaaagatggtgcaggcgttcaacgcccacctgccgccggacatccgcgcactggaaatttggcccgtggccgagaacttccacgcccgctacgccgcccacgccaagacctaccgctactatattttaaatgcccgggtggatgacccctttacctttgatacctgctgccggatcggcccggaactggacgtagccgccatgcaggcggcggcggaacggttcgtcggcacgcacgactttttggcgctgtgtgcgtcaggctccagcgtggccgcccatggtgacacggtgcggaccattacccgctgcactgtggagcgggcaggggacagggtgaccatcaccgtcacggcggatgggtacctgtataatatggtgcgtattctggccgggacactggtggaagcaggcctgcacaagcgcacgccggagagtatccccgccctgctggccagccgcgaccgccgccgggctgggcagaccctgcccgccaaaggcctgtttttggaggatgtggcgtactcggaactgaccaaatcataagcgaaagaaggtgacccccactcatgagcaaagcggataaggaacgccaggcgcgccgccagcggatgctggcgcgggagcgggggcacacctccacctatcccatccccggtaccagcggggacatcggcctgcgcaccccccagccggtgcgccgcagccgcggtaccaccccgcccccaacgccggaaaaacaacccgacaacgtgaagtccttcacgccgctgatccagcagcgtcagcgccgccactataccgttctggcggtgctgatcctgtgcattgcagcggccgtctttgtgtttaccggtgccatgtcggcgtccatcgctctgctgggcgatgcggcggacagcctgtccctctacttcaaccgcagcgacggcggctggccggtcaataccggcatcagtgagccgatccaaattgccgaactggcgggtggctttgtggagctggacagcgaagacgtggtcgtctactcggcctacggggctaaggtacgcagctttcagcccggatatgcccggcccgttatggccgtgggcggcacccactttgtggtgtataaccgcgcgggcagcgacctgcaggtctccagccgcaccaaggcgctgtacaccaaaacctttgataacagcatcctgctctgtgccatgtccaacaataacacgctggccgttgtcaccgagtcgggccggtatgccgcgcagctgcaaatttttgacccctctttccgccagacctacagctgggagatgacccagaacgaggggacccccattgccgtagctttctcgccggataaccgccagttcgccgccggtacgctggcggcgcggcagggccagctggggtgcaaggtgtattttatgagcacctcctccaactccgaaggtccggcctacaccgccagccagggcagcatgctcctctcgctggattggcaaagcgagagccgggtggtggcggtgttcgatacctacatcgcggtgctggacccccgcacggccaccgagaccgcccgctatgatttcggcggtgctacgctgcaaagtgctgcgcccggccagcgccagaccgccctgctgctaaacatccgcggcggcaacagcctggtcacgctggacaacgacctgacccctctggccgagatccccgcccgccaggcctacggcatcaaggccacggacacgtcggtctacctgctgtgtcccaacgctgtcgagtgctacggctttgacggcgtgcagaactgggtgcaggataacttctccgcccggcccatccaggtgctcaaagcctcggaactgctggtgtttaccggcagccgcgccgaggtgctgaccccgccggataacgccaataacacaaatgattcctgatacgaaaggacccgaaatctcctatgcagcaaaacatttctctggtttatgaccttctctttctcatcgtgtttgccgtggtggctgtgtgcagctggcacaagggcttcctggccagtttggctgagctgatcggcgctgtgtttggcgtcggcatcgccgtctgggccagccagaccgccgccacgcagatctacgaaaagtttttaagcgcttcggtggccaaccgggtagagctggccctgcgtgaatccaacggcaacattgccgaggctttgcagggcatcagctttttgccggaatccatgcagcaaagcctgctgaacctgctgaacgatgcgggcagcgacgtgcctgccaagatcgccgaggctttgcagccgttgatcctgccctttgtgcaggtgctgctgtttgtggtgctctgcgtgctggtgcggtgggtgttccgcctgctggtgggcgcgctgcgctggttcaacggcgtgccgctgctgggcagcgtcaaccgcctgctgggtctggtgctgggcctggccaacggcgcggtggattgctggctgctggcgctggcgctgtggtttttggtgggcgttaccgggggcaagctctcctggctgaacggctacatactcagccaaagcgtgggctacggcattttcggcagcatcaacccctttgtttgatgggcatgtaatgaataaattctgaacattccgcccgaaaacttgcaaaacagcccatttcgtttcataatatttgcaagactatgcgcctataccgggcgttttctatagaggtgaagaaattatggtttgtgtacgctgcaaaaaacgcacggccgtggtgttcatccagcggatggacaacggcaagccggtgcaggagggctactgcctgacctgcgcccgcgagatgcacatccaacccgtggatgatctgatgaaacagttcggcatgtccgatcaggatctggagaacatggaagaacgcatgagcagcttcctgcaggaggctgccgagtccggtatgctgcccaccgcagcaggtgaggacgcccccgaggagggcgacagtcaggacgattttgtgcccggcggttcgccggtgttcccgtttggctttggtgcagcccgccagagcggcgacgacaaggccaaaggcaaaaacggtaaaaaggacaaagcccccaagcgcaagttcctggatacctactgtgagaacctgacccagaaggcccgggacggcaaggtggaccgcatcatcggccgcgaccgcgaaatttaccgcaccatccagatcttgtgccgccgccagaagaacaacccctgcctgatcggtgaggccggtgtcggcaagactgccatcgccgagggcatcgcccagcgcattgccgagggccaggtgcccgcccgcctgcgggacaaggagatcttcctgctggatatgaccgccctcattgcgggcacccagttccgtggtcagttcgagcagcgggtcaagggtcttatcagcgaggtcaaggccgccggcaacatcatcctgttcatcgatgaaattcattccatcgtgggcgcgggcgattctgacggcgccataaacgctgccaacatcatgaagcccgccctctcccgcgggcaggtgcaggtcatcggtgccaccacttttgccgagtaccgcaagtatatcgagaaagatactgcgctggagcgccgtttccaacccgttaaagtcgaggagccttccatctccgataccatcgaggtgctgaaaggcatccgcatctactacgagaagcaccactgcgtccgcgtgccggaccctgtggtcaccaacgtggtcaaactgtcggagcggtacatcaccgaccgcttcctgcccgataaggccatcgacctgctggacgaggcctgcgcctgctgcaacctgcgccaccccgaaattaccgagttggtggagacccagcgcagtgtagccgagctggaaagccgcgaacatgagctggagaaccccgagccggagaacggccaggatgccgccatcgactacgaggccctggcttcggttaagacggaactggcccagcagcgccaaaaactgcccgccttgcagctgaaggtggccgaaattgaggtcacgatggacgatgtggcccaggtcatcgagctgtggaccggtatccccgccgtcaaaattaaagagaccgagtacggccgcctgcagggcctggaagaagccctgaaagagcatatcatcggccaggatcaggccgtacacgccgtggccggtgccatcaagcgcgcccgggctgacctgtccggccgccaccgccccgccagcttcatcttcgtcggccctaccggtgtcggcaagaccgagctggtcaagcagctggccaaccagctgttcgataccgtcgacccgctcatctccatcgacatgagcgagtatatggagaagtacgcggtgtcccgtctcatcggttcgcccccgggctatgtgggatacgatgaggctggccagctgaccgagaaggtccgccgccacccctacagcgttgtgctgtttgatgaaattgaaaaagcacatcctgacgtcatgaatatcctgctgcagattttggacgagggcaagatcaacgacgcccagggccgcgtggtggatttctccaacaccgtcatctgcatgacctccaacgctggctccaccgatcagagcggtgctaccggctttggcaagcgcactgagaccgccagcgccgacaagtgcatgaaggctttgcaggagttcctgcgccccgagttcctgggccgcgtggacgaggtcattaccttccgcccgctgtccgagtccgacctggagcgcatcgcccagctgatgctggatgaatacaagcccggcctggccgcccacagcatcacgctgaacaccacgcctgaggcgctggccgccatcgtggccgagagcaccacccgctatggcgcccgcgagctgcgccgcaccatccgcaaggcagtggaggaccccatctccgaggcactggtggacggccgcctgggcagccagcccgccgccgtcacgctgacggctaaggacggcaagcccgtactggagctgtgatgcgtacaaaacttgctgcactgctgctggccgtgctgctgctgacgggctgtgtgccctatgtgcggtggcagatcacgaccaacatcccccagacccagcagatgcccgcgccgaccccggcccccacggccatgccccagccggattccggcttgagccgccgccagatggtgtacggcagcgccgggctgctgactgagccgaccgtgctggtcagtgtttacttaaacgatgccgccggcggtcgtgtctggaccgaggatgccaaggccgagacacgccaatacctggccaccgccgtgcagtggctgaacgaacaggccgaaacctacggccggacgttgcaattgtactatgacgacggcaccgtcaacagcccgctgtgccgcacctacacgcccaaatcggccatccgcggcgggcggagcaccgaggagagcgacgcgctgctgaccgagctggacgccgtcagcgccacgttggacaccgccgcgctgcaaaagacctacggcaccgaccgggtggcgtttctctatttcctgccggtcagcggggcgtcctttacgatggtccactacgccgacgacggcagcaatttttaccacgagtacagctgcctctaccggtacgatgtctatgcgggggagggcgagagcgaatccccggcgacctatgcccacgaaattttacatttattcggcgcgccggacctgtacgagggcagcagcgatgactttgtggacgatgcgcttattgcctacgtcgaggagacttaccccgacgagatcatgaacagcacctacaatgacgacggcaccagcagctttgacagcgtgcataaggccatcagcccgctgaccgcctactgcctgggcctgaccgacacctgccccgaactggagcagttccccaagttggccaacataacgccgggagtgttccgctacccggccgacagcggcagcacacccgataccgggaacgatgctgacggtgggggcgaagtcggggatgaacccgacagcgcccaggcatggcccggcgccgtggcggtgtaagcagcgaaagggggcgcacaccttgccgaacgaggattttccgctgcgggtggacggcgtgaccgccggttgggcggcagaacgccgccccgaggatgtgatccccgccgcccggaccgacgcctggcagctggtctacgtgcgcagcggcaccattgaggaacgctgtgacgaccgccgcgtgctgctgcgggccggcgggcttttattccaccagccggcagagacctttggcatgcgcccggtgggcgaggtgccgcccgatgtgctgcgcctggattttttgtgtacccaggccgggatggaccgctttcgcggtgccgttttccatgccgaaccccaggaacagcatgatttaaactggctgatggacgctgtaacggaatattttgagccacccgacaccctgggccaggccacggtccccaaagaggaacagccctacggagcccagcagcagctggccatccatttggaaaacctgctgatcttgctggcccggcggtacaagcgtgcccgcaagcccggcgtgcgcctgcggcgggagcgccgccagaccgccctggtggacgctgcccgcacctactttgccaaaaacctggagcgggagctgcgggtggacgaggtgtgcgaggccatcggctgcaccaggccgcaattgcaggcggccttccgcacccggctgcggcatacggctatggaggaattctccgccatgcggctggactacgccgctcagctgctggcccggggcgatacccccggcgaggtggccgagcgcatgggctaccgcagcggggcctacttcagccaaaaattcaaggaggccaccggcaacacccccagcgcctaccgccgcctgcagcagggtttgccggcccgccgcctaaacaggcaacaaaaagacaaagacgaatcgaaaacctctattgcagaaacaccgccaaaaaagtaaaataggggtaacaagcggggaacataccccgctaaaggcaacaagataacataagtgataaggagacgatcgttatggcaattttggtaagcggtggcgccggttacatcggcagccacacctgcgtggaacttctggccgccgggtatgatatcgtcgtggccgataactactacaactcctgccccgaggccctggcccgcgtgaagaagatcgccggcaaggacttccgctttgtcgaggccgacatgaccgacaaggccgccgtcgaaaagatcttcgccgagaacgaggacatcgactgcgtcatccagtttgccgcttacaaggcagtgggcgagagcgtctccaagcccatcgagtactattccaacaacctggcctgcacgctgaatattctggatgttatgcgccgccacaactgccataacatcatcttctcctcctccgccaccgtctacggcgaccccgccagcgtgcccatccgcgaggatttccccgtgggcggcaccaccaacccctacggcaccactaaggtctttaccgagcgcatcctgaccgactgctgcaaggctgaccctgaactgaatgttgcgctgctgcgttactttaaccccatcggcgcccatccgtcgggcctcatcggcgaagaccccaacggcatccccaacaacctggtgccctacattgccaaggtggcggtcggcaagctggagaaggtccacgtctttggcaacgattatcccaccccggacggcaccggcgtgcgtgactacatccacgttgtcgacctggcccgcggccatgtggctgccatcaagaagctggaggaaaagcccggcctgttcatctgcaacctgggcaccggccacggctacagcgtgctggacgtcatccatgccttcagcaaggcctgcggcaaggagctcccctacgtcatcgacccgcgccgccccggcgacattgccgagtgctggtgtgatcccagcaaggccaagcgtgagctgggctgggaggcccagtacggcatcgaggagatgtgcgcccacagctggaactggcagagccacaaccccgacggctacaagaccgccaaataacccaggcagcacttaaggcaacaccgcacaattcccgccttacggcttaagcaccgcttcggcgactgcggcacggcatctgcgttgccaaaatgctcgataatacaaaaagtattatctgcgcttttggctt

SEQ ID NO: 7921 - DNA, 194 bp, Unknown
  gut microbiota DNA sequence
ttcctcccgatatctacgcattccaccgctacaccgggaattccgcctacctctgcactactcaagacatacagttttgaaagcagttcatgggttgagcccatggatttcacttccaacttgtctgcccgcctgcgctccctttacacccagtaattccggacaacgcttgtgacctacgttttaccgcggct

SEQ ID NO: 7922 - DNA, 1242 bp, Unknown
  gut microbiota DNA sequence
caccacaacatttatttataaggagagagcacctatgatccgtcgcagtgaagaaaagcaatccgtccgcaagcccgccccgtttaacggcgtgggcgaaatcaccgtccgcagcctgctgaacggccccgaggaaatgagccagaagggccgcgtgtttggccacaccaccgtctaccccggcagtgagatcggctaccatatccacacaggcgacagcgagacctattacatcctgagcggcaagggcctgtacaacgacaacggcaccgaggtagagatcggcgccggtgacgtgacctactgcgcccccggcgagggccacggcctgaaatgcctgggtaacgagccggtcgagatgatcgcactcatcctgtatgaataatcccctgccggcttcctgctgcctggtccctgcccgggcactgccggctgcatgccgcaccgctttagccggcgcggcttctgtgttgccggagcgttttcttttctttccgcagaccgatggcggcacctggctgggacgcatcgggcagcagatcttatatctacaattttccagcaatgcatcgctacaactccaatgcctgcaccagcgggacattctctgcctttgctgcgccaaaaaactgctgatagaagattgctgtgtctattaccgcagcaacagcactgtgcaatgcctgaccctaccattgagccagatgcggcgcgagttggtcacgctgttgctgcttgcacttttgcagccccaggggcagccaactactgccgttttgcccatgccgtccgcttttggggaattgcaggagctttgcagttatgcccctgcagccgcagtctttggccgccagattggaagctggaattggtggcgcatagatgaaaaaggctttccttttcgcaaaaaagggcacggaagcgccgctttatactgtgaaatggagcacggctccatcgtggtagcccggcgcaacaccgaggttgccacctggtatctgcccagcggccgcagttgtctgctttcttgcctagagcacggcactatgaccctgcgtatccgcaccggccagcaggtccttggtgagattcctcacttgaaagccgagagcatggtttcagcctaagggcacaacagaaaaatccgtatgcaaaaatccccctgtaccaccaaaaatgaagtgcccccaaaaagttagacaataatttgaagcaaaaattgttcaagcagccgaaagggct

SEQ ID NO: 7923 - DNA, 539 bp, Unknown
  gut microbiota DNA sequence
tgggcttatatgaatgaaagggagacgaagagcatggaaggatacggagaagcggtttttgcgacggaatatctctgcaaggaataccgacatacggtggcgttgcgggatgtgagcatcacaatcccgcgcgggcagatctacggtctgatcggagaaaacggcgcggggaaaaccaccctgctgcgaattctatgcggtctgactcgccccacacggggcagactgctactatttggtgcggcagacgctgcccgacagtcagaaatgcggcgtcggatggggtgccttgtggacggccctgccttgtacgcggatctgaccgcatggcaaaacctgaaagtgcagtgcctgcagcgagggttaaatgaggcggatattgctcccaccctgcaactggtgggtctgaaagacactggcagcaaacctgccggaaaattctcgctggggatgcgccaacggctggggctggcggttgctctcttggggaaaccggaatttctggtactggacgaaccgctcaatggactggacccgat

SEQ ID NO: 7924 - DNA, 1807 bp, Unknown
  gut microbiota DNA sequence
acataatgggcagctgctggaacaactgacggcagaagaactggacgcccgctgcagcaagtatctgttagtccgtaccgacaatgaccgacgggcggtagacatcctccgcaagatgtttccggaagctatctgtcaggcaacagtggaggggctgcgcttgtccccggtaggaaacgaggcagcagcgacagcttccggtgtgctaatggagaatggcttgcacgtgcaggaactggcagtgcgcagcgaagggctggaggcatatttcacggccttggtgggaggtgacagccatgccgatgcaggctaaagcggaaggagtcaaactgttccatgcaaaagcacagctatgggctttgctggggtttgttctgatgctgctgtggtttgccaacagtgggaccatgtattttatggtggcgggtgatcttttgaacccgcttgactccatcggatttttcaaggatgtggcgatgggaagtgggcggtccggcttgcagctggtgcgcagctctcagagcctgacagtgttcagctggctgatccccgtcaatctgtgtgtggcgcaattcgcgtcggagcgccgggcacgcaccgatgaattgttcgtcagtcatggaggacggttgtccactctataccgcgccaaattcggggtggtctgcggtttctgcctgcttttgcagctggccttttacggaatctgctttatcatcacagccatccagatgggaattgcgcccgcgctcggaacagttctgttgttctgcgcagtatcggtgggaaatcttctggtgctgggggctttcctggcattggcgtcggtccttacactctggctgaaaaaccatgctgctgcggcactggtgaccagtattctgccgttggcaggagtgctgctttatcaggtacagtatgaagatttttctactcagcctcttctgatacaactggcggctaaggctatgcccacctattactggtcccggctgtgtgctttgaacatcacgccgcagttttgtgtcgaattggcagcttgggtgattgtggcccttgctgtggcggcagggctgggatggatggcacttcaccgcccggatgccggaaagcagcgcagtgccagaaaggcgcacgcagtcctgcggcgtagggaaaaatctgccgctcggcagggaatgcaccgggccagcactttctccgcagctttgtatgcccttcgctgcactcgcctgccgggaatgctggctctgttcggcctgctgtgcatggcgtttgctctgggagtcagtgaatcccgcattgtggacgctacttgggcagacggcaggcgggtaggcatttttcccggcgattcgttgccagtgggaagcgcggcggatgctgctctcggcacggtgctgtcagtgggcatccttgcgtggattgcagtcattctcgtggcggtgatggcattccaccagaacaaaacagcgggcgctgcccggttggcggtcgcccatggcgtaagccgggtccgatatatggctggcagttttgcggcggaaacgattatgctccaagggtggtacatggtgttgtatttcctgctgtcggtggtcacgggagccctctcccagccgggacgcacggcgtttttctggatgcagagcgcctggattttgcaggcaagctatgcggcggtttggctggtatgccgactttgcggcagtgaattggcgggggctactttctgctttgtggtgactctggctggagtcattgtgagcgtttctgccccggatccggcggcagtttctcccttgtc

SEQ ID NO: 7925 - DNA, 148 bp, Unknown
  gut microbiota DNA sequence
ccgttacctcaccaactagctaattggacgcgagtccatcctgaagcgaataaatccttttccctcagcccgatgccgggccgtgggcttatgcggtattagcagtcgtttccaactgttgtcccccactccagggcaggttactcac

SEQ ID NO: 7926 - DNA, 818 bp, Unknown
  gut microbiota DNA sequence
gtgatgtccgcctcaaagggcaggaatccatcaaccgcaaaaggccgccttcccctgcttgtggggagggcggccttgccgtttttggttataaggcctcgccgttggtggcaatgacctgcttgtaccagttgaaggactttttcttatagcggttgccggtgccgtcatcgttgcggtagctgtcgtccacagtgtggtcgggcttttctatgcggttgtgcggcaacacacagcgcccctgcacggtcggcacaggggcgctggttttatgcagctgttattcggttacagtggcatggtccgcggtggtttctgcagtaggtgcagaggcctgcggggcttgcaaattttctaatccggtcacgttgatgttgcggtcggtcttggcctggatgctgttggcgcggacgatctctttcatgtcaatgccggtggcttccttcatggcctccatggtctgggccatcagcacgggcacgttgccggacacgcccgacacaccggaggcatcgccgccgatgatggacaccttgtcgatgctggcaaggggctgggccacgctcttggcgatttcgggcagcacctttatcatcatctcggccacggcggcatcgttgtactgcttgtaggcttcggctttctgcttcatcgcttcggcttcggccaggcctttccggcggatggcctcggcttcggctttaccgaccagttcgatgccttcggcctcctgctgcttggcaaacttggcggcctcggcagcgcgctcggcctcgtacttctgggcttcggcttctttctggcggcggtacagctcg

SEQ ID NO: 7927 - DNA, 2992 bp, Unknown
  gut microbiota DNA sequence
ggacaggctgacctttaaaatcacactgcccatcatgctgtttttggacatgtcggcggtggatatcctgcatgatttccggccgaagtttgtgctgttctgctttgcggccacgctggccggcattttagtgatctggggcgcggcgcatgtcctgatccgtgataagtccatcgtaggcgagttcgtgcaggccagctaccgcagcagtgcggctgtgctgggcgtggcgttcatccagaacatctacggcacggcgggcatggccccgctgatgatgctgggcagcgtaccgctgttcaacatttttgctgtgctgattctgatgctggaatcgcccgaacagaaaggtgccccctcgctgaaacaattgctgaaaggcgtggccaccaacccgatcttgctgggcattatcaccggcacggtgtttgcgctgctgccggtcagcctgcctgctgttgccaccaaaacgttgaacaatcttgcctccgtcaccacccctttggcgctgctgtccatcggtgcaagttttgagggggccaaggccatcaaaaagctggtgcccacgctggtagcagccctgctgaagaccgtggggctggcggcggtgtttgtgccggtggctgtggtgctggggttccggaatgaggaattgatcgcgctgctcattatgctgggcagccccacgacgcccagctcttacgtcatggcgaagaatatgggccatgagggtgtgctgacgtcaagctgcattgccaccacaacactgctctcggcgttgacgctgaccgggtggatctttctgctaaggagcgggggatacttataatatggtgcctctcattttgtaggggtcgatgcgagcatcctccccgataatgctgcgataaacgaaacctgcgccctgtgtgaaagcagagcgcaggtttttcatttttcctttttcgcgtagacgcgcacacaaatggtgtaactgatggcataaagcacagcagtcaacaagagcgacagggcaattatgcccgctataagggcggttttggcttgcaatgtggtattcataccggcaatgcccacctgcgtctggttttgtagaatctcctgtgcgacaaaacacgccccgaaaacgatagcaaacacaatgaccattaaatacgcgcgcgacttggccgcaccaaaacggtaggtgattggcatcaacagcgcgttcatcagcaccgagacctcggcgcaggccaggatgccgagggtgtactcggccccgccaacacctgccaaaaacaccagtgccagcgaaagcaccgcaccgatggccgtgctggccgcgcacagcagatacttgctgccgatgacctgccccggcgttaccggcagagtggcggcgtaggcgtcccagtgggcctgttcatcgtagttgatggtcgaggccacgtagatgccccacaccaccgtcatggcataggccaggtaagcctctctcgtgaccaaaatgagcactccgtacagcgccaccagcagcagaatgttgcccttgaagctgcgggtcataatgctgatgtctttatacaaaagtcctttcattgtgcatccctcccgctataaaagcgcatgatgtcatcgatgctggcactgtcgcagacggcatcgggcagggcggtatgggcggcggtgcggtccttgaccagcgtttcgcagccgaacgccccgcgtcgggtgtagacggcacagccctcgggcaggcgggcaagatcggtctcggcgcagcgcagcaggccgtattcctgcagcagatcgtccttattttcgcagaacaacaactggccgtgatgcaggtaggcgatggcatcggcgacctgttccaaatcgctggtaatgtggctgctcatcagcacgctgtgctgctcgtcctggatgaagtccagtagcaggtccagcagttcgccgcgcaccacagggtccagccctgcggtggcttcgtccaggatcagcagctccgggtcgtgggccagggcggtggcaaggctcagtttcatccgcatgccgcggctgtactctttaatttttttgctgccgtccagctcaaaacgacgcaccagtgcgtcaaatttcgcagtgtcccagcgcttgccaaagatgcccgccatgcttttgcccacgcaggcagcgttgaagcaatcagggaaataggcatcctcaaacaccacgccgatgcgggcgcggatggcggggtcggcaggggagccgcccagcagttccacgctgccgccggccggccggatggccccgcacagcagttttagcgcagtggtcttgcctgcaccgttctcaccgatcaggcccaggatactgcccgccgggaccgcaaggtcgacgggacccagggcaaatgttttataatgtttcgtagcaccgcgcaaagcggcggctgtggtaagcatagttcagccctcccataaaaggcgcaaggtctcggcgacctcctcatagccgatgccgcccaaccgcgcagcgtccaccgcgccttgcaggcagtcttcgacttttttcaggtgttgttcatgcagcagggcgggattctggggtgccacaaagctgccgcggcccggctgggtcacgaggaagccctcggcctcgaggtcctcataggcgcgcttggtggtaataacgctgatacgtagttcttttgccagcaggcggatactgggcagagcgtccccctcatgtagttggccggacaagatctgctgcttgatctgccgtgtgatctgcgcgtagatcggctcctgtccgctgttggataggtaaatttccatttgtgagtactccttgtgatcgaactgtacacattcgatatatacagtatatacgcagtatacacagttgtcaataggcaaacaaaaataaaagccagacaggcccggtgggtgaactgcaccccatttgttagacagtatggtatactatctaataagtggggtgtttttctatgcca

SEQ ID NO: 7928 - DNA, 1753 bp, Unknown
  gut microbiota DNA sequence
gttgactctgccgatatgctcggctcggtcgacgcaatggatgacctttccaaggtcattggccaccagtttgaccttgaagtcagctttggcaaaatcaagagttgggagcttgtgaagtgattcccgccccaccagaaaacgcccagccgccaccatgtaaatagcttccgtcagacgctcgcctgacactccaaaggcgctacgtcctttggagtgtcagtgtcagtgtcaaaagacaaataaaaaatgacagtaaaaggcggtaggaaaatgggcgagacacaatccccaccaaaaaggctaagaagtcggcagtgcatgtttgtgctgtacccggagagccaagagacgtccatcaagtacgcgcaagaaaatttcccgtgtgcctgggccttgcacgataaggacgtacacaccgaaaaggcatatcaagcctacattgagaagaacggggagccgccagagtggcaacccggtgacctgaaaaagccgcatatccactttgtgtgcagtttccccaatgcccggtacttttccggcattgcccgcgacctgggtgtcccggttaataccatccgcaaggtgaacaacctgtacaaggcttatgtttacctgtggcacatgctcgacccggacaagtaccagtacagcaaggacatagtgggaagtcacgaatttgaggaacccagcgaacacgccggtatgacccaaatggaagatgaccaggtgcagatcctgctggacatgcccacctttgacacattcaacgagctttgccgctgggcctatgagcaaggctgctgggccacattccgcaaaaactattcaatgtggcgcgaccagttcctagagcggcaacgcctgcgggagatggcgcaaagcctgcaagagcgcctagccttgcaagagcgtattgcggcgctgggtaacagccaaaaagtcaccgatgtggacggcttcggcattatgccggacagcctgaaaggaaatttctaaaatgcgagttattcaaaagactatcgtagacttcgatacaataaacagctacgcgcggacgctggaatttctcggtagcaaaaaagccgcaagtgacctgcggaacatcaagcaggacatattatccgcttacgataagcaagcaccaaactatagtgcccttatcgtcaactatgaggataaaacctgcacagtttccgctatcccccatgactaccagttgtaacgcaagcccccaacagcaagcgattacatacaaaattttgaagaaaggagacgcaaccatgaatcctacttctgttgaagctggcgcagaggttgcaaaaagtgctatggaaaccgttatcgccgccatgtctgatgtgttcaccctgtctggcaccgtcgttaccgagatcactaagcagcctatcctgctgttctgcctggccgctggtctggtgcccgtgggcatccacatcttctctagcctgaagaacgccgcccgcggctaatcgggcaagcccaaaggggccaggacttcgagccctggccccttgtgttgtttctaccgaaagaggttttatatatgaacgatacagcattgccccgttataggttcctgtccgggtttgatttctgcgtggtagactatgagctttactgctatccgtggttgccctgtagtaaaaagcgggttcgtgcagttctccggcagtttcgcaataaaaatgccgccatcactggcggcatgctcaatcttcacgatgattca

SEQ ID NO: 7929 - DNA, 6612 bp, Unknown
  gut microbiota DNA sequence
aacagggccatgcaggccaggttgacctcgccggttttcagcaccagttttagcaggtcatccggtgatttttcctcgcccagggcggccagtgcctcgtagaaatagcggttcacggcggggtcggtcttgcccagggcacgggcgtggtaggcataggctgccatgcccttgagtccgaacaagatcagcgatttcagcgaccgcacgtcctcccctgcccgccaaagctcggccatatcataatccgcaaagtgggtggtgctgacggcggctttctctttctctatgtcgtttttgatttgcaggatcgtctcgttattgaagttcacgttggtgatggtggtaaacagccctttcagcatcagctcgtcggtgcggtcggtggctgtccccgcctgcaccgcctgcgcaaggccgatcagcgcaccgatgacttcatcctgatagttggcggtatcagccttttttccgcacaccccggccttaccatcgcacccggtattgtgcgccgtctgctggcactggaaacaaaacatctcttgcatgtggttgccccccttacagaatatcactataagggtgggcaggctgcggggattttatgcagacacaaaaacaacgccaccccgccggtaacaaggcggggtaacgctgctttggaatcatgcttatatgaatgtcagggaatggcggttacagttcggcaccgttggtgacaatgacgtttttgtaccagttgaaggactttttgcggatgcgggggtgttctgtttattgtttgtttactgtttaggcgaatgacgttttttacgcctgcggagaattaggaccaccaccagcaggatgatgacagcggccccgatatacagcgtgtaggcacgccggaacgaccgcgccgtgtagtggatgaccgcctggacgggctgggtgggggcgtcgtcctcgccgttataggccacccgcttggcctgtacgatcaggcggtgggtgttgatgccgtagggcgtgcaggtcatcagggagagccaatcctgcccgtgcaggatgcgcagggctttgttcagggtctcgaaatcatccttggggaccatgggcaggatgttctcgacccggtaggcgtggacctcgcccaggatgtgcaggtagatcatgtccccttcttccagctggtcgatgtcgctgaacagccgcgccgagggcagaccacggtgggctgccagcacgcagtgggtgttttcgccgcccaccggcagggccgtaccgggcaggtgcccggcgcccacctgcagtacgctgtcgtcggtgccgtgatagatggggatggtctggttgatcttggggatggagatcatccccatgacgccgtcgccattcagattcaacagggcattgtattcgtcgtccgcctgaacaccctcgccggcgaagaggtccccggcgaaggtattctctgtaatggcggcgttgtaggccaaggcggcctgcatctcgacttcgtaggtttcgggcgaagcctcgctgacagcctcctgatagtcgcttaacgtgcggtcctgccgcagattgttgatctggtcggccacagtgtcgtgggcaaacaggtacagccccacgaggaaaacaagaccgaacagaacttctaggacgcggtatttcattcgcggttctggcggcgcttgatgtacaggatcgcggccacagcggcagccatcagggccagacccaggccagccagcaggttagcgccctcaccgccggtaaacggcagggtcagaccgtgctggttgacgatgttgaagtgcaggacaccgtctttatcaatgctgattgtgtcagtgtcacccttgccgctggataccacatacgaccaatgattgccgttttcatcagcagttgctgaccatttgacgaccagcgtaatgtcctcgtccagctttttgtaaccggtgggggccagaacttccttgatggtgtaggtgccatctttcaggccgtcaaaacgcaggatgcctttcgctgtatcgttctcgccatcgccagtcataccaacgattttttcaccggtctggacattggtgccgccctgtgcggcgtactctgccacggcatcttccgtagaggccacggtcgtgtagctatcgttcgtatggtagtatttcttctcgccctcgccctcattggtgaaagagtatcccaagacgttcagcttctgcatatcgttgccagtagtcatgaactgtgcacccggcagatcatcacccttggggctctttttgctgatttggaaaccggccacataggtgcttacgtgctctttcagagtcttggacgtagggacatcgtttttctggctctggttggggttgttggagtattccagataagcggtgttggtgttaggggcattaccgatggaagccttttcgttgacagtagcggtataggtcacaacaacgtctttgttgctctttctattttgcacaaggtctttcagttcgatcttgatgtacagcttctgaccagggttggcagtgttgtctgcgctgtaactggtgccatcggtggagtaagtcactttgcagtgttccttgtagtcctcatcgccaaccgtaacagtcatgctttccacaccatcaaaggtcaggccgccatccagttcatcatggataatgtaggtgtagtcctcgtagccatccatagcagaggttttagaagtcagcttatagcttacggtttcacccatagcggcgttgttggcatcgacttctttgccatcttccacgatgaccttatccaggctcatgctctggctcttgacttcgatagtggtcgaatcgaccagcttgacgaggtacttggtgtaggattcattttctttttcgctcagtgagttgtctttgtctttgaccaggtagtaaccgggggccaatttgtcaaaggccatcttgccatcggccgtagcagttgccgttgcaaaaacacccgtcaggtggccgccgacgatttcgttgaaaatgtctgcggtctcggcattgttgtggttgttcagggcaacggccaccttggtggcatcgtttacgccagccaccagggtttcgccgtcatcgtacagggtaggggtagcttctttcaaggctttaatcataacatcatagcctgtttcgccttcatgaacaacgccagtgccccagttaatgtccgacagatagctttcatttacgggattgccctgtgcattcttaccagtacctacgctgaaagtaccttcaaagatctggtaggcttcataggtatgcccagcttcgggattatcaatggtcagggtgtacgtttcctggttgaccaggtcatcggccatggcgggcagtgcgcacataaaggtgaacagtaccgccagggccgcggtcaggagccgctttgctgttttcatttcttttgtcctccgttttctttatgctttttgaccagaaccagaattaaacctgcgcctgccgccagcatcagcaccagccaaaggagcggctggctgctgtcgccggttttaggcagatgccacggcccgatgccgggggtggcgggggtattctcctcgtccggctccagggtcgggcgcggtgttggggtgggatccgggctggggtagctgtggcgatccagtttggggtaggatgtcacttcgtactcccagacatccggctgggtctggggcatgctcagatccagcgaggcattgtagggcacactgaccagatagtccttggcgctgtaacggtaggccgcaccgttgagggcgggcagccgtaccagatacatgccgcacacaaggttgccggccgtgccggtatagcgggcggtggtgtcggtgcaggtctcgtaatttatctgcaccgttgtggcaggttccaggcggttttgctggatcagcttgaccgcctgtgcggctttttcgtcccacacgccctgccagacagaaccggggatgtgcccgttgtccggggtgggctgcggggtcggttccgccggggtttccgtggccgccggggtcggcgtggggttggcttcggcttcctgctgctgtttttcgtaagctgccagggcttcggccaccacgttttccaggtccagctcggcaaagtccggctcggtgatcagggagccgtccgccgtatagctgcctacgcggtacagttccgcatcgaactgccgcaccccgccgcaggacaggtccgccacgatgcttttctgcacatcggcggcgtcatcctcggcaaaggcgatcgtcagcgaggtttcccgcgtggtatccactttcgccgcctgcacgggggcagccagccctgttgccagggccagcactgccgccgtctgcagcagaagcatccattttcgtcttttcatcgaattttgctctccttgctgtttgtgtgtaggatcagctgtggttcttctttttgcggtggatggcggtcgctgcaaaggcagcggcggccaatgccataacggccacgccctgcagcagactgcggttcatgccgctgccgccggtgaagggcaggctgaagagataagaatcagtaatttccatgctgatctgggtcctgatgggcaaattcgattgctcttgttcggtcttgggcatcgtctccaggcagctgcctgcggtcataacggcgctggcggtgcttgtgtcacggccgtcacccgcggtcacatcaacgctgtaatcgcccgtttcttggtctggggtcatctcggcggtgtacagcaggttccccttgtcatcttccagcgtgatgatgggcagggtgttgccggtcttatcgcggtcgatgatggtaagtttgtactttaccgggtccttggcgtagccaaggggtgccttggtctccgccagggtgtaggtgcccgccgtaaggtcggtcaggcggtagcggatctccatggtttctttattctcacccgtgcgctggatggtctgctgcgacttgatctccaccttgccgtccagcagtttttccagcgggctggcgggctgcagggttgcagtaaactcggcctgttccagttccttgttttccacatcgctcagcttatggatcagaatctcgtagatgcgggcggtgtttacagccaccaggcgggttgcgatcacggaattatcgctttcggcaccgctgctgaccttttcggtaacctgctgctgcacgaagctgacattgccgatccaggtgtcaccatcggctcggacggtatcctgtttgagggtgtaggtgatggggccgttggcgttttccgcctgcaggggcaggccctgcgtagtctgccagcgcacggtgcgctcgtcggaatcgtcggtaaaatccacccctgtgcccacaaacttgccaaacagcgtaaggtcgcttgcatcctgtgctgctttggccgggtcgctgacggttttattggtcagggtatacacagcttcttccagttcattctcgccctgggtggcggccagcgtaaagtcgaccttagcctcggcggctttctttgcatcgggaatgttctgccagaccttggccaggcgcagctctgtataatagaagcctgcgttgatgttggtcttgtcgtcgcggccggtcagcacggcatcgcccagggtgattttcccactcatggcggcttgaagggtgttggcatcttcggtgccgtactgcggggccgtcttgttggaggtatcgcccatggcatcgcgctttgtcacgcttaacttgccaaagggcaggaccggtttgctgtcatcctccatcatgtagccattttcactgtccttaaacaggacgcgatagttgccctgcttcaggttctcaaatgtgtagcggccatcacttgtggtggtaacgggctgtacctcgttgcccagcgtatccgtaacggcatagtagctgttatcgccgtcgatgtaaacgggtttttcgtctttcgtattcggctccgtctgcaccagtgttacggtaatgcctgccagtgtcttgtccgagccaatgttctttttgccggtgtcgtccagtttggtggtgtaaataccgtcatagttctggtccatccaaaccaaaccgctgatggaacggctgcgcaccttgatggatgccgtggggctggtgagcagtgcgttgctctcgccgccggcacgggcaaagtagatgttattgtaggtatcattgctttgctgtaccgtgttgtcgatgtccgtcagcagggcatttacgtcatccttggtctgggtcacggccagtttcacatggactttaacaatcgcgttgggcaactctttcagttggatatacaggctgcccagctcgctcgtacccgttgccctatggatgggcatggtatccggggtaaaggtgacgctgttgccttgggtggttttggtagtaagcgacgttccgctttcggcattcttcatcgtagccgcacggtccagcacgtctttgttagtgtaggcaacggaatccgtaccggcgtacttcaccgtaatgtcatccgtacccaagttaatggcagagccatctgcattctggacggtaacggtaacggatttcaagccatacgcaccgtggaagg

SEQ ID NO: 7930 - DNA, 1537 bp, Unknown
  gut microbiota DNA sequence
attgtctgcttcgatatcaaggagctgggaaagcagctcaaaagcctgggtatgctggtgatccaggaccaggtatggaaccgtgtttcccaaaaccgggatcagggtaaatccacctggtacttcgtggacgagttccaccttctgctgcgcggcgaggtcggtacctggagcgtggagatttggaaacgctttcgcaaatggggcggtatccccacggggatcacgcagaacattaaggacctgctttcctccccggagatcgagaacatctttgaaaacagcgattttgtgtaccttctgaaccaggccagcggagacaggaaaatcctctgcgagcgcctgaatatctccaaccagcaggcggcgcatatcagcaacgcaggccccggcgaggggctgatcttcttcggcaatgtgatcctgccttttgtggatgacttcccgaaggacaatgaactttacagtatcatgacaaccaaacccggagaatcgataatatctgactcaaattgacaaatgcaaactatattttcagtaaagggtgtgatataattgtaaaaacgaggtgatgaaatggaagagttgtggagcaaaataagtggccttatcacagcagataatgttgcattgctgtccgtaatcataacggtgctaattttcgtgattagtcgtcgggcggaaattagatataaaaagcatgatgataagaaagtacagtacctaaaactcattgacctcatgcaacagacgctctctaaccccaagaaggataaaaagggagagcttgttttatccgatgaaacaaggcgactgtttttcgatacgggagcatcattgcttttatatggatcaaagagaatatatcgccaatacctactttttcgggaattcacaactaatcctctgattaagcaatgtaagtattataaagacagcattgtgatgttcattatggctgatatcttgaggaccatgcgtaaagaagtaggactcagctactttaacagcattggcgacaacgaagcacttgcattttttgtcaatgacatttcaagtaatccggtcgcaaaagaaaatgctatggatgccaaattccgtattaggatgattagatttgaacttgcaatgattgatagaactcggttcatctttataaagcagttttatgtgggttgtattaagccaatttttgcaggaatttcaatcgtcctaaagtatattgtggttatcccatttggtcgcctgattgcaaagctatttcccaaatttgctcaaaaagtgcaagaagaacgcaaaatttctaaataaagcttacacgaaaacccgcctgtaacaaggcgggttttcttacacccaaaatcaggaggtgaccaacaaaatcaacgctacattgacccacctgagcctgttttccggcattggcggtctggacctggcggcggaggctgccgggtttgaaaccgtctgccagtgtgagtgggcggattttccgcactccgtcctctccgcacgatggccggatgttcccaggttc

SEQ ID NO: 7931 - DNA, 2418 bp, Unknown
  gut microbiota DNA sequence
agggcagtgcgtcgcacagaatatcggcatagcgcgtattattgagatggccgttcatatcgcagcgagaatagctggcgaccggctcccctgccagttcgcaggcttcgggcgcggccttggtcatcttcatcggcagtgcaaagggcacatcctcggcccaatggtcggcaaactgctcagggtgtttgcgcagaatgatgcgcttgtcaatgtcgatgagcacccagcgactgtcaataacggcgacctcggccccgtcggcatcgtaaaaatgggtgatgcgcttattgacggcgcgcttgcagcactccggctgggtgacaagggtcagctcttcgtccacgcggggtgtgcggtcaatatgcaaagccagtttggccaacacaaaggccgttcgggtggcggtgtaaacttcatcggtcagcccggcggcttcggcgtgggtggtggcgatctgctgggcatagcgcagcaacgcaccgggctttgcgttgccaaggtggtcgccatcgtggcggtagacggtgaatttttgcgtgtaggttttgggtgcagcggacatagggtgctctccttatggtcaatagcaaagtcaacttatccaacagtatagcacgaaaatgcacaaaaagcaaaacgccctgccaaaaaggcagagcgctttgagaaatcagtaattatcgcgggactttttgcgcagcttgcgccaaatgttgaacgccgagatagcgatagccaccagcagcatgacaacgaccatccagccgttgccgccctcctcgtagctcttcatctcgctccactgggcgtccatggcagcgttgatgtcatccggcagggtgttgaaaacctcggctttgtccagtacttcctggctgggataggcaatctcgctgtacttgagatcatcgtccagttcctcccacacggccgtcaacggggtggaatagccgatgaaatcacagttggccaagccgacagaggtttcgcacaggtagttgatgaacatctcggcagcctctttatgcttggcgttggccgggacacacatgttatcgatgaagaagttgacgccttcctccgggtggacaaaggcaaggtcgggattctcgtcgatcatcgtgatggcatcgcctgcgtagtacggggccatggcggcttcgccgccctccatcttgtcaaagacttcgtccatgacgtaagcctgcacgatgttcttctgctctttcagcttttcggtgatggcggtaatctcgtccacagactgcgggttcatcgacaggccggctaccttggcggcgatggcgtaagcatcgcgggagttgttgaacatcagcacattgttggtgtactccacatcccacatgtcggcccatttcgtgggcggttcttcgaccatcgtcgtgttgtagataaggcccgtggtgccccacatgtaaggcacgctgtacttgttgccggggtcaaagttgcggtcgagataggtttcgcccacgccggcaatgttgggaatgttatccatatccaactcggccagcatgccctcgttgatcatcttacctaccatgtagtccgacgggaagatgacatcgtaggacacgccgccggatttcagcttggcgtacaggctctcgttggaatcgtaggtggtgtagttgaccttgatgccggtgagatcctcaaaggcagagacgacattcacgctgtcatcggagccatcggagatatataggccgttattgtagacattcagggtgatgtggtcgttggcaaaacgggtccagtcgtagtcgccggagacggagatgtcctcgttgacttcgatctcgtcagcagccagcgcaggtgcggcggtaaaaacagccagcatcagggcagcggaaactgctgcagcaaactttttcagtttcatcttcagcgccccccttcgtcctgcatcgccttgcggatggcgttctggttgcggcggtatgcgcgggaatccatcgcgttggagatgaggataatggccagaatgacgcagaagatgattgcagacaaggcgttgatctcggggctgacctttttgcgggtcatcgagtagattgcgatgggcaatgtctgcatcgtgccggagttgaagtaggaaatcatgaagtcatcaatggagtaggtcaggcaaattaggaatgccgacaggatggccggggacagctgcggcatgatgaccttgaagaaggcttgccgcggcgtgcagcccagatccatcgctgcgttgtacaggctggggtccagctggcgcagcttggggcctacgttgaagatgacatacggaatattaaaggtaatatgggcaatcaacagcgtgaaccagccgaagatgccgctctcgccgccgatgccaaaattctgcgccatgacgaagagcagcatcag

SEQ ID NO: 7932 - DNA, 3076 bp, Unknown
  gut microbiota DNA sequence
tttgatgtggtccgcgcgctgaaagacgtggaagtccccgcccccataaccattggccaggttttggccgaaaatgtggcgggcacaggcgtggacatcatcgctacaaaaaatattgcgcacgcctgattttgtggtagaatagggaaagtataagcgtatacagaaagcatagaggagaactgccatgaacgaaaccacccgcgccgatattgccattatcggtactgggcctgccggcgtatcggcggccatcaccgcccgcgtgcgcggcaagcaggtgctgctgtttggcagcaaagggctgacgaccaagatgaccaaggcccataccatccgcaactaccccggtctgccggacattaccggcaccgacctggccgacaaactcaagcaccatctggacgtgatgggcgtggagatcaccgagaagcaggtcacgaccgtctacgccatgggcagctacttcggcatccagacgccggatattatgtatgaggcctcgtcagtcattctggcgggcggcgtcgtgatgggcaaacctttccccggtgaggacgagctgctgggccgcggcgtaagctactgcgccacctgcgacgcccacttttacaagggcaaggcagtggccgtgctgggctacaacgccgagagctgccgcgaggccgactttttggccgagacctgcgcccgggtattgtatttcccggtcgtaccccacgaggtcaatgtcggccccaacgtaacggtggtgcgggagagggtgctatccatccccggcacgatgagggctgagggggtgcagaccgacaaagatctgcaccccgtggacggtgtgtttgtgctgcgggatgccgtagcgccggacaaactggtaccgggccttgccaccgacggcccccatgtagccgtcgacgcccagatgcgcaccaacctgccgggctgcttcgcctgcggcgatctggcaggcaagccctaccagtatatcaaggctgccgggcagggcaacattgccgccctgtcggcggtggaatggctggccgagcagaagtaaccttacaaaacaatgcaaaacgcccccagtggtccgcgatgggaccgccggggacgttttgttttgtgtggttatccctgcaccagcaccacacttacatcatttacattggtgcctgtagggccggtgaccagcagcccgcccactgcctgcaaggcgtggtaggcgtcgttatctgccagcacggcgggcacagtcaggccgtgtgcagtcagggcggcatccgtatcgccgtccgtgtagccgcccgccgcatcggtggggccgtcggtgccgtcactgcccaccgagaaaacgcaggcattcagccctgccagcgcaggggcggcggccagcgccaattcctggttgcggccgcccaggccgtggcccgtcaggtgtaccacggtctcgccgcctgccagaaaggccagcttttgcccctgcccggcgtggctttgggcgatgctgcccaaaaagcgccctgcctcccgggcttcgcagttcagccggtcggtcagcagcacgggggtgtagcccgctttgcggcaggcatccgccgcagcggcgcacagttcccgcacgctgccggtgattttggtggtcacattgtccagcgctttgggtgtttcctgctccagaagcgccgcagccgcctgggaaagctttaacccataccgtgcggcgatagccttggcctcggcgcaggtggagctgtccgggcaggcggggccgctggcgatcatatccagcgggtcgcccaaaatatcgctgagcacgatgctgtacacctgcgcaggggcgcaggccagcgcgaaccgcccgcccttgacgccggacaggcgcttgcggatggtgttcatctccacaatatccgcgccgctggccagcagctgggacgtgatgtcctgcaattccgcgccagggatcagcggcttttccaatagggcactgccgccgccggagagcaaaaacagcacagcatcctgcgcggtcagcccatgcaccagcgccagcgccttttcggtagcggcaaagcctgcttcgtcgggcaccgggtgggcggcttcatagcaggtcacgccgggaatctcgcctttcacgtggccgtatttggtaatgaccacgccgccgtccggccggcccagcacttctacggcggcatgggccatctgccaggcggccttgcccgcggctaccaaaaacacccgccccgccggggaaaagccctgcaatgcgcggcgcaccgcttcatccggcagcacggcgtgaatgctggcagttacaatcgtttcagcttgggcacgcagggtagtattcatggcaaagactcctttttataaaagtccggcggcggtcatggtacgcacagacccgtcccgggcggcacccgccgggggagtcagcgtgtagccgacccgtccgggattattatacagcaataccgatgtatcgggaatactcccggcaatggttttaaagtggagaaacaactcatcgtgggtcggctttaagaacatgggctgcagcacgctgaccgccgccgtgccgtttgccacggccattttggccaggcggcagcactttttggcgttgatggccccgatgccgaagtagaccggcacacgcccggcggtccggtccactatgatgcgcaggccgtgctccatctcatcctcctccagcatgtagaactcgccgttggagccaaaggccaggatgccagtgacgccgcccacgatgacgtaatccacctgggcacgctgtttttcttcatcaattttctcgtcctcatccacaatggtcaggatcgggacgacgacgcccttgatgaatcggcgttcatagcggttccctcttttcagcggcccagcgtttcagccctggtgcggactacaccagcgccgcctgcaggccgcgggccaaaatcagctcgcagccatcattttgtaaccttatcgcgcgttgacaagctgcgtcggtataggtatactcaatacagaaaggtgatagatggacgtggcccgtaccgccctgcgcaag

SEQ ID NO: 7933 - DNA, 23978 bp, Unknown
  gut microbiota DNA sequence
tgtcagcgtgttctgccgccgctaccagaccgccgccagcgtgcgtgaagtggactacgccaaggccgacggcgtggagttctactacggcatgcgccccacccgcattaccgacgacggcggttactacaagaaagtggagatggacgaggaaggcaacattacctccaccagcgaggagcagttcttcccctgctccagcgtcatcattgccatcagccagggcgcgcagaaccgcatcgtcagcaccaccaccggcctggagatgagcagccacggtctgcttgccaccgacgagaacggccacaccacccgtgaggggatttttgccagcggtgatgtggtgctgggtgcccggaccgttgtggaagctgttaaatactccaagcaggttgccgaagaaatggatgaatatttgacgaaacgctgcgagaaataatttttggtttgcgctttcggtgttccgccgccctgcggcggacacctcatatcgaggtgtccgaacgggccaaaatgctctacggtttatcctcgatacgacattacaaaagggcgatgcagttctccggcatcgcccttttgtgttgtgttatatggaaagtttctttgcctactttcttttccaaagaaagtaggtcaaaacagcaccacagggctggcgaggttttgcagaagggagacgatgctccagccggcgatctcggcggtgcggctgtagacgtcggaggtcactttcaggccgtcggtctccatggtgatgcagtggtcgtcaccggcaaagccttccacgctggtaatttttgcacccatggcgtcggggccgatgctggccaaggcggcggcgaccgccacgttcaccttcgtgggcaatacctggatggcctcggcagcggtgcctgccagcaccgtcttttctggcgtggtcatcagctcttcggtgaacagcggcgtgtttttcagcgacgccgggcctttgtgtgtgtggatctcggcggtgatgggctggttcttcgccttggccatcagggccaccgtgtgcagcacatcaaagccgcccactgcgccgtggggcaggtagatgcgcccgccgtgggccttggccgcggcgcaggccttggcgtaaaaatcggcatccgcaaaagcgccgatgctgatggggataaagcccagcccggcttccagcaccggcaggcagctttctttggccacctgcacggcagcggtctccaccacgtaatccggtttctgggccagcacctcgtccaaggtgacgcaggccgcgccgcccgctttggcgcacagggcctcggcgtccggcagcttgcggctcatcgctgcacagagggtataatccggcagcaggccgctggcaatggcatcggccacgatgctgcccagctggccgcagcccaaaatcgcaattttcttcataggggcacactccttcttgcttgttgccccccattgtagcatacggtgcgcaaaaagaaaaccgggacgcggcaaaacgtcccggtttattttttgcggcttttacagcggttacagaatctggccgtggcgcaccacggtctggatgttcagctggtcgtccaccagtaccacgttgccccatcggcctgcttccaggctgccatagtcggcatcgacaccgatgctgcgggcggggttgagggtggcggcgcggacggcgctttccagcggcacgcccatctcctgcaccgcacgcttcatgcagtcaaacaggcaggtggcgctgccggcgatggtgccctcctgctcggtcagggtggcgcggcggccgtgcacggtgacggcctgaccacccaggctgtactggccgtcgggcagaccgcaggccatcatgctgtcagcgatcagaatcacgtggtcgtcgccgaaggtgttgaaggtaaagcgcaccacggcggggtggatgtgcacgttgtcggtgatcagttcgacctcggcaccctcctccagcgcggcgataatggggccgggggcgcggtgggtgatgcccggcatggcgttgtacaggtgggtcatgtgggtggcaccggcggcaaaggcttctttggcggtgtcatagtcggtgcaggtgtgggcaatggaaatacgcacctcatcgtgacattccttgatgaagtccatgttgcccggctcctcgggggcgacgtccaccagcttgatcagcccaccgctgcgggcctgcagtcggcggaacatatcggcgttggcggccatcacgtacttggggttctgggcgcccacctttttggggctgatgtagggaccttccatgttgatgccgaccagatccgcgccgtgctcatttttatgggccgcagccacatccatgatgccgttcaggatctcttcgctgaaggtcatcgtggcggggcagatggccagcacacctttgctggcctcgaaatcggcaatggcctgcagacctgcttcgtcggcatcgcagaagtcatggccgacagcaccgtggaagtggatgtccacaaggccgggcagggcgtagctgcccttggcgtccagcacttcctcgttctcctgcggggcggcaccgaagacgatgcggccatcgcggatcaccaggtctttttccacaaaacggcagccatccgtaaaaactttggcatttttgataatcatagcggaaaacctcctgccatcagatcaggctgaatgcttcctcatcgccgaccaggataaagtcggggtgcatctgcaggatgctggcgggcacttcgggagtgacggggccgaagaaggctttcttcacgatttcagccttgcccttgccgttgacgaccatcagcaccttgcgggcctgcatgatggtcttgatgcccatggtgtaggcctgtttgggaaccaggtcctcgttgccgtcgaagaagcgcttgttggcctcgatggtctcgggcttcaggtcgacgcagtgggtgcccagctcgaaggcctcgcccggctcgttgaaaccgatgtggccgtcgtgaccgatgcccagcagctgcaggtcgacgccgccgacgctcttgatgacagcgtcatagcgggcgcactcgccctcggcatccatgttggtaccgttgggcaggttgatggcttcggggcggatgttgaccaggtcgaacaggttgcggtgcatgaagctccagtagctttcgggatgctccttgggcaggccgcggtactcgtccaggttgacgctggtgacctcggaaaagtccaggtcgcccttgttgtaccactcgaccagctgtttataggtacccacgggggtaccgccggtggccaggcccagcacgcagttgggtttcatgatgacctgagccgagatgatgttggcagccttgcgggacatgtcatagtagtctttcgcgcggatgattttcatagagatttcctcctaattattggggcgggccggtggggccgccgtttctccttaccttgtattataccacaataccgttttagaaaaagcagataaatgtgaattttatatcaaaatccgagcaattttgtgcaagctccaggcaacatttcataaaaagcgccgggggcaggcgttcagcccgcccccggcggaagatatgcggtttagataaagggaaccagaacctttaccaaggggcactgtaagcgatcacgcaaggcttacagcattttcttcagttcgtcgtacacaaactgaaccttggggccgataacgacctggcaggcagtcttgctgggacggatgacaccagcggcaccagccttcttaacagccttctcatcaacggcggtgtggtccttgatttcgaagcgcaggcgggtagcgcagtagtcaacgttggcaacattgcccttgccgccgacagcagccagaacgcccttggcgatggcagtgtagtcgttgttggccagggtgatgttggcctcagcggcttcctcgtcctcgtcctcacggccgggggtcttcaggtcgaacttggtgatggcgaagcggaacaccagatagaacacgacgaaggcagcaatgcccagaggaatgatcatccaagtattggcggcagcgggcaggctggcggagaagaccaggtcagtagcaccggcggagaagcagaagcctgcgcggaagccggagtagtaggtgatgatggtgaagatgccgtacagagcggcgtagacgatgtacagggggaagcagaggaacatgaagccgaactcgaagggctcggtaacgccgcagacgaatgcgcagatagcagcggaaacgaccaggccgatagcagccttcttgttcttagcagtctggaccatggccagagcagcaccggcaataccgaacatcatgcaggggaagaagccggacatgtacatgccgaggtcccagcccacatcagcggaggtgtcgccagcccagtagtggctcaggtcgcccaggccgatggtatcaaaccagaacacgttgttcagggcgtgatgcaggccggtggggatcagcagacggttcaggaaagcgtagatgccggcgccaacgccgtccatcttggcaatgccgttgcccagagcaaccagaacgccgaagatgacaggccagacgaacagcagaacgacagaaacaacgatggaaacaacggcagtcacgatagcaacgctgcgcttgccgctgaagaacgccagccagtcaggcagctgggtgttcttgaacttgttgtagcaggcagcaccgatgatggcggccaggataccgatgaaggagttgccggcgatcttgctgaaagcaatgtaatcgacagagccttcttccagggtacggacagcaccgacaacgccggggctgagcagctgctgcatcatcaggaagctgaccaggccagccagaccggccgtgccgtcgtggtcatcagacagacccacagcagcgccgatggcgaacagccaggccatgttgtcgatcaaagcgccaccggccttgatcagcaggaaaccaacggtgtacgcagcaccggaggtagcaccctcagcgcccataacggcgggagcgagtgcgtaaccaatgcccatcaggataccacagacgggcaacgcagctacgggaagcattaacgctttgccgagcttttgcagatacttcatcataaaagcattcctccaaaatatttaagtggggctgatctggttccgccagccgaccactttgttaaatatatgttaacacatttttacaaaaaagaaaaccccttttgttaaaattgccgaaaagacgaaaaactcacaccatatttggataatttgttaacaaagagaggattattgcccaaaaatcgtaagatatttaactttttattgccgtattcccgcggcttgcgaaaatttctttcgctttacagcgacgaagcgacgaagagaaaatttctttaaagcattttgcagggccgccgggggtgttgatgaggggcaggttgcaataaagacgcgtgattactataataatgggtatatattttgtagagtatagagggaggagcagcccatgcagccactatccacgcgcacagcgcattttacggattcggtcatccggcggatgacccgcatctccaaccaatacggcgcggtcaacctgtcccagggattcccggactttgacccgccccagactattttgaaccgcctggccgaggtcgcccacgaggatttccaccagtattccattacctggggcgcgcagaacttccgcgaggcgctggccgaaaagcaaagccgcctgatgggccgtgaaatcgaccccaacagcgagatcgtgaccacctgcggcagcaccgaggccatgatggccgccatgatgacggtggccaaccccggcgacaaggtcatcgtgttttcgcctttttacgagaattacggtgctgacacgatcctttccggggccgagcctatttatgtgccgctgcacccgcccacgtttgattttaacgtggacgagctggaagctgctttcaagcagcaccccaaggctttgatcctgtgcaacccgtccaacccctgcggcaaggtgttcacccgtgctgagctggaaaccatcgcggacctggccaaaaagtacgacgcctacgtcatcaccgacgaagtgtatgagcatatcgtctacgcaccttacacccacacctactttgccagcctgcccggtatgtgggagcgcactatctcctgctcgtcgctgtccaaaacctactccatcaccggctggcggctgggctacaccatcgccccggccgagatcaccgaccgcatcaaaaaggtccacgactttttgaccgtaggcgccgccgcgcccctgcaggaggctgtcatccccggcttgcgctttggccgggactattacgatgaactgctgaaaacctacacccacaagcgggatttgtttgtgcagggcctggatgccatcgggctggagcacaccacgccccagggcgcgtactacgtgctgatggacatttcccgctacggctacaagagcgacctggaattctgcgagatgctggcccgggatgtgggcgtaggcgcagtgcccggctccagcttcttccgcgaggatgtgaaccacttgatccgcttccattttgcgaagaaggatggaacgctgcatgaagcgctgaatcggctggaaaagttgaagaagttgtaacacaattgcgcatcctgccgaaccatggtacaatatgggcaatcttttggtataggaaaggattttttcgtatgggtatcgtagtcatcggtgcggtgtttgtggatattaaaggctatccgctgtccacctacatcccgggcgggcgcaacgccggccgggtcgagcaggtccacggcggcgtctgccgcaatgtggccgaggatattgccaatgtggagctgcgccccactttcgtcagcctggtggatgacaccggctccggccaggacgttatcgacaagctggccaaacataaggtgaacaccaaatacatcgagaaagtgcccgacggcatgggcacctggctggccgtgtttgacaacgacggcgacgtctgcgccgccatctccaagcggccggataccaccccgctgaccaggctgctggaggaaaaagacgacgaaatttttgccgactgcgacggcatcgcctttgaactggatctggaaaaggacaccgtcaagcagattttgcgctgcgccaaaaagtacaacaaaaaggtctacgccgccatctccaacatgagcatcgccatggagcgccgcgcctttttgcaggagatcgactgcttcgtctgcaaccagcaggaggccgggctgctcttctccgacgagtacgaccacatggcccccgaggagatgtgccgcacgctggccgctaacgtacacagcgccaacatcccctgcatggtggtgaccatgggcggcgagggcgctgtatatgcgcgatccaacggcgaaagcggcgttgtgcccgccaaaaaggtggatgtcatcgacaccaccggcgcgggggacgccttcttcgccggtacggtcataggcctgacctacggcaagacactgccggaagcctgcgagatcggcagccgtttggcggcctcggtcatctgcacggccgagaatgtctgcccccggttccgcccgctggagtttgggctgaacatccccgtggtggactaaaactaaaatttaatgcaataccgcataattctaagtgccgatacggcgagcgaggtgcggcagctgctaagccaaaagcgcagataatactttgtgtattatcgagcattttggcaacgcaggtgccgtgccgcagccgccggagcggtgcttaagccgtcaggcgggaattgtgcggtgttgccttaatacagtataagcaaaaataccgccgtgtatgccatttacggccacacagcggtgtcttttgtgcggttatgcgcagcttttcagcaaatagaacgcggcggcgatgagcagcagcggcagcgccagcttgatgatgctcccaatgagcaggcctaccaccatcagcggcagagccaccatgaacagcacagctgcgaccaccttggcggcgcaccaggctacccggaacgccagccccacgcttttgaagaagaaccaaccgaacagaaataaggcagctaacgaaatcatatgtattcactcctttgttgtgaatacgattatacacgcttatttattgcacaaacaggataaaatcagcaaaataacggcgctatttttctctgtggagagaaattacggcacttccgactccttattataggcctcagtgtcgatcctgccgttggccagcatcttttccacccaaagctgcagcgtttccaccgtgaccgagatgcgctccagctctttctggatgcgcacaaagtcgtcgatctcatccttgctgatggtgccgtcggcggcaatttcaattaaccgctcctttttgcggtccatagcgttgagggaggccagcattttcagcacgatgtccgaaagctcactgctgcggatctcgggcacgtactgctggccgatggggcactgcctcgcgcaaaaatagttgcaaagcgacggtgttttatacttttccgccatgatgagcacttcgtccggccggggcaggctgcgctcgctctcgattttttcgatgcgctcgggcgcgatggtctccagcagttcgctggctttctcgcgggaaaggcccagttcctcccgggtcaactggtagcgggtcttgttttcccgcgtggatgaacgtcccatgttgctttactcctctttttggccgtcggcgtaagcgccgatgccgatgtccgccactaccacctcgccgcaataatgggcagatcccggcatgtaatgcagcggtttggcgcggtggaaggtcacggtcaggtctgcacgcacggcaccctcagctaccgcgccggtatcggcgttgatgccgctgggcaggtccaccgccagcagcagtgcaccgttttggtgctgccgattcattaaatcgcaggctgcgcggcccgccgggcgcaaagtgccatggaagcccgtgccgtacagcgcatccaccaccgcatccgccggggcggcagatgccgcatcgtgcagaatttctatgggcagatcgcgtaatgatccaaaattggtgatagcgtcgggcgttttcggctcgccctcggccagcagcacctgcacctgccagccctgtttggcggccacccgggccatgacgaagccgtccccgccattgttgcccctgcccgccgccaccagcagccgggcggggccgggcaagcggcggcgcagctgggcaaaggcggcgcgaccggcgttttccatcatctgtatgtacaaaaggccgttgtcgttagcggctttttccagcgccttcatttcggcggcggtcacggtcgtatgggtcatggcgatgcctcccttttgggtagtacctgtatcatagcataaaaagggcggtgtttcaatggattccggcctggtttcgcgctttcccacggggcgggtcgggtaggatagaagaaaaacagatagaagaaaaacacaggaggatacactatgaagcattggctgggccgcacgccccgcacggtgggggattggctggggctggcgctgggtacggcactgatctttggcggggtagcacagctgcccgcgctggcggcggcgctggggcggctggccgtgattctgcggccgtttttgtgggggctggtgctggcctacgtgctggacatccccacccgatggctggcggccaagtggtttggcgggcggcgcggggccggagcggcggtgagttacgcgctgttgtttggcgcggcggggctgctgctgtggctgattttgccgcaattggcgcagagcgtgacctcgctgttcggcaaactggccgcctacgaggaaacactgcgccgtctgctggcctgggtacaggccacctttggcgcggataccgccacgatggacgcgattttgcagcagttgaccgcccggctgcaaagtgagttcacggcgtggtcgggccgggcagcgcaggctgcagccaaagcagcctccaacacggccggggcggcggccgatgcgggcattgcgctggccgccagcatctacctgctgctgggcaaggaaaagctgctgcacagcgcccgcctttgcctgcgggccgccctgccgtcccggacggtgggacagctggtcgcggtctttcagctggcggaccgaacttttagtgggtacatcggcgggcagctggtggacgcactgctggtgggcaccgagacctttgccctgatgctgattttgcggctggactacgcgccgctgatcgccgtgatggtgggcgcgaccaacatcgtgccggtgctggggccgtttttgggcgcagtgccgggggtgctgctgttgctgctggagtcgcccctgcaggcggcagagttcctgattattatcctggccgtgcagcagatcgacggcaacttcatcgcgccgcgcattttgggcggggccacggggctatccgggctgggggtgctgctggccatcgtggtgggcggcgagctgtttggcatccccggtatggtagccggtgtgcccacgctggccgttttggcagcgctggcacggcaggcggtgggcgccgggctgacggctcgcggcctgcctgaggaaccaccgcccgccccgcagaaaaaaactgttacaaagaaggaaaaaaattaacaatttgcctcttgcaccatgcccccctatgcaagtacaataaagtggataagccaaacgggcaatgattgagagaggcaaggaattgtgagcggaaagcattttattgacaaaaagccggaaagcatcttggattggatcgccatcgtatgcgccggtattgcattttacctgctgctgaacaacctgggctatttcctgggcgggttcggcgcactgatgggcatcttgtcccccttcttcgggggtatcgtaattgcctacattttagaccccatggtgcggttttcccacgccaaattgttgaaatattccaagcgctggcggtgggtagccattttgctggcgtacctggtggcggtgctgttgatcgtgctgctggcctggctggtcattccgcagatcgtaaacagcattatgacgctgtttaataatgtgccgcagtatatcaacggcatccaggaaatgctgctgttcgtccaggggcgctacggtgtggatctggaccgcgccattaaaatgctggatgattccgaggccatgctcaacgaggtctacagcctaggaaaaacggccctgccgcagatcatgtccaccatgggcaatgtggcgggcaacttcgtcaatgtctttacggcgattgcatccagcatctacatgctggcagacaaggagcacctgctgcaccagctgcgcaccgtgacccacgcgctgctgccccgccgtgcggccgagcagacgctgcgcatctgccactatgccaacgataacttcaccggtttcttcatcggcaagatcatcgactccgccatcatcggcgttattacctttgtctgcatgacggtgctgcggctggactttgctgtgctgatcagcgtgttcatcggcatcaccaacattatcccggtgttcggcccgttcattggcgcggtgcccagcatcttcatcctgctgctggtcaaccccatccaggcgctgatcttctgcatcctgattttgatcatccagcagtttgacggcaattttatcggcccgaagatcctgggccagtccatcggcatttcggctttgtgggtgctgttctccatcgtagtgggcggagatctgctgggcatccccggcatggtcatcggcgtgccggtgtttgccacgttgtacggtttggcgcaggagttcatccacgccatgctggaccgccgaggaatcgatgccgaaggcaacgctgctgccgaagaaattcctgatgaagataatgtgtttgaataaattttaattatgtgccctatcggccctgcctaccttgcggcagggccttttataatggcaggcttacctgggcctgccttttggggttctaaaaggaacacataacggaagaaagccgttaaaacgtgtgaagcgccgcagggtggcgcggaacgaaagccgccacataaaaaagcaaacaaaaaagcgcaacctgcggatacaggtcacgctttaagcgcaaaatagcttattcagcctggatagcgccggtggggcaaacgccctcgcaagcaccgcaatcgacgcaggaagctgcatcgacaacagccttgtcctccatgctgattgcaccaacggggcaggtatcaacacatgcaccgcaagcaacgcactcgctggaaacggtatgagccatcgtgaactccttatctccgtgctgaatggtattgtacccttaccggccctgcacggctgctccccggtatggcacacagcgggtttgctctgcctactgcgttatacatagtgtatcacattgcaaaaaaattagcaagtgccatatattgaaaaatttcgacggtaagtcgcaactaactatgcttatagtcccttattcgtcctctttatcgggggctttgggggcccgttttccgccccgcaggtagacgcattcttcccgtttatagatgcgcggtgccaggatttccacgttggagcgaaccttcagtgtgcccgccacaacgttcacttcaataaccgttccctcaccgtccggcgtgcgcacaatgctgcccgcctgcggcgtgatggaattcaggtactcgtagcttttttgttcataagccaaacagcacatcaggcgtccgcacgacccactgatcttggaggggttcaggctcaggccctgctccttggccatcttgatggacaccggctggaagtttttcaaaaagcggctgcagcagaacggctggccgcacaggcccaaaccgcccagcattttgctttcgtcgcgcacgccgatctggcgcagctcgatgcgggtgtggaactgggaagccaggtccttgaccagctcgcggaagtccacgcggttgtcagcggtgaagtagaacaccagtttgctgcggtccagcgtatattctgcgtccaccagcttcatttttaggccgtgggcggcgatgcgctgctcgcagatggtgtaggcctgctgcacgtcggcgcggttctggcgcatgcggcggatgtccaccgcatcggccacgcggatgaccggcttgacctcgcgggagaagcccggcacctcgtgggaggcgcgcacgacctcaccgcactcggtgccgcgggccgtggtaacgatgacgtagtcgccctccttgatctcgaaatcgcagggatcaaaataataggagcggctgttttccttgaattttacagaaattactttcatgggaagttcctttatctatttgtaagacaaaaatgccgttggtacatggttttaccgggcagcctcggcggcaaataccgccaccgccaggcgcaggttgccgttgcctgttacggttttgcgcgttgcagcgctgacttgtaagatccgcgcggcgcggtccggcgtcaggccgccgcactgctcagccccataggcggggcggcgcagcaccgcactgcacagctgatccagctgccacagcagggccagaaagctctcgcggtcacgctcgtacttggtcaccagcaccagggtgcggtaggtgtcgttctgggccgcgtagctgcacagctccttggcaaagcccagggcggctttgaacgtatcgttgcggaaggcctgcagtgccgtgccgatgtgcccctcgtacaaaaaagccagctcctgggccagccgggcgggcaggccctcgcgggtcagcaaggcggcgcattcgtcggtgggcaccggagcgatggtataggcggcacaccggctgcggatggtgggcagcacggtggcagcgctggtggcggtcagcacaaacagcacgccctcgggcggttcctcaataattttcagcatcgcgttggccgaggaaccgttgaggttctgcgcaccgtaaatgaacagcacgcggcccgccgcatcggtggacagcgccgagcgctgaatggcttcgcgcatctcccgaacccgcttaacggcaatctgcccgctggcgccctcgccctgcaggaccaggcactcggtatcctcttttttcagcacagcctcggcatgggggccgccctgggggtagaggtaatccgccgccaggcagcgggccgcaaagcccgcgccgcagcccggctcgcctaccagcaaaatggcgtgaggcagccgcccggcgctcagggccgcgcccagctctgactttaaggccgtgttaccggccaggcgttccagcatcacagcttttcaaaacgctccacgttggtgaccatgacggtagcgccgcccacggtcacttccatgggcagggcgctctcgatgcccagacccagggtggcggtgccgggcacgatctcggtgcgctgcttgcagcactgggagatgatgccgatgcagtcgtcgaccttctcatcctcggtgcagatgagaagggtcatgttgcctgccatcaggaagccgccggtggtggccaggcgggtgacgtagaacttgtttttcaatagctggttgcagacgtttttggaatcctctttattgacgatcgcagtgatcagtttcatggtaattactccttttatctttttgcgctcggggcgcgtaaacggtcagcggttgcggttttcccagtcgcggcggcgcttgtagccggtcagggtatcgcggcaccagtcaaacacctcgcggccaaagaacaccaggaagcccagcaggctcagcaccaggctgatcttggtggtcaggctgcccatcaggaactgcacgacccagacgaacagctcgtaccagcccaggtacttcattttaaaggggatgatgccgaacagcagcacgccctgctccggccacatccaggtgtaggcgaacatcatgctcaggaagatgccgtccggcgaggcgccgcccgccaaaaagcagctgatccaggcgcccagcacgcccagtgcgatgaagagcgtcatgcggaaatcgccccaggcacgggtgagcgagttgccgatccagaagtagaacaccagattcaggatgcccagcgcgccgcccagccacaccggctggaacaaaaacgtgatgagccgccagatctgcccgtgcagcacggcgctgcggctgagggagatgaacccgctgaactgccagttgatgagcagcacgatgaggcccgcggccagctggccgaccataaggccattgacaagataggggatggcaaagtggctgtagcggcgctccagccggtcgatccaattgttcatgggcaaagccctcctgttagttaaatatataccaatttattgtagcattttccacggggaagtgcaacagttctcttgtcggaaggtggcgggggcgaaagttttccgcagcggtgtttcgtgtttccacggggttttccaaaggttttcgaccataggcacgtgcaatgggggaaagttttccacactttcaacagggttttcaacaatttcaacgtggataacccgtatacactgtggataactgcccctgaatatacacttcgtgaacagggcatgaacagagtgtaaaataaaaaagaggagcgaaaatggccaaggtcacctagttaaacaagcaaatccctctataccaacgtaagaagtagtgcagagggattttttcttctaaatacttgacaatagacgcattgtatggaattcttccgaagtaaaatcagtttacctgttgctgaagccttgcttatgaggttcatctctcccagtgttatttttcttgaaaacacaaataaatcagcccgcggaatctttgatggggaatcctgcgggctggtttctatttctttttggtgctgactaggtgacattgcctctgggagaggactccccgcggagcgggtggggggagagacagctattttatatgctccctccctcggtcgcctgcggcgacagcgctctcccggagagagccaataaggcgttacttattcttactcccgcgtcgtgcgctcttgccggcggcctttttgccggtttgggtgcgggtggtcttggcggcggccttcttgggggcggaacgggtcggcttgggtggctcagcggtgcgctccagcagacgatccggcacgggatccagcttccacagctggttctcaccgtaaacgtcctgccagatctgggcctgggtgccgttttccacgcgcatgcccaccaggtcgatgaccttatcggccagcacattgcgcagttttaccttgccgccgccggcatccacgatttgccagcgctggcctgcgccggacgtggccgaccactggtgtacccaggtgccgttctcgacgccggaaagcgccaggtccatgaccttgccggtaaagcggttcttgatgcgatattcattctccccggcctctacaaaaaaccattgctgccagggctggccctcgtagctccacaggcgcaccgaagcgccgttctcggtgttgaaatcagccacctccagcacgcggccgttggcagcagcgatggtatagcaggcatccgggcggatgacagtttgggcggatttcttcatggggattcctcctttgcaagctgcgggtgcagcttctttttctcattatagcatggttacgccgcgcggtttagctaaactttcacaacttggtttgtgaaaattgccggattgggtaaaagatgtgcaaatttttaacaggttttaggctgcgggacttgctttttttgcacaggtatcttattataataaataattcgtacacgccgtagcgtatagtaaacgcttacatactcccagggagggaacagcaatgaggatcgccttgatcgcccacgattcccgcaaggaattgatggcgcagttctgtactgcatatgtccgaatcctgtcggaaaatgagctggtggccaccggtgtcaccggtaagatcgttcacgacgccaccggcctgccggtgcgctgcctgtatccgggcgggcgcggcggctcggagcagatcgcggccatgatcggctgcggcgaagtggatatgctgctgtttttccgcgatcctgtgggcgccaaacccggcgagcccaacgatgtgaccctgctgcgcctgtgcgacatgcacaccatcccggtggcgaccaacatcgccacggccgaggtgctgatccatggcctggagcgcggcgaccttgcctggatcgaactccagcgcggccgcaaataagctgataaaaagtaagtccccggtgcgtgatgcgccggggactttttgcgtataggcgtggaattattggtagacgatggctttcttgacgcgggcggcggcgtcagcaccggccagctcacgggcgatagccaaggcaaaggggatggcagcgcccagggcctcgccggtgatgatgttgccgtcgatggtcagcggcaggccggtgtaggcggccccggcggcggtcaggtcggcgtccatgccagggtagacggtggcttttttgccctgcagcacgccgaaggcggccagcgcggtgggcgcggcgcagatggcacagacctttttgcccgcggcagcgaaatccgtgcagacctgacgcacggtggcgtcggctttcaggttgggcacgccggggatgccgcccggcaggatgcaggcgtcgaactgggcgtagtccagctcctcagccagggcatcggccacgacgttgacctggcgggcgctggtaacgatgcgctccccgcccacagcggcgatggtgacttcgacccccgcacggcggagaatatcaacgcaaagcagggcttcacattcctctaacccctgggcaaagaagattacggcttttgacattttgggttcctccttttttgtgtttgcggctttcgtttgccgcctcgtcagaaataataaaactttaggcaacaccgcacaattcccgcctgacggcttaagcaccgctccggcggctgcggcacggcatctgcgttgccaaaatgctcgataatacacaaagtattatctgcgcttttggcttagcagctgccgcacctcgctcgccgtatcggcacttagaattatgcggtattgcctttacccctccttccatccgaacaaaaacttaaagcaccgtcccagttgtttccgccaatcagcttcacaatgctttccattcatctgcaaataagggtacacctcggcacccttgccgcttaacccgcgggtaacggccaaggcgttggcggtgtactgggccagctggtgcttgcctttgccctctttttcgccccagctgaggtacacccgcgtgtccggggcaagcttggcctttttcagctcggccttgacctgcggcaggcagatgcgtaccgacggcgacaggcatgccgctttgctgaataccttattataagcagtgatcgcgtacaggctcatcaggccgcccatgctggagcctccgatggctgtgttcccgcggtcgggcagggtgggatacttggcgtcgatggcgggcttcagttcgttcaccagccaatccatgtactgtttgccggtgccgtggatgccgtcgaaccaatcgctgtcgtaggggcagtattcttccaggcgcttgtttccctcgtggttgcactcgggcgcgaccacaatggcgttggggtgggcgtccagatagtctttcagcccccagcaggtgccaaaggtggcggtggaatcaaaaaacaggttgtggccgtcaaacatgtagatgacgggatagcgcctgccgctggtctgccaattatccggcagatagataaaggtgttgcggtccaggtcatagggtgtgatgtggacggtaaaagtctcaaccatgatgggatctccttttaggtcattgttgccattgtatcgcattttccccgcgttttcaatcattgtcaacgttttccccgctttgggttgcaattgtggggcggctgtattataatcaccttgacccttgtacaaaaatttaacaagcagagagaggaaaagtatttatggaggcagtaagtacattttttaggcgcaaagatgttgtcatctcggcgcatcgttacggcatcgacgccatgggcgccatggcccagggcttgttcgccagcctgctgatcggtaccatcatcaagacgctgggccagcagctggggcttgcgttcctggtcacggcgggcggctatgcggcggctattgctggcccggccatggcggcgtccatcggttacgcattgcacgccccgcagctggtgctgttcagcctgatcgctgtcggcggcgcggccaatgaactgggcggtgcaggcggccccctggccgtctacctcatcgccatcatcgccaccgaggtcggcaagctggtcagcaaagagaccaaggtcgacatcctcgtcaccccggcggtcaccattttggtgggtgtgggcctgagcgccttctgcgcccccagcatcggtgaggtcgccagcgctgtgggcaacgtcatcatgtgggccaccgagctgcaacccctgctgatgggcattgtcgtttccgtgctggtaggcgtggccctgacgctgcccatctccagtgcggccatctgcgcggccctgggcctgacaggcctggcaggcggtgcggctgtggctggctgctgcgcccagatgatcggcttcgcctttatgagctaccgcgagaacggcgtcggcggcctggtcagccagggcctgggcaccagcatgctgcagatgcccaacatcctgcgcaatccccgcatctggatccccccgacgctggcggcggctatcaccggccccatcgccacctgcctgttccgcctggaaatgaacggcccggcggtctccagcggcatgggcacctgcggcctggtgggccagatcggcgtctacaccggctggatcgaggccggcaaggccgttaccgcctttgattgggtgggcctggtgctgatctgcttcgtcctgcccgccgtgctgagcgttgttttctgcgagatcctgcgcaagtggggctggatcaaagacggcgacatgaagctggactaaactgcaataactcgcaacggggagcacttcggtgctcctctttttgctttgtataggcattttgcccatgcatgcggcgtggtgtttttgtggaaaactgcctttgaaaaaacgcgaaaagatgtggtaaaatactttttgcaaacacaaggagaaaatctacctgcccactggtacggccgcctacctgcgcccgccggtcacgccgcaacaggccgaagcctagtgtggcggcgtttaccatacatacaaaagcataccaaccccgcatacaggcccgccgcctgcgtgcggggctttttatatccgcgcagattgcacgcaatgcccggctatgctataatacccttatctacgactatatcccggcaaggggaggaacgatatgaaaaaacaaaacacagcggtccggcgggcggcgctggcggtgctgtatctggccgtatttgcggcggctgttatgtacctgcgggtgaccatcagcgtaccggccgagggcgacgacaagctgaccctgaacggatggctgtacgatatgggccgcatgtccttctggcagtatgccttgcaggacctaaaggagcggctgagcttctttttattaaagcaggtgcggttcttcccgttccactaccccaacgcggtggcgctgctgttttaccgcacgctggccagctaccggttgtacatcattgccatgacgggcgcggcggctttcctggtcagccgcgtggcggcaaagctcagccgcagcaatgccctggctctgggcgcctttggtctggcgctggcggcggctcctatttttaacgagggcatgtacagttactacgccgtgccccagcgcacgctgctttgggcggcggccggctggctgtgcctattttacctgcacgagtcccaccatcgcgcctggggcgtggcggcggccgtgctggcgtttatcgcctgcggcacttacgagaccggctatgtctacgccgtgctggcgctgctgctgtgggtggtgtacacccgcagtgtgcggggcggcctgcgggcctcggccccggtgctgggcggcatggcggtggcgttttgcttccactttgccagctcccgccacggcggcaccggcaatgagctttcgctggacatccccaacgtggcccgtgtgaccgtgcagcagatggccgcgtccatcccgtttctgggtccctggctgcaggggcaggattgcggcaccatcagcaagggcgacatgctctggccctttgtgctggggctgctggctgtagcggcgctgctgtttgccgttcccagggaaaaggtcagcggcaagtccctgggcggcctggccctgctgggcctggggctgtgggctgccccggcggcgctgctggccctgtcggcccgctaccagcagccagaggccatcacctggaagtggggctacatccccgcggcggccagttcggtgggcctgggcctgctgctggcggcaggcgtggcggcgctggccgaactgtgctgccgtctgccgaaagttccctcagccgtgctgcgcgctttgctggcggtggtgctggcggcgggtattgccgccaacggcgcgttcacccgcggctgtctgcgcaaccaccacgctgagaacctgaaagcctacaacttctttgccgataccatccgcgccggcctggccgatgaggtcacggccgacgacctgatcctttgcaatgagaacgtctgggacaccaatacccaggccgagacgaatttcttctgccgttttgccgggcgggaactccacgcccagatgccgggcatcgagctgcccgccggccacggcacgctttacgcctaccagacctaccgtaactacggcggctatgacctggcctggtgcggtcgcctgaccgacgacaccggcgaggtgatggacggcatgcgggtctacgtgcagggtgcgctggtgccggacaatgcggtcatcaagtacaaggtgcgcctggccgacggcaccgaggaaccccgccagatctgcctgctggactgcgaccgcaccccccgcaatgataagggcgagtacatcgccacggtggaggacacctccatcctgaacgccaaagtcatgatctgggacggctgaggaggcccctttgtatgaaaaaactgcgtgaactgctgcgtgccaaccgctggtttgccgtggtgctcctgctggaggctgctgtgctggcctcgctggcagcatcgctgttcggcgcaccctacaaactgcagctgacctcggcggattttagcaacgactacccgcagatcgccgctgtgagcgaggacgggacggcgctgcaaatctggaacaacagcgaggattttgtcccgccggagggaaaagtaatcaccttttcttcggcaggcagtgccatacattccggcgcgtatgaggtgacggtgcagtatttctcctgtgagacaccggacacaccgacctttaatgcactgcacagtgcgggctcgctgtctttttccagcaagggcaatccatcggctgtcagagctgataccgtaacgctggacgactgccaccgcaccattaccactcgtctgtgggtgaactacggggcaaaggtgcaggacctgacggcgaccctgacttacggcgaagggcagctttacctgtacggcattaccctgaccgagcagcccatctaccgcctgacccggctggtcatcttcgtgctgctggcggcggtgctggacctggcgctgctgctgttgtttgcctgcggggacacgaatgccccgacgcgccgccgcaagtacgcggtgccgctgatcctggcgggcatcacggtggcggcctgcctgccgctgttcagcaactatctctacttcgggcacgatatagactaccatttgcagcgcatttcggccatggcggcggagctgtcctacgggcagttcccggtgcgcatgaccaccgatacgctgaacggctacggctatgccaactcgctgtgctattgtgaactgttcctgacactgcccgccctgctgtataatgcctggctgccgttgcgtacctgctatcaggtgtacatctttgtggtgacactgtccaccgccatcattgcctattgcagctttggcaaaattaccgccagccgcaagctggggctgctgggtgcggcgctgtacacgctgtcctgctaccgcctggtctgcacctacatccgcgcctcggtgggtgagtacacggccatcactttcctgccattggtgctggtgggcctgtataatatatataccaccgagaagccccgctttgcccagtgggcgcccatggcctttggcatggcggcgctggtgcagtgccatctgctcagctgtgagctgatcgcgctgcttctggtggtgttctgcctgctgcgcctgcgggataccctgcgccctgcccgcctgctggcctgggtcaaggcggcgctactggctgtggcgctgagcgcctggtatttcttcccgttcctgatctcgacgcacgagatcaatttgatggtcaacggcccgctgatcggcaagatccagaaccagggcacctatctggtgcagctgctcagcccgtttgggccgggattcggtggggcggattcgggcacaaacccggatatgacgctgtcgttcggcctgccactggtggtggggctgctgctggtgctttactgcctgctgcggcgggaaagctggcacgaca

SEQ ID NO: 7934 - DNA, 1616 bp, Unknown
  gut microbiota DNA sequence
gcctgcgctggtatgtgaaaggctatcagggagaaaacaacatcctccgcgcggcggccgccattatatgggacagcttgcaggagaaacaggcgggataaccggaaaggaggccgttttgcatgacctcatcttccgatacgtttccgtttggcattgccgatgtagtagaactgctggggcttactgtccgtcgccgtctgccgtcgagcctgtacttaaactgccccttttgtggggaccagcgcgggcggctcaacgtcaacacagacaaaaacgtctggcgctgcaaccgctgcggcgcggcgggcggaatgctggcactgtatgcccgctataactgcaccggcaatgccgatgcctaccgcgagatttgtgaagcgctggggcgatacacaccccggccaagggtgaatgactgcatcggggtaaagccagagcaaaatgtccgcgcaaccccgcaggagatccatcagacctactcgctgctgctctccatgctaccgctgacacccacgcacaaggcgcatctgctgtcaccgcggcgcgggctgactgaggagcaaatcgtaaggctcgggttcaaatcaaccccgcctacgtttctgtgccgcagttatgccgagcgtctgcggcggcagggctgcaccttgcagggtgtgccgggcttctatacggacaatgccgggcggtggacgatcaatttcggcagccgcacggcgggcatcctgctcccggctgtcggtatggatggtttaatctgtggtatgcagatacggctggacacgccgctgcgccgtagggatgacccaccgggtaaaagcggagcaaaatacatctggctgtcttctatcggcaagccgcatggtgtgacctccggcagtccgctgcattttgtgggcgaaccgtttgccaagaccgtgtatgtgaccgaaggactgcttaaagctgatattgcccactgcctgacagggcgttcgtttgtcgctgtggcaggggtgaacagcttgaacggtttggaatccgcactgcgctgcatggcacagaacggcaccaagctggtcgtggaagcctacgacatggacaagtcagagaatgaatatgtggcagacgccgccgaaaaggtacagcagatcgcccatacagccgggctgcaaagcacaagccttgtctggaatactgcctacaagggcatagatgactggcagcttgctttgcggcaggaagaaacaaaagaaaaagcggcttgatgccgcgcaaagttatggcagagagctaaattgacggctctctgccttttttagaaaggacggaatgatgggtatactctctgaaatggatatgatgaaccgcgatgccgaggatgatgcttttgaggtgtcctcggacagtgaaactgtagattctttcagcgaagaatttgagccggttgaacccccaaagccagacccgcaagcggaggacgcggaagaagcccgcaaaaaggctgaatttgatgctgccgaagccaagcgcaaagccgaatgggaagcaaaacaggcacagaagaaactgcgggagcagcaggagctggaccgtcttgccgctatgtcggatgatgacgtgatgcaggcatc

SEQ ID NO: 7935 - DNA, 5310 bp, Unknown
  gut microbiota DNA sequence
gtgatgacaggctccttttgcgtattttaaattttctattgctttacaggatgcgcacgcggatggcggcatcgatgccggccagtttgctggtcaggtcgggggtaacgtcgccggtcacatccagcagggtgtaggccacgtccttcttgctcttgttcaccatgttttcgatgttcaggcgggcggtggtcaggatgctggtgatggccgagatcgcacccggcgtgttcttgtggatcatgcagatgcggcggccgcccacacggggctggctgacgtccggcaggttgacgctgtgggcgatgttgccgttcttcagatagtcgctcagttcggcggcggccatcacggcgcagttggtctcgctttcgggggtgctggcgcccaggtgcggcgtgcagtacacacccttgacgcccagcagttcctcagccgggaagtcgcagaagtactgcgccaccttgccggagttcatggcgtccagcagggcctcagtgtccaccagctcgccgcgggcaaagttcagtacgcgcacgccgtccttgcacatcgaaagggtctgggcgttgatggtgtggcgggtcgtgggcaggtaggggacatggatggtcaggtagtcgcagcggggcagcatatcgcccagcgtcacgcagtgctgtacgctgcgggacaggctccatgctgcgtcgatagaaatgtaggggtcatagcccagcacttccatgcccagtgccacggcggcgttggccacacgggcaccgatggcacccaggccgataacgcccagcgttttgccgcgcagttccgggccgacaaactgcttcttgcccttttccacatccttggcaatggtctcgctgcctttcaagccctgggcccactggacggcgtcgaccatgttgcggctgcccgcaaccagcgcaccgatgaccagctcggccacagcgttggcgttggcgccgggggtgttgaacaccacgataccggcgttggtgcattcctcaatggggatgttgttggtaccggcacccgcgcgggcgatggccagcaggctgtccggcagcggcatgtcgtgcatatcggcactgcgcaccaggatgccctggggagcggtggtctcgttatcgacctcgaactggttgaccggcagcttggccaggcctgcgggcgagatcgcgttcagcgttttgatggtatacataaagaacccctcttacttttataaatgtgacgccttaagcattttccttgcggaacttctccatgaagtcgaccagcttgtcgatgccctccggcggcatggcgttgtagatggaggcacgcatgccgcccaccaggcggtggcccttcaggttgacgaacccagcctcggtcgctgcggcgcagaacgccttgtccaggtcgccgttggggctggtgaaggtcacgttcatcatgctgcggtagggcttctcaacggggttattgtagaaatcctgaccgtccaggtaatcgtacagcaccttggctttggcggcattgatcttctgcatgttttccaggccgccaatctcgttctcgagatactgcatgaccaggccggtcatgtagatgcaccagcacggcggggtgttgtacatgctgtcggctttcagcagggtagtgtagttcatcatggtggggatctgctccggggtcaggcccttggcgctcttacccagcaggtcctcccgcacgatggccacggccataccggcgggggcgatgttcttctgcacaccgaagtagatgacgccgtatttgctgacgtccaccggctcggagcagatcatcgagctcatatccgccaccaaggggatgccatccacctggggcacgtccacatacttggtgccgaagatggtgttgttctggcagatgtggatgtagctggcgttggggtcgtagtcgatggccttcacgtcaggaatgtaggtgaagtttttatccttgctgctggcggcgatgcgggccgtgccgaacttggctgcttcctccgctgcctttttgctgaagttaccggtgacgaggtaatccgccgtgccggtggtcataaagttcagcggcaccatggcaaactgctgggtcgcgccgccctggaaaaagccgatcttataattgtcggggatgttcaacacccggcgcatggcagcctcggtgttctggatgatctcatcaaaccacttactgcggtggctcatttccatcacgctcataccggaaccatggtaatccagcagttctgcctgtgcggttttcagaacagcttccggcagcatcgaagggccggcgctgaaattataaactctagccattttccttttcctccagtaagtacgttaaaaatgcagcccgctggcggcgaactgcatcatctgccgcgccgttgcggtatggcattattataggccgcaccgcccgccccggcaagcgtgcaaaatactgaaaaaacagccgcacaggcggttgtgtttctgtaaaacggctagttgtattttgtccagaaacactatattctacatttgtaaaacattttctatcatccgatgcaatcaattgccaaaaatttggtcattttgccatcttgcattttaatctactacaattgtaaaatatatttgcaatagttattacatttgtaggagatacagactatggaacagttatcccgtagtgaagagcaggtcatggtcgccctttgggcctgcgagcaagccgccacgcggcggcagatcgcagccaacctgccagccgagtgccgttgggccgactctacgctgttgaatttcctgcttcggctggagaaaaagcactttgtccgcaccgaaaagcagggcaacaaaaacctgtacaccccgctggtgcgccgcctgacttattgcggcgcggtgagcagtgtccacctgcaaacgctgtacggcggtgacctgcgcaggatggtacgcgccctggccgacaccggccgtctgacctacgccgacaccgagcgtctgctgcgctggctgggggagtaccaggccgaaaacccggagtacgactacgaatagctgcccgcttccttatatataaggttcacgcatctccaccatgccgccccagaagcgcttgggcgcgtggctcatctgcgctttggcgttgcggcgttcctcaatcgtcagggcgtggaagaaccgtttccacagcgcctgccagttcaactcgtcggcatcgcgggcgggttcgtaatgctccatagccaggtactgcacatggccgctttgccgcagcagcgccgtgccgtgggcagcgtcgaagatcaaaaagtcctcatccggcagacggctgcaaaaatgcccgcgcagcagcggcagtacgttgttttttgggtggatgaccgaaccgagcatgccatccttttcctcaaagcggataaactcgataaaacggcagacctcgttattgacattgcgctccaacacaaacgccgcgtggacatccgggtcgcccaacatctgcacggcgcgggggccttcgtcaaagcaacggcgggcgaaccgcagcaagatcagatccttttcttcttctgtggagaggaaaccggtcatcacgcgctctctcaccatcggtcccagccgcgtcaagccgttggccacgcgcctggcgtgggtcgggtcggtggcgatggtctccgttccaaacagcgtaatttgcccttcggctggtcccagcaccgccgagggtatctcgcgccgggtgtagctttcaaaaatacagcagagaaaccccgcatagctgccgtcgtagcagtaggcagcgtcgctcacatgcgccgggtaaggcatgtcaaggcctcctctcgcaccatgcgggccgcagccggagccgccacaccatgggccgtcagctggtggacggcaggtgccgcgtccggcagggccttgggcacaaattcatccagactcaactgctgcacccccacactgaacgccttggggtccagcagcgcgtttgcaatctccgcccggttggcgtgggccggggcgcggccattgcaggtgataaaatattgggcgcgtttcagcaccacgccgatgcgcttcagctccggcatccccaatttctgcacacggcgtgccgccaaaatgcgcagtacgcttttggggccaatgcccggtacccgcagcagttcctccttgctggcggtgttgacctccaccgggaaaaacgccgggtgccgcaccgcccaggtacacttgggatccaggtaggggtcaaagttaggttccgcctcggtcagcagttccgaggcgtggaagttataataccgcagcagccaatctgcctggtagaggcggtgttcccgcagcagcggcggctgaaagttcagtgcgggcaggcggcggtcctccaccaccggcaggtaggccgagtaaaacacacgtttcagcgcatactttttgtataggccttccgtcaggtccataatgtggcgatccgtctccggcgtcgcaccaatgatcatctgggtgctttgcccagccggtgcaaaagcaggcgcgttcctgtataccgccagctcctgcttgctttgggcgctctgcacagcgatctgccccatggggcgcaggatcgccgttttctttttatccggggccagctggttcaggctgacctcgctgggcagctcgatattgaccgagaggcggtccgccagcagcccgatgcgctgcaccagcagcgggtccgcaccggggatggtcttggcgtggatgtagccgttgaagcggaactcttcccgcaaaatgcgcagtgcttcaatcatcagctccatcgtgcggtccggcgtgtccagcaccgcgctggacaggaacagcccctcgatgtagttgcggcggtagaagccaatggtcagctccgccagctcccgcggggtaaaagtagcccgcgggcggtcgttggagcggcggttgacgcagtagctgcaatcgtaggagcagacgttggaatacagcactttcagcagcgaaacgcagcggccgtccggggtaaaagcatggcagatgcctgcctgtgcgcagttgcccaggctgccgtgctttccggcacgctccacgccgctggaggtgcaggccacatcatatttggcgctgtcagccaaaatttccagcttttccgcaagatccatcgctgtttctcctaaaaaagggtataaaaaatacagcccgccgcataacctgactgtttacaacagccagcgatgccgcgggcagcatttttatagagtataaaattgtacttttgccctggatg

SEQ ID NO: 7936 - DNA, 27743 bp, Unknown
  gut microbiota DNA sequence
gctacaataaaatcagagggcaggaatcaccacttagccttggtctccaccactttaccggcaatatacaggtggtcaagttcctcgcccttgatgaccaattcctcgtaggcagggttgaaggggtgcaggatgaccgagttgccgcgctggatgtactttttcagcgtgccctcgccgtccgagccgtagaccaacacgcccaggtcgccgttttccagcgtgctctggcggtggacaagggccaggtcaccgtccgagatgcgcggctccatgctgtcgccctttacaaccaggtagaagtagttctggggatctttaacgctggcatactctttgccgtagtcctcctcaaaggcaagggcgccgtaaccggcgcgcaccgtgcccacaacggggacaaggctctcagtatagcggctgaaggcgttgcggcccacagccggggcagccgtgggggcctgctgcaggcccagcagggcatcggccgttgtatccagaatttcagccaggcgggccacggtctgggggtccggggtggaacggccggtctcccacttgccaacagcctgctgggtaacgccaagcatacgcgaaacctcggtctggctgtaccgtttagcttttcgggcatctctcaggcggtctgcaaacataacgtactccttttgccgggcgacattttcctctatcttgtggtcaggcctttactatttgtcctcattatacaactgcaaggcgtgtttgtaaagagttttttgaaaaataattctaaataaagttgttgaagcgccttgacaacaactgtcagtagtattatagtagagatacagaacaacgcggtgtcctttacaaccgcacaacagccggatttgcggtacggcttttctgaaggaggaactttatcatgaacttccacactgtaaaagtatggctcagcaagctcatctccaacctggtgctcatgctctttatcattctggtgcccgccgtggcatctggcgcggtgccgttctgggcggcggtcatcgtggccgctgcgggccttgtgggcctcaatgctgcctgcggcgtcttgctggagaatcagcccaacgcccgacccaaggcagcccccacccctgcgccccagcgccagcagctcgttttccgcgttgtgcggggcggccgcgccgcctgatctcgcgtaccctcggtgtacccgggtgcatataaccggcagtccccgtgtgccctggcgcgcggggattgttgttttccacaacctatgttacaatagcagcagacagggaggagataccatgaaaaaacttctggaagtctgtgtggacagcttggcctcggcgcgcgccgcgcaggccggcggagccgaccggctggaattctgcagtgccttagccgtgggcggcctgagcccttacccagaactgctgcgtcagatcaaggccgagtgcagcctgccggtgcgctgcctgatgcgcccccgggcgggtgacttcctttatacaaaggacgagatcgacctgctgtgcgcccagatccacaccttgcgggatactggggcagacggcttcgtcatcggtgcgctgacccccgatggcacgctggacaagcccgccatggcccaattgctggatgcctgcggggataagcccgtcacactgcaccgctgcattgatgtttcctgcgatttggtggaaacctatcgtgacgccgccacactgggtattgatacgatcctgaccagcggcggtgccgccagctgccggcaggggacagccgccttggccaagatgcttgccctgcggaacgagctgcaagggccggaggtgctcatcggcgcaggcgtcagcgccgccgtcatcaccgagctgcgcgctgccctgcccggggcacgggctttccatctaagcggcaaaaaactggtggaaagcggcatgcgcttccgccgcgagggcgttcccatgggtctgccagggctggacgagtggcacatccagcagacagacaccgacgctgtgcgcgctgccaaagccgcgctgctgcaataaaagcatatacaaaaaagagccgcaccgctgcggctctttgctgttttgcgctatcaactcagtggaacgtgtcaaactcctcgtcgagttcgtcggcatcctccagctctgggaaattttcgtaatccagatcctctagttctggcatgtcgggcaccagttccaactcttccagtaggctttgcatggcctcacaatcggtgggaacgtcggtcaggctggcaccgtagtgacagaacagcaccgtgccgtccttgtccagaatcagggtcagcggcagctgctgcatctggcctttcgcggcctggtagccctggcgcttggcttcccgcaggatgcgccagccctccagcgagtaggtcatcagggcgctgctgctttgggggatgtccaggtgctcatacagcaccccctcggcatcacacagcagggggtagggcagggtattggggccaatgctgcgtgagagcttgtctgcgcgggagcgcaccaccagcgcgaatccgccgtcccgcagggaaccgtatgtattggcgtagcggctggcaaaggtgcgggtgatggggtggccgaagttggccataaacaccagcaccagcgggcttttgcgctgcagcagatcccggaagcggttttgggcactgtagggggtatcgtacacaaagaaagggagcttgtccccaaccgcaatacgctcgcccacggcgatggccccctttccccaaaaatctaaaacaaaaagccggacagcaggactgtccgactgaaaaacacaaaacccccacgcggccgtctgcagccaatcaaaacctaccggtacaggcaggtgggtgccctacccggacgttcacgctcccttcttccgcctagggcgggaggtctgcgatccagccagggacagcgggctccctaaatttgattagtaggattcataaatgaccgcaacaaatcaaaccgtgcagggatgttttttactccaactcggaatcgtcgatgtcgtacatcgcgctcaggcgctcttcaaagactttgccgacagtcagcagttcttcatcgtcatctacgatgtccatatattcgccttcctcgtcggtgccaatgcgcatcaggatcagctcggcatcctcctgcaggctctccggatcttcctgatacgggatcactgccaggtaacgggtgccgttcacttcggtggcgtcgatcacttcaaaagtgacctccttgccgtcctcatcctccagcgtcagcaggtcgggcgtggcttcctcgagcatttcggggctcagttcgtcagacataggtgacctcctgtggtcttgaaatttcttgtatatagtgtaccttttttttcaccaaacgtcaagggtgttcagcgcaaaaaatatgtggtataatatccttatctaaatttgtgaacgccccggaggatctgccatgaaacgttccgcctgcctgcccctgctgctgaccgccgtgctgctgtgcagctgcggcagcaacgccaaaaaggcccccacgcgccccgaccagttcatcagcgaggagcgccagtttgccgcgcccagcgacggcgacactatcgccatcttctccaccagtttgggtgaggtgcgcgccgtattgtacccggacgcagcccccatggcggtgtataattttgtggggctggcccgcagcggctactacgacggcaccatcatctggcgcagccagtacggctttgcggtgcagggcggcgacgccaccggcacaggcaccggcggctccacgatctggagcaacaccccctacccgctggaggccgacgcctcgctgaagcactacgccggggcgctgtgcgtggcctttgcccagggcggtgatgtcaccggcggcaacagccaattttacttcgtcgcggcccttccggacagtgtaagcagcgaccaacaggccgagctggcccagaacggctacacggacagccaggtggctgcctacgcggctgtgggcgggctgccgtacctcgataacaccgacacggtctttggccaggtctaccagggcatggacgtagtggacgccatggcctgcgtggagaccaccaaggacgaggacggcaacgatacctggaaacccaccgaggacgcggccatcaccattgaaaaggtgaccatcaccacctatcccggccccgcggccggggacgaagccaccagcgacagcagcgtcgggtgatgggcggttgcctacccctactatatgtaacgtgcaatcaaataattcccgcagagccttggcagaatcgccagactttgcggggattttttatgcagaatacagaattttactttttggtgttgccgcccatgcggcggtcacggcgggcgtactcttccagcgctttgtcaaagcactccttggtgaaatcagggaagaggaccggcgtgaagtagaactcggaataggcgcactgccacagcaggaagttggacagccgctcctcaccgctggtgcggatcatcagatccaccgggggcaggtcgcggtagaggtggctctcgatggtcttttcgttaatgtcctcgggctgcagggtcccggccttaacctcgcccgcaatggcgcgcatggcgtcggtcagctcggcgtggctgccgtagttcaggcagaagttgacgatgcccttgtcgttgtctttagtcagatccatcatgtagtccatagcgtccagcacgcgctgctgcaggccctcgcggcggccgctgaacagcaccttgcagccgcgctcgttcatttcgtcggcgatggtgcggaagttgttggcaaacaggtccatcagatagccgacctctttcgcatcgcgggagaagttctctgtggaaaagacgtacagcgacagcacaaagacgcctcggtcgcccacggcgtagcgggtgatctcgcgcaggcggtcaaacccggccttgtggcccaggctgacaggcatcaggcgctgtttggcccagcggcggttaccgtccacgatgatggcgacatgggtggggaagcgggcagcagtatcttgcggcatggtggattttctccttctatcgtgtgttttgtatcagacttcggcaggctgcggacgcagcatctcgggcggctcctcatccgggtggtgggcacgccagtttaaaaagctttccagaatgacggcggcggaaacggaatccagccgttccttgcgcttggcaccgaaagtatcgttatcggccaggatggcggcggcggaaaccgtggtgcggcgctcatcccaaagcaccaccgacaggttcgcggtatttgccaggcgctgggcaaagcggcggctcttgttggcgcggctgccctcggtaccatccatgtttttgggcaggccgcagaccagggcctcggccccgcgggcctgggccacagcggtgacggcggcggccactttattcatgcttttttcttcgatctggggggtgatgggactggtgattgtctcgccggcatcgcagccggccagccccgtgcgggagtcgccgtagtcaacagcaagccatttcatacaggttgggtcctttcatggttgatggtatcagtataccacattgcgggcgccgacgcaataaaaagcagcccgtaccgagagcatgaaagctcccccgcacgggctgcgaaaagttgaaacttacaggttgggcatgcgcttgtccagctggatggtcaggatcgcagccagggcgattttaatgacgtcgccgggcaggtagggcaggacgcaccagcccagggcgctggcaaggtcggcaccggtcagggtcatgaaccagatggtgcccagcacatagcagacggcacagcccacgaccatggccacgcagagcgaccagaacttgcggcccaaagccttggagatcaacgcggtgatgagtgcagccagaatgtaacccagcacatagccgccggtcttgccaaagatggcagaggggccgccctggaaaccagccagcaccggcacaccgatggcggccagcgccacaaacaccagctggctgacggtgccccagaaggcccccagcatggtgcctgccatgtacacggcaaacagtgccagattgatgggcacgccccagggcatggggatagcaatctggctgcacacggcggtcaaggcggcaaacagggcgcacaggaccatccgacgcacccgcaggttttcagcagttttcataattgttcctcttttcttttgttgatactatacaaagacctttacaggtactttcccaaatgaacttcctcgccgcgcaggggcactgaattgtgctctcccgcaaagcggacgaccaggcggcagtcctcgtcgatgtccagcgcctcagccttgcgcggggtgccgttccggggcgttaccgtcacggtctggcccagcagcgcctggcgggcacggtattccggcaggtactccggcttgggcacgccgtggtacagcgcccaaaactcgttgaggaaggcggctgccagcgccgcacgggcacccggcggcggggcatcatcgaacagcgccccggctacatcctgcagctcggcaggccagccatcgggcggggccgtgatgttgaaacccagacccagcaccgcatagtccaacatgccgctttccatgtccagtgcggcttcggtcaggatgccgcagaccttgcggccatcccgccagaggtcgttgacccacttgatgcgcagttccgcaccggaaaccttctcagcggcacggcatgcggccacggcggccatagcggtcaggcggacagcctggcgcaggccgatctccggccgcagcaggatgctgaggtacagcccgccctggggcgagaagaagctgtgcccaccccggccgcgcccggccgattgtgcctgggcgatcagcaccagcccttcgggggcaccattctcagcgcgggcccgcagagcagcattcgtgccgggcaaacggtcgacgacctcgacctgcaaggctctggccacttctggggccagcagcgccgtgacggcggcggcattgagcacgtcggcagcaggggagaggatgtagccgcggttggtcaccgccgccaccgggatgccgtcggcccgcagggcagcgacggctttccagatagctgtgcggctcacgcccagctgctgcgccagctcctgcccggaaatgtatttgctccgggcagcgtccagcgcggccagcacgtccgcttttaccatggcgcagctctcctttcagcccaactgtcacccagtatagcgcggttgatgatcaaatgtcaacgcagcatacgaaaacaggttaacaatcgacaaaacaaaagccctgcgggccgaaacccgcagggcaaaagtgcatattggggaaaaatcagcgctggatacggccggaaccgtcgccgccagccagcttctcgacctcagaaacggtgaccatgttgaagtcgccttcgatggagtgcttcagggcagaagcagcaacagcgaactcaacagcctcctgggtggacttgccgctcagcagggcgtagatcaggccgccgccgaagctgtcgccgccgccaacgcggtcaacgatgcgcagctcgtacttcttgctgaaggcatactcgttggaagcaacgtcgtacagcatagcgctccagccgttgtcggaagcggaatggctctcacgcagggtgatagcaaccttctcgaagtggaacttgtcagccagctgcttggcaacgctcttgtagccttcgcggttgatctcgccagcgtagatgtcggtagcctcggcctcgatgccgaaaacgtccttagcatcctcctcgttggagatgcagacatcaacgtactcgcacagcttgctcatggcctcacgagcctctgcacgggtccacagcttgccgcggtagttcaggtcgcagctgatcttggcgccgtgagccttagcagccttgcaggcagccaagcagatctcgacaacattggggcccagggccggggtgatgccggtgaagtggaaccagtcaacgccctcgaagatcttgtcgaagtcgaagtcagcgacggtagcatcggccatagcagaatgtgcacggtcatagatgcagacggaaccacgctgagaagcgcccttctcgttgaagtagatgccaacacggtcaccgccgcgggtgatcttgctggtgtcaacgccgtagcggcgcagagcgttcacgccggcctggccgatagcatgagcgggcagcttggtgacgaaagcaacgtcagcgccgtagttggccagagaaacagccacgttggcctcgccgccgccgtaagtgtactgcagggtatcggtctgcacaaagcgcagatgatcgtagggctgcagacggatcataatttcaccgagagtaacgattttcatggtggaactcctttattgttatttttaataaagaacggtttataacagataatcagccgaactgattatttctgaacgaggtggatagcaaagccggcgacttcgtcagcgaagtagatggcaacagtcttgccgtccttgacgttcttgctgtccatatcaaacttgacgccacgctggcccaggtgatagatagcgcgatcgacgttgttggtcaggatagcgatgtgaccatgggtgccgcggcccggcttcttcatgatctcgaattccttcttgccgacaaagatgctgctgttgccgggcttgacagccatgctcagcaggctgccgatggtctcagcggtcttggcagcctcggcctcatcagcgcagttgatgccgatgtggcccagctgcaggcccagcatcacgtcaacagcctcgcggctcatggcagtgatctcgtcccaggcgccggccttgatcttgtcgctcttgcacatccaggtgccgccgacagcaatgatctggttgtagcccaggtagttgttcacgttcttggcgttgacgccgccggtgcacatccacttgcaggtcttcagggcagcgccgatgttcttcagcttgtccacaccaccgtttgcttcggcagggaagaacttgacgacctcgcagcccatgttcatggcctgctgcatctcgccggaggtggcggtgccgggcatcatgatgccgcccttatcaatgacatgcttgcagacttcggggtcgaagccgggagcaacgatgaaggaagcaccggcagccatggcgcggtcagcctgatcaacggtcaggacagtgccggcgcccagcagcatatcgggcagttcctcgtggatcttcttgatgcactcttcggcgcaggcggtgcggaaggtgacctccgcagcgggcaggccgccagccatcagggccttgcacaggggcagggcctcatccacgctgttgaaggcgataacagggataataccaatctcgtaaacacgctgcaaaacagaattcatagcaattctcctttactatatgttgcagtttggggtggggcagaccaccttagacagttgcctgaccacactcggttactataattataatcggctgcggttgcgccgtcaatcggtcaaaatgaacaggttacagcacacattttttgtcgtattcgcccagaattccgcgattcggcatagcgcttgcaaaaccggccgaactttgctataatcgttccatattgcggaacgcaacagtgtttccgttgtacggttacaaattattaacaaattgtaaatattcaagggaggaaccctattttgaccgaaaaaggcggcgtgcaaagcgtcgagcgcatcttccagctgatcgaacagctggcatcccacccggccggggccagcctgcagcggctggcgcaggagaccggccttgccaaaagcaccgtgcaccggctgctggcaagcctggtcagcctgggctatgccgcgcaggagccggagaccggccgctaccggctgaccttaaaaatgtttgagctgtccagcggtatcgtcaacagcatggagatcatggacgtggccaaggcacatctggagcggctgagccagcgcaccggcgaggccgtgcatctggtcatccgcgatgcacaggacattgtatatatttataaaacggaaagcggtcctatgcggatgtccagccgggtgggcctgcgcagcccgctgtactgcaccggtgtgggcaaggctatcctggccaccctgcctcccgaggaagtggaagacgtgtggaaccacagcagcttaaagaagctgaccagccgcaccgtggtggacctgaccgagatgcaggaccagctggccgaggtgcgcgccaacggctacgccatcgacgatgaggagaacgagatgggtgtgcggtgcgtggccgtggccatccccggtccggacgggcgtgcggagagcgcgttttctatcagcggcctggccccctacatgacccccgagcgtatccgccgcgtagccgccctggcactggatacccggacggatattttggccgatctgggcgtggggcggaaagggtaaacctatcgataataggaaaggctccctctgtgagggagcctttcctatactctactacttcaaatgctgtccaaaatcgccagcagcttatccaggctgcgctcgttgaactccaaaatcaaaatatcgcaccccggctgttctacgacggccggatcaaagctgtcgatgtgctctcgccaggtggtggcgaagcgggcctccagatacggcatgtaatactcgctgaaggaatcgccgatgacccgcaccacgcggtcatctttggcaaacaggtcagcgtagccgggcaccgtgtaggtctgctccggcggcaggctggcgtacagcgcggccacgttggccatatcgccggtggtggtcccggcaggctccacgggataatccccgggttgtaaaatgggcaggcccagggcatcaaaaatgccgtccagcccatacagcgcaccgatggaattccagtgtgtgtcggtcttgtagtacaacagccggtcggggttcagccgggcctggcgacgcagctcttgatagggccaattcaccggcacggtggtgtggctttgcaggtagccgaacagcaggtcggtgcggttttcctcgttgacgatggggtaaccgtcgggcatatactcgcggtagatgcggtccttgctgggggtcaggtccagcaccagcgtgcagccgttttcggccaggcggtcgtttaaaatctgcagcttggcgctggcctgggccagcacctcggggctgtcgttgatgtcggtcaaaccctggtagttggccacaggctgggcagcggtggggccgtccttgtaaaacagccagccatccttgccgggcaatacctgatcgctttggctcgtgccaaaaacggcgtagtcaatgcctgcgttcagcagcacaaactggtagcggaacggcgagttatcgacaaaaaagttgtccaaactacgcggcagctgggagagcgggctttgtagcacctggggcaggcctgtcatcagacggttttcgtggctgtccatcgagagttgcttggaaaagatgttgaacaccggaaaggtcagcccgacggcggcgcagaacacggcgatgaagccgattttggttgcttttctcatggtccgcacctccttttaaaactggaaatagatgaacgcgctgtaagtgcccgccgtcacccgcatcagcgagaggaaaagcagtaccagcagccccaccatacccggcaggccgggggcttctttggcgtacagagcctttttcaggcgggggaagcaggcctgcagggggccgcacagcagcagcgaagccgccagcagcaccatcagcttggtatcggcaaaggcggcagccgtgtagccctgcgcaccgctctgccaggacaggatgcccttccacgcggcaaggccctcggccaggccgtgggcgccaaaaatgatgagggtgaaccacagcaccaccagcgtgtaagcgtgggcaaagaacggcgggatgcactgcaggaatttgcgcaggcccaggcgttccaaacacagcagcacgccgtggagcaggccgaaagccacatactgccacgccgcgccgtgccacaggccggtgagcagaaagacgatcagcaggttgcgacagtttttctccagcgagcagcggctgccccccagcgggatgtacacatagtcccggaaccagcccgacaggctcatatgccagcgccgccagtattcgcccaccgagcaggacagatacgggtagttgaagttttccggcagttccagcccgaaaaagctgccgatgccgatggccatatcgctgtaaccggagaagtcgaagtagagctgcatcatgtaagccagataccccagcaccagcgccggggcaggcaccgtggctgcaggcaccgaagtgacccggctgtagatcagcgccagctgatcggcgatgatcgcttttttggccaaacccagcacaaaccgcttgatgccataacagaaacggtccagactgacctgacgttcggccgctttagcgtcgaggcaggggagctgctggtcataccgcacaatggggccggaggggccgtggccgaagaaggcgaggaacacaaaaaaacggaagggactgcgggcagcggcgaccttgccgcaggacacatccgccagatatccgatggccgtaaaaacgtaaaagctgatgcccagcggcagggccggggcgaacaccggcagcagatccggcaccagcgcattgatgctgcgggccgcgaagcctgcgtacttgaacgccgccagcaccgccaggtgagctgctattaaaaggataagcagcggctttttgcggggtagtttttccagcagcaggccgcccagccaggtgatagccgccagcgccagcaggatggccgcgcctttcagccctgcccaggcaaagaacagcaggctgaacgcccccaatgccccgttgcgcagggccttgggcagcagccagtataccgccagagacagcggcagaaagataaacagaaattgcaccgaggaaaacgccatacaaactgctccgtttcagggatttttcggggattcacaaaaagtttacatgtgttacaactcattataaatgtttcgcaccgtttcggcaagatttgcggagaagttttttgccgcccggcccacagcatagacaaaaggggcagaaatgattataataaataaaatagtgatttaacaaaacgggaggggccaccatgcataacctgatctttggcgcgtttgcggcgctggagggctaccgcgagggcgatgccgccaacctgggccgtgctgtgtatgaccgctgcaccgtggtggccctttgcagtgccaagctggccaaccccgcctgcacggtagcgctggtcaccaacgccccgccgcaggagccataccgcagtcagcttaccaatgcgggcattgaaatttgggactgccccttcaccagctaccgcgtcccggcggataccaactgggcgctggcctactacaagctctgcgcgatggaatgggtgctggcaaataaggactttgccaacgccgccatgctggacctggatacctacacccagcatccgctggatgatctgtggcgggagtgcggcgaggccgtccttatgtaccaggtgccccacgccgccagccagggcatgaccgccgccatcggcaaagcttacgatgctgtggagccgcagggtgcgccccatgtgctgacccactttggcggcgagctggtggccggcagcaaggcgcggctcgccgattttatggcactctgccgccaatactttaaccaattgcaggccatcgacctgacgccgcgggagggcgacgaagccatctggtgcggggccgcctaccgcagcctgctggccgggcagcccgtgcgtgccgccaacgcctacctgttccgctactggctgggcggacgtttctactttgtttccaccaactacacactggaccccgtgtgcattttgcatttgcccggtgccgccaaagaccgccagctggccgtgctgtaccgccgctatgccaaaaagggcagcttcccgccgctggagaaagtccaccggctctgctgcctgcccgccgcccatccgccgctgctgcgcaccctgtgggtgcggctgctggcccgcctgtaaggagaattttccatgccaaaaaagaaggatctgtccctgcggttggaggccgtcatcaaaacgctgatcccacagcatgggcagaacgccgacgacctggggccgatgatgcgcgccatcaaggccgtacacagcgctaccgaccatacctccaccacgccggaggatctggagcaccaacgcgcggcgcaggaattgtttgcccggctggtcacgccgtccatcggcatccgcaacgacgccctcagtgtcaacaacatccccgccgagtgggtcagcctggagcatggccatgaccgacaccacgctgtgctgtactgccacggcggcggctacacctgcggccagctgggctatgcccgcatcctggccagcaagctggcactctgtacaggatttgacgtgctgtcgtttgaataccgtttagcgcccgaaaatccgtaccctgccgccgttgaggacgcgctggccatgtgggattacctgatgtacatgggctacggtgcccgggacatcgtcgttgcgggcgattctgccggcggcaatttggcattggaactctgcctgaagctcaaggagcagggccgtgcccaaccgcgggcgctgttgctgttcagcccctggaccgacatgaccgccagcggcaaaagctacaaaagctgcaaagcgctggacccgatgttgacctacgaatatatcgaagctgtacgcgccgcctacaccggccccgatgctgactgggccaagccctgctacagcccgctgtttgccgacctgcgcggtctgccgcccacgctggtacaggtaggcaccaatgaaattctgcgctctgacagtgagcggctggtcgaggccatccacagggcaggcggctacgctgtgttggaagtgtacgcggagtgctggcacgtgttccagcaaatgcccatccaccgtgccgtggcagcgatggagtctgccggacggtttgtgcagcgcatgatgtaaggaggggctgtccatggcccaggaatggtataaagttgataacgtggccaaggtgtttctggcaaccaatacccgccgcgacccgcgggtcttccgcatctcctgcaccttgcaggagcagatcgatccagaattgctgaacgaggccctgcgcgtcactgcgccggaatggccgcagttccaggtaacgctgcaccgtggtttattctggcactattttgaatccaccgaccagctgcccacctgccaccccgaggacaaagccccctgcgcacccctgtatgtgccggagcgccgcaatcggctgatctaccgcgtgacctatttcggcagccgcatcaatctggagatgttccatgcgttgaccgacggcaacggcgggttcctgtttttaaagtccatcgtccgcaactatctggcgctggttcaccccgccgagatgcaggacgtgcccactcccaacagcgcttctgccgctgccctggagcaggatagtttccgcaacttttacggcgctaccaagcgggagggcaaggcccccaaactgcccaatgcctaccacctgcggggcaagcgcctgccgtatgaccagctgcagttttttgagggacatttaagcgccaaagaggtgctggcccgcgcccacgaactgggcgtctctctgaccagctatctcggcgcttcgctgatgctggccatctatgctgagatgcccgccctggagcgcagcaagcccatcgccatcagtctgccggtcaacctgcgcaattactaccccagcgagacggcccgcaactttttcaattcggtctatgtcatcctgacgctgaccgagaccgacacgatgcagacggcggccgccgcctttgacgcccagctgaaagaagccttgttgcccgaaaacatcaaggcacaaatggacgagtacgaaaagctggagcatgtacccggcatccgcccggtgccgctggttgtcaaaaacctgaccgtaaagttctttaccgcgctggagaaaaagcacgtcacagcggtcatctccaacatgggccgtgtcacgctgcccgatgcgatgaagccgtacatcaagcagttcgccgccttttccagctgcgaggatctgtttacctgtgtggcatcctatggggatgatctggtgctgggcacggcgtcgtcccaccgcagcaccaacgtattgcgccggctttaccgcagctttgccgaggccgggctgcaggtaacgctgtatgcaacggaggtagaaaaatgaagacctgcccgcattgtcatatccaggtgggcggcgacaccggctactgcccgctgtgccagaaccgcctgcacggggaacaggggagtccttggttcccgcccacggcaccgcgcatccaccgcgccagcctgttttataagatcgttgcttttgttgtgcttgccctgactgtcgttgccggggcgattgacttcctgctgctggacaccgcccacctgcatttcagcctgctgatactggtgtggggcgtggccgggctgtctgtgctgcgggtgcttctgcgccgccgctacaacggtccccggctggtgttcaacctgctgctgctcgtctcggcgctcatcgtgtttaccgactggttcaccggctataccggctatagtctcgaccttgtggtgccgatcttgtgcagtgtaacgctggtatgtaattttatctttgcgtttctccacagccggttcaccgccaacgcgctggtgtatctgctgatgaacatcggcgtcgggcttttgccgtatatcctgctgtttttccgcatcgaccgcggccgcatcgacggccacagcatcccctgggtcaactgcctgatcatcagcgtggtgacctttctggggctggtcatctttaaggggcgcgacctgcgcagcgagatcgccaagcggctgcatctgtgaaaatttgtaaaaattgcgaaaagggtagcgtaagcgcccgaaatggtgtacaatagcaggtacgcgtttttatcttaagttcaacctcctatcggaaaggatcagccaatggcaggcaaaacgaaacaatcagaacccaaaatgcggctggatctccgggcaaaaatgtacattgtgctggtcatttgcagcctgatgctgctggccagcgtaggtgttgcctttttcctggtgggcgggttcggaagcagcgaggacgccgcttccgactctgccgtagagcctgagtccatcattaccgagagcggctacaataaagaggaaaacaccatcgacaccacggcctactcggccaccatcctgccggaaagcagtgatgcgggccagacctatgtggacgaaacgcttttcctgggcgacagcaataccgcccgcatgtaccgcatgttcgacttctgcacctacgataacgccatcggctcggtgggcatgagcgccaagagcctggccacctacgcctgcgtggagctgaacaactccggcagctacgtcaccatggccaaggctgtggcaggcatgcagcccaagcgggtcatcatcacctttggcaccaacgacctcagccccagctacaaggcggctgattttgttaaaaactaccagaccggcattgagagcatcgtcgaggcataccccagtgtggacatcctcatcaacgccattccgccgctggggcagcagcactccaaccagagcctgacccagacccaggtggacgagtacaacaaggccctcgtcgaaatgtgcaaagagaagggctggaagttcctgaacagcgccgaggtgctgaaggactccgccaccggctacgccaagagcggctatgtggagtccagcgacggtatccatctgacccgtgcagctatggaagcgctgtttgactacatccgcacccacagctgcattaccgaggatgaccgccccaccgtgacgaaagttgccaagcacaccggcgaaaaggacgtggtgacgtataccacgccggtcgtgaccagcaccgagacctacgaagccgagtcggagagtgaagcggagagcgagagcacgtatgtggaagtaacacccacaccgaccccggaaccgacggcggcaccgacgccgacacctgagccgaccgctaccccagcacctacgcctgaaccgacccaggaacccacacctacccccagccctgcgcccatgccggaagtcacttctgttccggaaagtacagacaccaacggcaatgataccggcggtggtgaaactgacggcgaagacaatgccaacacaactaacgagaatacataacagcaaaaggcaagtgcagatcaattgcacttgcctttttattgcgcatttacttttggccccctctgcgagggggctcctgcgaagcaggtgggggagagagcctttccgcacttcgaagctttggataaagggcaagctctctccctccggcccttcgggccatctccctcacagagggaggcattgggcgcacttattcttccggcaggttccgcagctggtgcagggtcacgccgtccacatatttgttgataagatcgttcagcccgctccagaaatccagcgtgtggcactggccccggcgggggcactcaacgctggaggccaggcaggggatagccgtcagctcgccttccaccgcacgcaggatctcgccggcagtgatctcggtatccgggcgggccaggcggtagccaccctgggcaccgcgcacgctaagcaccagcccggccttggtcaggggggtcacgatctgctccagatattttaagctgatctgctgtgcgtcgctgatctctttcagcggcacaagggcatcggcaccggcgcggttggccagttccaccatcagccgcagggcatagcggtcacgggtcgaaaatttcatacaggggctcccctttcaagttgtgtgactatagtagatagtatagcatatttgtaggaatttggcaagtctataacctgtcaaactggtgggtttgtgtaatttgtcaaaatcgcatcgttcctgcataaatgtgcagggaaagtgttgacattcccgtaaaaggggcgtatactgcaaacatcaaagccagccgggtgctgagcaaatcttgaggaaaggggtacacgaccatgagccgcagcaacactatgatgatgtgcatgtgcagcttgcttcggcagtctgtgcctgtttccccgtgcgcaaaatctggcgtataagggtagcatgcagcagggcgccgaagcgattcggagccctgcttttttcttgtggcagcctgccgcctttaccgctttgataaaaccgagggaggaacttgtatgactgcgatctacaaacagcccggtgtgcgaatgtgccgctgtacttgttgagggacatgactgccggaaccaacacattcacacatgaaaacacacatgaaaaggagacacctactatgaaaaagctgatttctgttgccctggccggtaccctggccctgagcctggccgcctgcggttcttccgcttcctcttccgctgctgagagcaccgcccccgccgagagcgaggctgcttccaccagcgaggccgcctctgaggagaccaccgacctggctggcaccaccctgaaggttgccgcttcccccacgccccatgccgagatcctgaacgctgccaaggacatcctggccgagcagggcatcaccctggaagttgtcgagttcagcgactacgtccagcccaacctggtcaccgagagcggcgaggtcgacgccaactacttccagcacaccccctacctcgagagcttcaacgaggagaacggcacccatctggtcagcgtcggtgccatccactacgagccgttcggcatctacccgggcaagagcaacgacctggagaacatcgctgacggcgctaccatcgccgtgcccaacgataccaccaacgaggcccgcgccctgcagctgctggccgcccagggcatcatcaccgtccgtgacggcgctggcctgaccgctaccgtcaacgacatcgaggagaacccccacaacgtcaagatcgaggagatcgaggctgctcagctgccccgcaccgtcgccgacgttgacttcgccgtcatcaacggcaactacgcaatggaggccggcttctccgtcggcaccgacgccctggccatcgaggatgcttcttctgaggctgcccagacctacgccaacgttctggtcgtgaaggaaggcaacgagaacgaccccgccatccaggccctgtacgctgccctgaccagcgacaccatcaaggacttcatcaacaacacctacgacggtgccgttgtgcctatcttctaatgaaaaagttaaaaatccttgcaacctgccgggatgtagtgtaaaattgatagcgaatgggttttgctgcccattcgctatctttgtaaagaataaggggagagacccatgatcgaactacaacacctgaccaaacgctttgccacgcagggcggtacggtcgtcgcgctgaatgatattaacctgaccattcaggatggcgacatctacggcatcatcggcatgtccggcgccggcaagtccacgctggtgcggtgcatcaatatgctggagcgcccggacgagggcaaggtcgttgtcaacggccgccagatgcaggagttgtctgcagccgagctgcgtgccgcccgccgcgagatcaccatgatcttccagcagttcaacctgctgatgcagcgcacctgcctgcgcaacatcatgttcccgatggagctggccaaagtgcccaaggaaaaggccgaggcccgcgcccgcgagctgctggagctggtcggcctgcctgataaggccgaagcttacccggcccagctttccggcggccagaagcagcgcatcgccattgcccgtgcgctggctaccgaccccaaggtgctgctgtgcgacgaagccaccagcgccctggaccccaataccacccacgcgattttggaactgatccgcaagatcaacaaggagctgggcatcacggtggtcatcatcacccaccagatgagcgtggtcgaggaagtttgcaaccgtgtggccatcctggacaacggcaccgtagtggaggagggcgaggtccaggcgatcttcagccatccctccagcgccgccgccaagcggctggtgtatcctgccggtgcccccaaagccgagaacctgcccggccacaagctggtgcgcgttgccttcggcggcacccagaccaccgacaagccgctggtggcaagcctcgccatcgagtgcggtgccctggtctccatcatgggtgccgacacccgcatcgtcaacggccagacgctgggcagcatgctgctggccctgcccgaggacgaacacgccgaagccgcgctggagtacatcaagaactatcccggcattacctatgaggaggtgaacaactgatggctgaattttttgcaggcaaagattggcagacttttttgcagatcctgcccaccatcccgtttgaaacctgggagactgtctggtccacagttgttgccaccctgctggcgctggtcatcggcctgcctttgggcgtgctgctggtcaccggcgaacccaacggcatccgcccgctgcccaagtgggtcatggcgctgctgaacggcctgatcaacctgctgcgcagtgtgccgttcctgatcctgatgattatcgtcatcccgctgtcccgtttgatcgtgggcacatccatcggcaccgtagcttctatcgtgccgctggtcattgcgtccttcccgttcgtctcccgtctgatcgagaccagcatacgcgaggtcgaccccggcgtcatcgaggccgcccagagcatgggcgctacacctttgcagatcatcaccaaggtgatggtgcctgagagcatgcccagcctggtagccaacatcaccattgcggccaccaccatcatgggctacggtgccatggccggtatcatcggcggcggcggcctgggcaagatcgccatcaactacggctactaccgctttaacgtggtgctggagttcttcgccacggcgctgctggtggtgctggtgcagatcttgcagaccgcaggcaccaagctggccgtcaaatacgataagcggattcagaagtaattgtttttatgataagaaaagctcccgaacattaaaagtccgggagcttttgtttttaaatggctgcgccgtgcattgccccccttgggagggaggctttcactgtattacagcttcttcactgcctcgatcagcgtctccacattctcggccttggtggcccagctggtgcagatgcgcacggcggtgtgggtcttgtcgggcttacccatatgggtcatggcaaagttcttgctcaggacctcgtgccattcgtccggcagcacaaagaactgctggttcgtgtaggaatcatgcagcagcttcacacccttttcctcaaaggctttgcggatggccatagcctggcggtcggcctcggcagccagggtaaagtacaggctgttgcctgtgccgtcctcgccgtccagcagggccaggaactgctcacccagcaggcggcccttggccagcatgccgccgtgctgcttgatggcatagcggaaatcctctttcagaacgtcgttggtgatgaccacggcctcgccaaacagtgcgccgcacttggtaccgcccaggtagaacacatcgcacagggcggcgtagtcctgcagggtcaggtcgttggcttcgctcatcaggccgtaggccatgcgggcgccgtccacaaacaggtacagccccagctcatagcaggcggcagagatgtcggtcagttcggccttggtgtagagcgtgcccacctcggtggggttggagatgtagaccataccgggctgcacctcatgctcgtggctggcgttggcgcggtgttcttccaccgcgtggcggatctgccgtgccgtgatcttgccgtttttattgggcagggccaggcacttgtggccggtggcttctactgcgccggtctcgtgtacatggatatggccgctatcggcgcacagcacaccttgccagggcttgagggccgcatcgatgaccgtcaggttggcctgggtcgcacctacaaaaaagtgcacggcggcatccggggcgtcgcacagggcgcggatcttgtccgcagcggcggcgcaatagctgtcctcgccatagccgggggtctggtcaaagttggtcttttgcatcagttccagcaccgcgggggcagcgccttcgccgtaatcacattcaaaacgaagcataaaagctctccttttctcactttttcgctgttttttattataacactggagtgtacgccttgcaaccctgcaaaattacaggtataatagctggtgcgtgttttattgtaaacccatacggcaataccacaagaaaagaggctttttatggattctggcaaacagcgagagggctttgcttcccgccttggtttcatcctggtcagcgccggctgtgcggtcggcattggcaacgtgtggcgctttcccacggtaacggggcagaacggcggcggcgtgttcgtgctgttctacctgctgtttttagtgctaatgggcgtgcctgtgcttaccatggagctggccgtgggccgcgccgggcacaacagcgcggtaaaagcctacaaagcgctggagccgaaaggcaccaagtggcacctgcacggctgggtgtgcatgatcggctgtgcgctgctgatgatgtactacaccacggtagccggctggatgctggactacttctttaagtttttgaccggccgcttcaccgacctgacccccgacgcctcggcccaggtgttcagcgatgcgctggccaaccccggcgagcaggtgctttggatggtggtcatcactgtgctgggcttcctcgtctgccagaagggtctgcagggcggtctggagcgcatcggcaaatggatgatgggcgctctgctggtgctgattctggtgctggttgcccacagctttgtgctgcccggcgtcaaggagggcctggccttctacctgctgccggattggcagcgcgcctgcgagcaggggcttggcaacgtcatcaccgccgcgatgaaccagtccttcttcactttaagcctgggcattgccgccatggaaattttcggcagctacatggaccgccgctttaccctgaccggagaggccgtgcgcatctgcgtgctggacacctttgtggccatctgcgcggggcttatcatcttcccggcttgcttctccttcggcatctcgccggatgccggccccagcctcatctttatcacgctgcccagtgtgtttatcaacatgctcggcggccgcatctggggcacactgttcttcctgtttatgacgttcgccagcttctccaccgtcattgcggtgttcgaaaacctgattgcctcctgcatggacaacttcggctgggaccgccgcaagacctgtctgatcggctgcgtcgcactgattttgctgggcctgccctgcgctttgggctacaacgcctggagctttatccagcccatgggcgctggcagcaccgtgctggatttcgaggatttcctcgtcagcaacctactgctgcccggcggcagcctcatctacctgctgttctgcgtcacccgctggggctggaattttgacaactacctggccgagtgcaacaccggcagcggcttcaagatgccctgctggctgaagaactacttccgctttgcactgcccgtgctgatcctagttattctggtgcaggggctgtaaaacctcatacttaaggcaacaccgcacaattcccgcctgacggcttaagcaccgctccggcggatctccgcgccaagagccgccgcaagcggcggttgcgctccgaagcgcctcgctgcggctcggtgtgcggcacggcatctgcgttgccaaaatgctcgataagacatccagtattatctgcgcttttggcttagcagctgccgcacctcgctcgccgtatcggcgcttagaattatgcggtattgccctaaaaacaccccaccggggctgtacgcaatgcacagccccggtggggtgctttgtatcaggaatcgcttttataacgaggaacgcggttgcaagcttagtcgttcagcagggcgatcttgcggatggacggatcgtgggtgtcgttgaagtcgaaagcggcctgggcatcggtcagcttgaaagtgtggctgatggagccgttcaggtcgatcttgcccttgttgatgaggtcgatgacggtctggaaacggtggttctgcaggcggctgccgcgaacgtccagctctttgctggtgatgacgaactggttgatctcatcgggggcgatgctgaagcccatggtgatgacgcggcttgcgttgcctgcggccttgcaggcggtcaggaaactgccatggaagcaggcgcagtcgatgacgaccgtcgggccgtagccatcggtcagctccttagcgcgggtgacgacatcctcggtcttggagttgatgacgtcggtagcgccgttctggagggcggcctccagcttgggctcgtcgatgtccacgacgatgatcttgcgggggctgtacaggttgacgatgcgcagcatgctgctgcccagagcgccagcaccgatgatcataacggtgtcctggaactccagctgggcacggctgcaagcctgcacggcgatggtggtgggctcgatcataacggcatcctggtagctcaggctgtcgggcaggacataaacgtcgctctcgggcacggccatgtactcgcggtagccgccatcgatgtggacgccgcggacctgcaggtgctcacaaacattgggacggcccttgcggcaggcatagcaggtgccgcaggcagtgacctggtccacgatgacgcggtcgccgaccttgatcttcttggcgttgccgccgacttcctcaaccacaccgacgatctcgtggccgatgacgcggggataggtggcggcggcgttggtgccgtggtagatgcccacgtcagagccgcagatgccggcggccttgatcttgaccaggacgttgttcttggcgtcgatggtgggcttatccatatcgatgatgcggagatcattgggctttacgatctgaactgctttcatgtgtaaacctcccgggtttctcatgtacagaaacgacttggtttctctcattcagcgaactgacatgctgacatgtcagttccaacatcgtcattgtagcatggcgggtcaggaatgtcaacacctgttttgtaattcatcaaaataacaaaagcggcggtggttttttgcacattttgcataagtgtatcgttaagtatttagcgagcatgcgcctatttttgtgtatttgggcagttggcctttctggttccgttgtttttccatttaccgcttgcagtcccctgccggatgtgttacaatagcagtaagccatctggcatactgacatgtcagttacagagtaaggagcacatcatgcccagcccgaccaacaaagcgcaggacaattccatccgggagaatgtctaccgcgttatccgagaaaatatcacctcgctgcagctggcgcccggcaccacggtaagcacacaggagttggccgcgaagctgcaggtcagccgcacaccggtgcgggaggcattcatccgcctgcagaaagaggatctggtggagatcacaccgcagaaaggcacgatggtctcccgcatcgatctgacccgtgccgagaaggagcggttcatccgggagagcctggagactgccattctgccgttgtttttgcagaactgcactgagccggacctgaaagagctggaacttttgatcgagaagcagaaagcctgttttgccgggctgaagccgctggagttcatcgcgctggacaaccagtttcatcagcggttctttgagcttgcggggcaggatttaagctgggacgtggtggcatccacaaacccgcactacaaccgcctgcgcgtgctgacggtgcagaacgccgccacctttgacggcgcggtgcgccagcatgaggtgatgatggaccagatccgccgccgggacatcgacgccctgcgccgggaactgaccgaccatgtaaggaaaattatcgcggagaagaatgttttgcttcaattgtatcctgattactttgcaacggctcaacaggagatgaagttgtaatcgctctttggctccctctgcgcggcagaggggcccggctgcgtaagcggtcccgcgaagcgggtgagggagaaagcttcgtatccacagcagctaaaagttttgtctctccctccgcccctgcggggcacctccctcccagagggaggctccaggcaaaaacggcagacacctattacaggtgcctgccatttttaatgcaaaattttctttaatgtttctattaacttcggtatcccgatgagcttaccgatat

SEQ ID NO: 7937 - DNA, 11830 bp, Unknown
  gut microbiota DNA sequence
aaatcccccaccctcaatcttgcgttatgccccaaaaaaggttataataacataatagcccatctctacccattcgggcgaaaaatgtgtacaaaagggggccttccgcggtgaaaattctgctggtgcactgccattatcggatgccgggcggtgaggatgccgtctttgcggccgagcgcgccttgctggaacgccgcggccatcaggtcatcgtgtatgagcgcagcaacgaggaagccgcccacggtctgcccaaggccctgctgcccctgcatgccgtgtggaaccacgccgctgcccgggatataaaacacattataaaaacacaaaacatcgatgctgtgcacattcacaatacgctgctgctgctcagtcccgcggtggtccgcgccgccaaaagcaccggcgtgcccgtggtgcaaacgctgcacaacttccgcctgttctgccccaacggcattttattgcgggacggccgggtctgtgaggattgcccccgccacggcctgtcctgcgccatccgccaccgctgctaccgcggcagcctggcccaaacgctggtagtcgctgccgcctacggtctgcaccggcgcttgggcacctggcgcggtgttaccatggtggccctgaccgaattcgaccgccaaaaactgctggaattcaaccgccagtacccgatgttcgacgctgaccgcctgatgctcaagcccaacccggtctgcgtgccgtccggccccgtcaacccgtggggagaccgcaaaaatcaaatgctcttcgccggccggctggaggaactcaagggtctgcgcaccgtgctggaagcttggcggctgctgggcgatgccgcccccgcgctgctggtggcaggggatggccccctcggtgactgggcccgcgcccaaaacttacccaacgtgcagtttttgggccagctcccccgcgcggaactccacgcccgcatggccgaaagccgcgccgttgtcgccgccagcctttgctacgagagcttcgcccttgtccccgccgaggcccacgctttgggcaccccggtgctggccagcggtttgggcaatgtgggtgcgtcggtgcagccgggctttgacggcctctgtttcgcccccggagacgccaacgctctggccggtgccgtgcgcgcctttggacaaatgagctttgactgcaatgccatcgctgcccgcgcccgccgtacctacagtgaagatgaaaattataacgcactgatgcgcttttatacaaagggaacgatccaatgaaccagctttaccgcgctttgcatatcccgcccaaacggctgctgcgcaagctttcgggcgaaaaagagatctacaccatcgccgtgcgccctgtgcctaaggccgagggcaccgacccgctgcccgcgctgggcggcaccccctacaccatgctgcccgcccgccccggcttctggtacgccgacccgctgctctaccaccgggacggccgccgctggctctacgccgaggccatggacctggccacaggtctcggccgcatcgaggtctgcgagctgcacgacgacggcgcggcaggggagtggcaggtcgccctgcaggaggacttccacctctccttccccacagtgtttgactggaacggcgagacctggatgatccccgagaccggcagcgaccacagcttgcgcatctaccgctgcaaaaatttcccggccgagtgggagctggtgcagcgctttgccgtggacgccgaactctgcgatacgattttggtcaaccgcacccccaacgagctgaccctgctttgcagcgagaccctgcctgaaaaccaactctgggtgcgttaccgccgctacactctgcgccgcgccgaggcccctgtcgacaccgtgcccggcgcccaagcggacgccgcccccgccccggcaggtccctttgccctgctgccggacgaagcctacaacctgcagcaccgggaaaacgacctgaccagccgcaacgccgggccgctgtttgtgctgggcgggcaggtcatccacgccacccaggtcagcaccaaggtggattatggcgtttacctgcaattttttgcccgccgcggcagcagcgaggtgcccctttgcgccgccatgccccacaacgtgaccatcaccggcctgcgcaccgaggacatcgtcggcatccacacctacagccgggacgagcggctggaagtcatcgacgcccgctacctgacccgcctgcccaagctgacgccgccggaaaataaggaaccgaacaaggaatgaaaacgatcgctataccgcagttttactgcggcccctcaggccagaagggcctgtataaccggcaggaagtcggcctggcccgcgcctttgcggccctgggctgccgcgccgtggtgctgtaccctgcgccgggcgctgcggcccccacggtggaaaacccggagccgaacgtaaagatttattacctcccggtacgaaaattaggcgcgcaggcgttcttttccagctggcaggtgctgctggacgagcaggtcgatgcggtccacgtcatgggcgataactcccccggcgtgccgtcgctctaccgcttctgccgcaaacacggcatcctgttttacagccagctgggcgcgctgaaaagcacctccggccgcgccgccgtccgcgctgtgatggacctgctgctgcgccgcaacctggccgtttacaaaaaaacacctaccttcgccaaaacgcccgccgtcgccgccgagctgcaaagcctgggcgtgccctgcgccgggctgatgcccgtggggctggacactgccatcatccccgacgtgcccggcaccagggccgacctgcgccgcgccctgaaattggacgttgacgcgaagatcttcgtctttgtagggcggctggatgcctacaaaaaaccgctggacctggtgcccctgctggaggccgcgcccgattggcaggccgtcatcatcggccagggcacccagggagcggagctggcccgcctgctggccgcccgggggttggccgcccgctgccggatgatcccccagctgcccaacgagtctgtacacgtttattatcatgcctgcgatgcttttgtgaatctgaacgatcaggagatcttcggcatgagcctgctggaggccatgtttgcaggctgcccgccagtggctcgccacgcgccggggccggacctcatcatcgaggacggcctcagtggttggctgtgcagcacggtgccccagctggccgaggctctgggccgcgtcacgcccgagatgggcgctgccgcacaacgacgtatcaacgagcattttctgtggcagaacagtgccgagctggcgctgaccctgctgcccgccaaaggaaaccgccatggataacgacaacaaactggtgcaaaaagccgccgacctttaccgcagcctgcgcttcagcatgaaatatcgcggcctgacgatcctttcagccgaggctggcaacgatgccatcgccgcggccatcgccgccggcgccccctacatggccgcccgctgcggcgctaccgagatgcgcactgccgccgactacctgcaaaacggcggggtcggctttgccgaaaagacccgcgaagacatccgcaacctgtccggagtgttccccacggatgacgctgcgctggcaaaattttgccgtacctacattgattgtgcccacaccgccgacctgctggccttgtggaatgtgggggccgagcgggaagttgtgcgcggctgcggccccgccacctgctacaccaggctgcgggcgctggagccttactaccaccctcacccctggagcgccgcactggccggcaagcgtgtgctggtggtgcaccctttcaaaacaacgatagaacgccagtatgcccggcgggagcagctgttccccggcaccgatattttaccgcagtttgccgacctgcgcatcgtgcaggccgtgcagggcctggccggggccgacacaggctacgccagctggtttgatgccttggccgccatggaacagcaaatggacgctgcaccgtatgatgtggccatcatcggtgccggtgcctacggcctgcctctggccgcccacgcccgcgacaccggccacgccgccatccaaatgagcggcgccctgcaactcctttttggcatccgcggcaaacgctgggatgaccacccgatcatcagcaaactctataacgatgcctgggtgcggcccgaggagactttggctcataaagaaaaagtggagggcggcagttactggtaaagtgtccgacgcccggaaaccaatagaaggatgtatctatgcgtattctcatgatcagcaaccacttaggtgtacaaagcggcgtgcagcgttatgtgcaaaacctgctgctgaatctggatacaactaaatataaagttgacctctttgtgggcctctgcccggccgaccaggcaagtaccgcccctgccctcatcgcccatggggtcaacatcatcggtgtgccggaccataaaaaggaccgcatccgggccctgtaccgccacctgaaaaatcataaaaattatgacatcatccactaccataccgccagcaagatcggcgcacccgtctgcgccatgatgcgcgccctctgcccccgcgccaagatcatcgtccacagccacatcgtctacccgcccataacgctgacctggcgtgctgcccacggggtctaccagctgtttgccgattactttctgggctgcggcgtcgccgccgggcggttcgtttttggcgaccacatcgaccgcaagcccaactttgcggtggcctgcaacgccgtcgaccaagggcgcttccacccggatgctgccgcccgcgccgccacccgcgctgcctggggtgtggcggattccgacaagctggcgggtttcgttggccggctcaaccaccagaaaaacccgctgttcctcgtcgaagtcttcgccgccatggcccagaccgatcctgcctggaagctgcttctcgtcggcgcaggtgagatggagcagcccatgcgcgaggctgcggccaagcacggcctgaccgaccgcatcctgtttgcgggggtgcaaaaggacgtacctgcgtttatgaacgccttcgatctgttcctgctgccctccaatttcgagggcagccccgtcactttggtggaggcccagggctgcggcgtgccctgccttgcttccaccaatgtgcccaatgacggctcggtgacagaccttgtgcatttcttgccgctgaccgcgccccttactgagtgggccgccaaggccaacgagatcgccgcccacggcgaccacaccgactactggcctacccttgccgccgcaggctacgagctgaagaccgccgcccgccgcatggaggaactgtacgacagactgggggcgcgcgcatgatctacgccgaacttgccgggggcctgggcaaccagatgttcatctacgccttcgcccgtgccctgggcctgcgctgcaacgaacccgtcaccctgctggaccgccaggattggaaggacggcgcccccgcccacactgtctgcgcactgaacgatttgtccatcagcccggatgtacagatcctcgctgaccccggcttcgccaaggcccacctgccccggcagaacaccgccaaagcgctgatgatcaagtacgagcagcgccgcggcctgatggcccgggattggcagccctttgaaacccgctgtgccccggcattgaacgccctgggcctgcactttgccaccgacggctatacccccgtacaccgcggccgtgccagggactttctggcgtggggatacttccaaagtacgcggtacttcgatgattttgcagatgaaatcaaagcggagcttcgccccaaagccgcccccgccggggaactggccgccgccatcgcggccgccgcttacccggcagccgtccacctgcgccggggcgactactgccgccccgagaacgagattttgcaggtatgcaccccggcctactacgcccgcgccgcagctgccgtaaaagctgcccaccccgatgcaacattattcgtgttttcggacgatgtggattgggcaaagcaaaacctgaacaccgccggcttgcccgccgttttcgccccccggggcagcgcggtgggggacatggccctgatggagcagtgccggggcttcgtgctcagcaactccacctacagctggtgggcacagtatctggccaaggcaacggacaaactggtgctggcccccgaaaaatggtacgcccacaccaaaaaaagcgcgctgtatctgccggattggcagctgatagagaccgattaaaaaggagaaaccatgccccagttttccatcatcgtgcctgtttataatgtgcaaaactacctggcggcgtgcgtcaaaagcgtggcagagcagcccggtcccagggattgggagtgcatcctcgtggatgacggctctaccgataccagcggccagatctgcgacgtgctggcggcggagattcccggcctgcgggtgctccaccagcaaaacggcggcctggcgaacgcccgcaacaccgggctggccgccgcaaaaggcgagtgggtgctgttcctggacagcgacgatgccatggcccccggcctgctggagacgttgcgccgcgaactggccgctcatccggatttcgactggttcatcggcaagcatctggagtggcagcccgacggcaccctgaccgaacacaccggcctgcgcctgctgcccggcccctttgacagcgatgactacgctgcccgcctgaaaagcctgtaccaggccgggcactggtcggtgtggaaatactgcatccgccgcgcctggctggccgacaccggcgtccgcttttgggacgacgtgcgctgggccgaggattggcccttcgacctgatgctgctcaaccactgcacacggctgtattttttggacacggtgttcacccactaccgggtgggccggcagggcagcttgctgacagacgccaagaacctgcccaagcggtttgacgcccttgccgccgcccagcgccacttggccgcccaggccgccctgggcaaaatacgcccggaggtctacgctgtgatgctggatgccgccgccgatgtgttttggccccaggcccgcactgccgccgtaaaagacgcggccctgcgcaaagcctgcctgcccggcctgcgccgcctgcgccccctctacccccacggcaccgaggtgcagacccgcaaggattggaaactgttccaaaccatgatgaaaaccatcggcccccgcctgaccttatggatggcaagcagacgctgaatcggtggccgtaggggcgatgcacagcatcgccccctacaaaccactacacaaacgaggtatacccatttgcgcaccaaacgtacattattaaatatggcctacgccctgggctccagcctgctgctgcttttgctggggctggtcacgcggcggctgctggtcgataacttcggcacgcaggtcaccaccgcgtcccaggtcgtcagccagctgttcaactttttctcgattgccgagttcggcgtcggcagcgtcatcagctaccgcctgtatgagcagatcgctgccaaaaacgaggaaaagatcagcaaatacatgtccatgtacaagtgggcctaccgcgccgtgggcagcgtcattgcactgctggcgctgtgcggtgcggccgccctgccgtggatcatgccggacgtgcccctggccaccggctacacggtctacggtttaaatgtggtttctacgctgtgcagttactttttggttacccggcggctgatgtacacctgcacccagcagggctaccgctgcacccagatcgacttctgttgcaacgtcctcacctcgctggccaagatcgccgtgtcgatgtggtggcccaactatgtgctgtatttcagcgtgtccatcttcttcaacgtctgcgccaacctgcttattgcgtggcggttcaaaaaggacttcccctacgtcaaggacgtaaaggtcacgctggcggactttaaggacttgggcattttccatgatctgcggtactatttggttcaccgcctgtccaataccatctacggctcgtcggataccatcgtcacctcccgcttgggcggctcggtgcagacgacctaccttggcaactactccaccatctccaccagcgccaccgacctgggcaacaaggtcatggacagcttcgccgcggccatcggcaacatcgtctacgataagtccgccgccgccaacgaccacgacaagcaggtgttctggggcatggacctgttcagctacctgtttgcaagcttcgtcgctaccgcgtacttttgcctgttccagcccttcatgggggcctggatgggcgagcgctggctgctgcccctcaccttcgtgctggtgttctgcttaaacgagtacgtcggctggaaccaccgcatgctcggctcctaccgcgcggtgctgggccactttgagcaggaccagtggttcatggtcagctcggcggcggtcaacctcatcctcagcttcatcctgttcccgatgttcgacatcaccggtgcgctcatcgctaccgtcgtggcccactgcatcatgtgggcagggcgcgtggtggtggtgttccgccgatacatggcgggcgggctggcccactatctggccgtgcaggcgctgcatctggtcacgctggcggtgtgcatgggtggcagctacgcaatttgcgcccgcatgcccggcggctggctggggctggtgccccgtgtgctggtggtgctggtggtgcccaacgtgcttaacctggccgtttacggctggggcagggatgccgcttatctgcgcagctacgcaggaaaactggcagccaaactcaaacgaaaggggaaagcggaatgacgaaagtcggcatgctgtacatctgcaccggcaagtacacggtgttctggccggaattttaccgcacgttcaacgaaaaattccttcccaactgcgagaaagagtacttcgtattcaccgacgcccccgctattgagtacgaggacgcccccggcgtccatcgcatctatcaggaaccctacccctggccctacagcaccctcaagcggttctccatctttttgacacaggagactgtgctgtccaaaatggactacctctttttcttcaacgccaacctcacctgcacccagaccatcaccgaggaagaatttctgccccgcccggccaggggcgaaaacctgctgctggtccagcagccgggcttctgggataaaaagccgccctttttcagctacgaccgcaacccaaaaagcacagcgtacattccgtataattgcggaaaatattacgtttcgggcggtctcaacggcggcacggccccggcgtttttggcgctctgccatgagctggagcgccgcaccgaggccgacctgcaacaaaatgtcatcgccctttggcatgatgaaagccagctgaaccgctatgcggccgagcgcagcgactaccgcctgctgaccccggcttactggtacccggagggctggcagatgccctttgagcagaagatcaccgtgcgggataagtcccgctacttcgacgtagcagcggttaaaaacaaacaggccaagccgcaaagccggctacagcgcaagtggggggcgttctgcgagaactacctgccctactggtactgcctgcgggacaccctgctgcataaaaccttgaaagggggtggcgcctgatggcgcagacccgtaaaaaccgcatactgccgctgattctggtacttttctgcgctgccgttatgctgcgcagcgcctttacggggctggagatcgacgaggagtacgctttgtccctcggctaccgcctggtcagcggcgaccggctcttttatgatatgtgggagccgcatcaattgtccagcccgcctgtcgccgcactgttggcgatgttcatcggcatcacgggcggaactaccggcgtgctggtgttcttccggctcgtggtgctggcctgcaaggcgggcatgagctgcgttttttaccgggagttccgccgcgacctgggcaagcccgccgcgctgctggcggcgctggtgctgttcgccttcgtgcccaagtggttcctcggcccggactacaccggccagcagttccactggacgctggcggcgttcctctgcctgcaccactatgtcacccgcggctgcaagcagttgtggctggtgccgctgggcgcggtgtgcgcctgcttcgggtatttggctttcccccaaagcgcggcggcctttgccgtgctgtggatcggcatgctgattttgggcaagcgctatggcgagccgaaacaccgcggcgcctgggtactgctgggcagctgcgccgtctgcggcgtggtgtttctggtgtatgcgctctccggcgtggagttcagcatctcgctgctgctcagccgcctgacgttgattttgcacgacccgcagtacaatttcaccaccgcccagcgcatggccctgctggccggccaagcattgaccgtagcacggtcgctgctctggccgctgctagcctccgccgccgtctgcgcggcgctctaccttattaaaaagcagcctgttacggtggggcggctgctcaacctgtgggcggcctttgccacggtgcagtgcctgctgcgtgccgttaaggacggcagcctggacgagcgccagtttgtgccggtggtggtgttggccggggcgtgggcgttctggcgcggccgcggcaggcccggcaacgccgagctgttctggctgggttatctgccggggctggcggcctacgccatgatcctgaggtcgacgctgcttggattggccccgacttttatgtacttgacatggcctgccgtctgcggtatgctggcgctggtgaaccatgcggatagcggggacaatgccgcaaaatcccgccgcgccgagggtgtgctttgcctggccgcgatgctggcgtttttgctcgtctgtcgcgtctggtgcgtgcagacaaccggctggaaatcggctgacatcaccgacacgccgctggtgcgcatcaccaccggcccggccaagggcatctatgccgacgccaaagccgccgacatgcaggagtgtctgtatgaagcgctggcaccctacgcgggccagccgattttgcaggccatcggcgagcagcacggcctgggctttttaatggccgatggtacgttggatgttgcccaggcgtcggtcatctccggcaccgacagcgacccccggtttgagcagtattacaccgacgtccccggcaagacgccccgcgtgatcctgtacgatgacgccgaggtccgcgatatggcggagtttcatgcctggattgaagctgattttaacattgtggaccggtacaacgtcacccacggttctgccagcttgcaagtccttttggttggctgatgcctttcggtgccgccaccctgcggcggcacctctttataacggcatccaccggcaagactaccttttttgtgaccaaaaaaggtagcgaaaaaagtcccgctgttgcgaggcagcggaccccgccttaggggctactcgcccctaagaaccccaaagaggagggtcagagaaaaaaatcctaaaaaatgcaggagtgctgcatttttcttaacggatttttccctcttcccacattgacccctccggggccaaaatccccttataaattggtactgtagggaggggtcttgacccctcctaaaggctcccc

SEQ ID NO: 7938 - DNA, 584 bp, Unknown
  gut microbiota DNA sequence
ctgtatacaataaattacgatacagcatgattgtgtgtgccttgacgatggggataatgaccgtttcaaactcgctgcccatggccttgtggattgttgtggcataagcaaggtcaacgtgcgccagttgttccgtcgtgtaagtcaacttgcggtcgccgccaaaatccatctgcacaagccgttcgcctttgctgttcgtggtaatcccggtaataaaaccgaggtcaccgttggacactttctcggtgttctttgtctgcataacgcggtcatggacgcgaaaaatgcggctgccgatcttcacttcttcctcggccgagcggaacgggttgacccgttcccgaatggcacggttaagctgctcggaggctgcctcgcctttctcgcggaacggcgaaaggatctgcacgttctcgatgccacgctcggcggcttctttgcagtaaatgtcttggatgcgccgcgccgtctcgatttgcgtcgggctgtccacgaacacaaagtcattgccgtagtacagcttggtgctgccctcgttgatgaacttcgcattgtaggcaatcaggccgtctttcgactgg

SEQ ID NO: 7939 - DNA, 290 bp, Unknown
  gut microbiota DNA sequence
ctgcatgtgcatgatctggtggactatgtttccgaggaagccggcgctgccggtgcccaggccgccgcctatttgcaaaatggcgagcaggacgccccggccatcccggtacattgcgagaacggcgtgcgctacacagtgcccgccacggtgcgcccggtctgcgccggcgataccgtgaccatccgcttccgcgtgggcggtgtgttcaagaacaaaaagatcgccgtatatctgggcgatacctgcattttcagccgcaagcggcccgtgctggcccccggcgagat

SEQ ID NO: 7940 - DNA, 8122 bp, Unknown
  gut microbiota DNA sequence
tgtttcgtcaacgcgcgtggattctccgcaataaaccgcctggtcagcagcttgcctgcctccagtatctccttggcggtgccgctccattggccgtggttgcgctctaccagcttgcggatggtctgcaccagggcgctgttttcgtattctttgcgggcctgctcgcgggcgcgggcctcggcgtcgcccaggttttgccagcggcattgggtcttgtccaggcgcagggccagctcaaattcctccaggtcgcggccggtcaccgagagcttggtcgtgtcgtccacgcggcggtcgcgggtcatcacgaaggcagaatccgccgcgccgaagatgccgttggtgccgctgatctgggcaaaggggtcggtctcgtccttcatcttgcgcaggtggtgtaccagcacaatgcaaatttcgcgttcagacgcaaacttttgcaggatgcccacatccttgtagtcggcctggtaggcgtttattgccttgccggtggtgcggcgcacccgctgcagcgtgtcgatgaccaccagcccgcagccggggttgatgttcaggtagttggtcagctggtccagcaggccgtcctgcaaatccagagagccggtggccagcgcaaagccgtcgggcgcacgctcgccctgcagcacacggttcatgcggtcctgcaggcggcgctggttgtcctccagtgccaggtagaggcagtcggttttgttcgtaggcatgtccaaaaacttttgtccggacgccaccgaaaggcaaaggtccagcatcagccagcttttgccgtacttgggcggggccaccagcagcgccagaccttggggcagcaggccctccaccacccacttgatgggcttgaactccttgtcctgcaagtctttggccgagatggacacaatgccgtttggcgctgtatcgtcctgtttttcctcctccggcggggccagaaagtgcagcgtttccatcgcgtcggccttgcgcaccccgggcggcgtggccagctggtcgttgtggcagcgggcgatgtccgcctcggtgatgacggtgctggtctcgtaaaacagcttgcgctccaaaatgcggtccgtgcggtttttacgttcctgcgcagtttctgcggcaagcgccagaaaatacagcaggttttcgccatcctgggtcaccgccagcttgcccagggccttggcaaattcggtaaactgctcgtccgagcagatgaggtgcggctcctgcggcgtccaggcggcggcgtaccagccaaactgctgggccagatgctcaacggttcgcaggtctttgcactgcgacaaatcttttttcagcagcaagcgctcaccccgctttcttgcagcagataggctgcgggtaaatgtggttgtgcatgtgttctctctccttttttatagattgccgttctcgttgaatgtagttccacttcgccacaaaaaataaatccgcaaaagttgcgtcagcctaaagtagaacctgattccacacccctatcctaccacaaagtggaataaaagtcaactatttttgcaaaatctcttgaattattttccacgctgtgttatactaatagaaaaggagcgaagctatgtcaactatttacgaccgcatcagggcgcggcggctggaactgggcctgaccgcggaagacctggcccaacagctgggctacaaggacaaaagctcgatcagcaagatcgagaacggcaaggcggacatcccacaggccaaggtggagctgtttgccaacgcgctgcacaccaccactgcctacctgatgggcgtggacggccctgccctgcccccggggtgcgagccgctgccccgcctgaagcgcctgccgctggtggggcgcattgcctgcggcatgccgattttggccgagcagaacattgagggcgaggtggccgtgcccgaggagtggcacgcggatttcatcctgacctgccggggcgacagcatggccccgcagatcatggacggcgacctggtagccgtgcgcagccagcccgaggtggagaacggggagatcgcagtggtgcgcattggtgacgaagccacgctgaagaaggtaagttttgacggcacgacgatggttttgcagccactcaaccccgcctacccgctgatgacctacaccggcgctgcgctggccgaggtgcatatcgaaggcaaagccgtgggcctgtgccgggggctgtgagggttgcagaatacgcccctattataataaggtagacaaaatctcccgccgactgggtttgcgcccaatcagcgggagatttcgctgtttatgaatgttgctgcttagaggctccccttgaggggagccttgcctttacctcaaatacagccgcccattctcatccgcgtccacggtcagggtatccccggcgctgtgggcaccggcgatgatctctttcgcgatcatcgtttccacgtgggactggatgtaccgcttcagcgggcgggcaccgtagatcgggtcgtagccgccgtcgatgatggagttcttggcggcctcggtgacgaccaggttcagctgcttgtcggccaggcgcttgcgcaggtcggttagcattaagtcaacgatactgccaatctcctgtttggtcaggctcttgtagtagacgatgtcgtccagacggttcaggaactcgggacggaactgccgtttgagcagctggtcgatggcgttcctggcctcgtcggacagctcgttcttgccctcggcacgggacttttccaaatcctccagaatcaggtcggagcccaggttggaggtcaggatgatgacggtgttcttaaagtccactgtgcgaccctggctgtcggtgatgcggccgtcgtccaggacttgcaacaggatattaaacacgtcaggatgtgctttttccacctcatcgaacagcacgacgctgtaaggatgacggcgcacagcctcggtcagctggccgccctcctcgtagccgacgtatcccggaggcgcaccgatcagacgagagacactgaatttctccatgtactcggtcatatcgatacgcaccatgttcttctcatcgtcgaacagggattgcgccagtgccttggccagctcggtcttgccgacgccggtggggcccaggaacagaaagctgccgataggtctgttaggattagcaataccggcacgagagcgcaagatagcgtccgccaccttttgcacggcctcgtcctggccgatgacgcgctgatgcagcacgtccggcaggcgcagcagcttttcgcgctcgccctccaccagcttagccacagggatgccggtccagcgggccacgatgcgggcgatctcctcatcggtcacgcggtcacgcagcaggctggattccttcttggcatcagcgattttttcttcctcttccagctgtttctgcaggttgggcagcttgccgtactgcagttcgccagccttggcataatcgccggtacgggtagccttttcaatctccgccttggtgttttcaacgtcagcacgcagactttgcaccttgttgacggcgttcttctcgttttcccactgggccttcttgctgttgaagctgtcgcggagttcggccatctccttttccaaagcagccagacgctgcttggaaagctcgtcggtctccttctttaaggacgcttcctcaatctgcaattgggtgatgcggtggttcatctcgtccagttcggcgggcatcgaatccagctcggtcttaaccatggcgcaggcttcatccaccaggtcgatagccttatcaggcaggaaacggtcggtgatatagcggtcggacagggtggctgctgcaatcagtgcagcgtcctgaatcttgacgccgtggaacacctcgtagcgttctttcaggccacgcaggatggagatggtgtcctccaccgtaggctcgttgaccataacgggctgaaaacgacgttccaacgcagggtctttctcgatgtactcgcggtactcatccagcgtggtagcgccgatgcagtgcagttcgccgcgggccagcataggcttgagcagattgccagcgtccatagcgccgtcggtcttgcccgcgcccacgatggtgtgcagctcatcgatgaagaggataatcttgccttcggactttttgacctcgttcagcacgctcttcaagcgctcctcgaactcgccgcggtactttgcgcccgcgaccagcgcacccatgtccaggctgaatacggtgcggtccttcaggttctccggcacatcccccttgacgatacgctgggccaggccctcagcaatggcggttttaccgacaccggcttcaccgatcagtaccgggttgttcttgcgcttacggctcaggatgcggatgacgttgcggatctcggtgtcacggccgattacagggtccagcttgttggccttggccatctccaccagatcctggccgtatttcttcagcgcattgtaggtgtcctcggggttatcgctggtcacgcgctggttgccgcgcacagaacttaacgtctgcatgaacttttctgtcgtgatgctgaacgccttgaacagctctgccgcacccttgccggggcgctgcaaaacgcccaggaacacatgctccacgctgatatattcatccttcatctgtttagcctgtgcttcggcagcgtttagcgctctatcaaggtcagtgccaatatagattttatcgggttcacggccgctgccggtcacccggggcagagcctcgaccttttgcagggccgcctgggcaaaggcgttggggtcagtgcccatgttggtcagcatttgcgggatgaggccatcctgctgctgggccagtgctgcgagcagatgctcctgctcgacggtattattggaatactccacagcgatgcgctgcgcagcttgcagcgcctctcttgctttttgggtaaattgattcatatccatagtgcgtacctccttattttgcagataccgcagaatttgatttatatgcacgagcggacgttagtgccatccagctgcgtttccttttggtcatctctccgctggtcgctttttattagcactctatctgctcgactgctaatattgtagcacgatgatgcaaaatgtcaatagggtaaattgcaaaagatttgtgaacaagagaaatagatgccgtgcataaaggcatccaaacaaaatccttgcattttccctcgcaaccccttacaatatatataataatgtaaggcaaggagaaccatgtatgccgctgatcatcccgaaagagctgcccgcgttcgacgagcttagccgcgagaacgtgtttgtcatgcaccgcgagcgtgcccagagccagcacatccgcccgctgcgcatcctgattttgaacctgatgcccaccaagatcgtcaccgagacccagctggcccggctgctggccaacagcccgctgcaggtgcagatcacctttttgaaaaccgccacccacgacaccacccacaccccgccggagcacatgaaggccttctacaagagcttcgacgagatacgaaacgagcgcttcgacggcatgatcatcaccggcgcgcccatcgaggacctggactacgaggatgtggactactgggacgagttgtgtaccatcatggactacaccaaggagaacgtctactccaccatccacctgtgctggggtgcgctggccgggttgtactaccattttggcattcccaaggtgcatctgccagaaaaaatgttcggcgtgtttgagcatcgcgtgacccgcccctccaacccgctggtgcgcggcttcgatgaggtgttctacgccccccacagccgttgggccgggccggaccgcgccgccatcgacgcctgccccgacctgcgcgtgctggccgagagcgatgcagcaggcccgatgctgctctccaccgaatccggccgccagatcttcgtcatcggccaccccgagtacgacaagtacaccctggacgccgagtacaagcgggacgtcaaggcgggcaagcccatcaacgtgccctgcaactactaccccgccgacgaccccgcccgcgacccgctgttccgctggcgcgcccacggctacttgctgtacaccaactggctgaactactacgtctaccaggataccccgtatgatttgaaccatttggaagcactggaaaaataaggcaatacctgattttaggagaccacctatgcccaccatttccgcctgtattgtggcgtattgcgattatgaggaagtctgcgccgcggtgcgcagcatcctgcactttacccccgcgccggattttacactgtacatcgtcgataatgccagccccgacggctgcggcaagcagttggccgacaccgattgggccgacccccgcgtgcaggtgctctgcctgccggagaacgtcggctttggccgcggccacaacgccgtgcttggcaaactgcatagcagcgtgcattttatcttaaaccccgacattgttctgaccggggatattttgcagccgatggccgaatggctgctggcccagcccggcgcggccatggccaccccgcagctgcactaccccgacggccgcttgcagcacctgccccggcgcaagcccacgccttggctgctgctggcccgccagctggcaccaaagttcggtggagcgttcaaaaaggctgacgaccactacaccatgcaggacgaggatttgaccgcgccccggcgcatcgagttctgcaccggcagctttatggccgtgcgcaccgatgtgctgcaaaaaatcggcggctttgaccccgcctactttatgtatgtcgaggatgccgacctgacccagaaagtcctgcgggagggcaccgtctggctggcccctcagttccacgccgtccacgcctggcaccgcgcccccatgcgggatgcgggcaagttcaaaatgcagctggtgagtatggggcggtactttaaaaagtggggctgtggcaaagggagcctttaatgagtaccccttgacaaaccttctcccctatgctacagtaaatatatcgcaaggccgctgaccgacggagttttgtggagttaccacaggggacgcggatttcaccttgccgttaagccgaccgtctgggctgcatacactggagtatggtgtgtgcagccctttatttttttacaaaaaacggaggaatcgtacaatgttgagcgacatcgaaattgcccaggccgccaaaatgcagcccatcacagaaattgctgccaagctgggcctgcagggcgaggacgtcatcccctacggccactacaaggccaagctgaaccacctgctggccaaggccgacaagcccgagggcaagctggtcctggtcaccgccatcagccccaccccggccggcgaaggcaagaccaccaccagcgtgggcctggccgacgccatgaacgccctgggcaaaaaaacgatgctctgcctgcgtgagccgtccctgggccccgtgttcggcatcaagggcggcgcggctggcggcggctacgcccaggtcgtgcccatggaggacatcaacctccactttaccggcgacatccacgccatcggtgctgccaacaacctgctggccgccatgatcgacaactccatccagcagggcaacccgctcaacatcgacccccgccgcatcacctggaaacgctgcatggacatgaacgaccgccagctgcggttcatcgtggacggcctgggcggcaaggtcaacggtaccccgcgggaggacggctttgacatcaccgtcgccagcgaggtcatggctgtgttctgcctggccaccgacctgaacgacctgaaagagcggctgtcccgtatcgtctgcgcctacacctacgatggccagcccgtcaccgccagccagatcggcgcggccggtgccatgaccgccctgctgaaggacgcccttgaccccaacctggtgcagacgctggagaacaaccccgccatcatccacggcggcccgtttgccaacattgcccacggctgcaacagcgccatcgccaccaagctgagcctgaagctggccgactacgtcatcaccgaggccggcttcggcgccgac

SEQ ID NO: 7941 - DNA, 443 bp, Unknown
  gut microbiota DNA sequence
ctatgaatatgccaaacaattctacgccgaggtgtacgagttggccaaggagatcgcgggcggggaacagtacattatctccgcggttatgcacgccgacgagcgcaaccgggaagccagtgaccggctgggacgggatgtgttccactatcacctccacgttgtctatctgccggtggtagagaagcagatcagatggtccaagcggtgcaaggacccggcactgcggggcaccgtgcgggagacgatcatgcaggtgagtcacagcaaaaagtggccgatggtccccataatcgacgagcagggacagcctgtgctgaaaaagaacggcaagccccggctggtgagctcctacagcctgctgcagacgcagttcttcgagcacatgcggcaggcgggattcactgactttgaacgcggtgtacagggcagcgatgctgaac

SEQ ID NO: 7942 - DNA, 791 bp, Unknown
  gut microbiota DNA sequence
catctcccaggtaaagaacatttccggctcgatccgcgatgtggcggacatcgagcagcgggccaaaaccaaaggcgtgctggaaaagcgggtggaactaccggtgcaagattttcagacgctgtgtgagatggcaaaagccagcggcaagctgcaggcagagaaccgcagcctgcggatgcagctgcagcaaagcacggtgagagaacaggaactgcgccagcgcctccaccgctgtgaggaacagctggatgcagtactcaccgagacccggccctaccgggaagccatgcgggtagcaccggagcagctgcaggcgtttgtgttgggcatctgccgcctccaacaggaagagaagcggctgaaccgtcagcagcgccgccagcgggccaagggtcaggaccgatgacagaacacatcataaggcagcagggggcagccctgcagaaaggagccgctacggaagatcggcaggagaagaaaacagcacaggcagcggcgtccgccaagtaccgggaggacggcgtgccccagcaggagctggaacggtttgcccggttcctgctgcccaagatccaggcattttaccagtcggaagagggacaacggctgtttgaggagtggaaaaacaggagaaacgtggaagaaaaaacgtgaaagagcaagggatcataaaaatttcctgaaagttggcgtggtgccggaaacaaaaaagctaaagaaagggtgaagtttgtgggtcacaagagccatctggctcttgtggcatttttcttggagatgcttcttgt

SEQ ID NO: 7943 - DNA, 3674 bp, Unknown
  gut microbiota DNA sequence
tcgacctggatgcggaaattgaacgccgcaccgggcataatattcctgacatctttgcccaggagggcgaagccgctttccgccggtacgaagccgaaacgctggccgatgtggccaagcagaaccgccagatcatcgcctgcggcggcgggatcatcaagaccccggccaacgtgcgcgccctgcggcagaacggccccgtgctgtgggtgcgccgccccattgaaaagctggccaccggcgggcgtcccctctccaagggcggtgcggcgctgaagcagctggaagaggagcgcactcctttgtacgaggccgccgccagcgtggtgctggacaacaccggtaccctgcgtgaagccgccgacaaagccgctgcgctgtttgaagcggacgaaaccctataatttgttatttcctgccgcattgtggcagagtgcatagagtgtaaagtatttagaaagaggttcccaaatgatcatttccaccaaaaaaggtgccccccaggctgaactggaccgcattatcgataacttcgagcatcagggcctgtcggtcacgctgatccgcggtaccgactacaacgtctttggcctggtgggcgataccaccaagatcgccgagaaggacgtgctggccaacccctgggtcgagaatgtgacccgtgtgtccgccccctacaagcgcgccaaccgcctgttccaccccgatgataccgtggtggacgtgaacggcatcaagattggcggcaagtcccccatcgccgtgatggccggcccctgcagcgtggagggcgaggagcacaccctcaaaatggccaagctggtcaaggccggcggtgctaacttcctgcgcggcggcgcttacaagccccgcaccagcccctattccttccagggcctgggcaccgagggcatcctcgacctggtgaaggcccgtgaggccaccggcctgcccatcgtcagcgagctgatggatgaggcccacatcgacgagtttgaagaatacgtcgacatcgtgcagatcggcgcccgcaacatgcagaacttccagctgctgaaagccgttggcaagatgcacaagcccatcctgctcaagcgcggtctggccaacaccatcgaggagtggatcatgtccgccgaatacatcatggccggcggcaatgagaacgtcattctctgcgaacgcggcatccgcacctttgagcgcgccacccgcaacacgctggacctgtccgccgtgccggtcatcaaggaaaagacccacctgcccatcatcgttgaccccagccatgccaccggcgactacaagtacatcgagagcatggcactggccgctgtggctgccggtgccgacggcctggagatcgaggtgcacgacaacccgcagtgcgcctggagcgacggtgcccagtgcctgaagcctgaaaagtttgccgagaccatcgccaactgccgcaaggttgctgccgctatcggccgggagatgtaatccatggatgctcgcctgcatgtcagccgcttaagcggccaggccaccgtgccgcccagcaaaagtgcggcacaccgcgctgttttgtgcgcggcgctggccgatggggtcagccacattaccaatattgagtacagccaggacatccgcgccaccttgggcgctgtgacccagctgggcgccaaggtggcggaggaacctgccgccgtgaccatcaccggccggggcagttccggcggattcgtgaccgtaacgcggccggttttttgcaacgagagcggctcgaccctgcgttttatgatcccgctgttcagcctgacggcgcagaaggtgcgcttcaccggtgcggggcggttgtttgaccgcccccaggccgtgtaccagatgttgtttgatcgccagggcctgcgctttgagcagacctctgagggcgttactgtgtttgggcggctgcgtccgggcgggttcaccctgccgggggatgtgtccagccagttcatcagcgggctgctgtttgctgcgccgttgatggaatcggaaagttccatcgaggtgctgcccccctatgaaagccgttcctatgtggacctgaccatcgacgctatgcagcagtttggcgtaaaagtggccgcccgggcgcggaaaaacggcagcgtgatgtaccgtgtggccgcgccccagcgctacactgccagcgactttgccgtcgagggcgactacagccaggcggcttttctggccgtgctgggctgcgcggtcggcggcatcaacgtagtgggactgaaccccgacagccagcagggcgacaaggtcattcttgatattttaaagcgctgcggcggaaagtttaaacccattgagggcggctaccgctttgagcgcagcctgctgaaggccactgaaattgatttggccgattgccccgacctggggccgattctgtttacgctgggctgtttctgcaacggcagtaccgtcatccgcaatgcggggcggctgcggctgaaagaatcagaccgcatcagcgccatgcaggaggaactgaaaaaaatgggtgcccgcattgaggtggacggcgataccgtgaccatcaccggcgtggcactgcatgcccctgccgagccgctgtacggccacaacgatcaccgcatcgtgatggcgctggccgtggcagtgtacgccgccggtttgcccgccctgctgcgcggggccgaggccgtgaataaaagctggcccgcattttgggataccctgcgcgggctgggtgcaaaaatcgataccgagtaggggtgaggctggatgttggataaatcgaaaacctatctgatcgtgggcctgggcctgctgggcggcagatacgcccaggtgcttagcagccacggctaccatgtaacgggcatcgcccgcagccgcgagaccatcgactacgccttgcagcatgaatatattgccgagggtgcgaccgagaattttgacgcgctggttaccggcgcggattgcatcatctttggtttgtaccctactgttttgctggagtgggtcaagcagtacgggcatctgatccagcccggcacgatggtgacggatgtttccggcgtgaagcgcggcgtggtggagccggtgcaggccgctttgcccgagggggcggagtttatcgccagccacccgatggcgggccgcgaaaccagcggcatcacccacagcgccgaggtcaactttgccccggccaatttcatcatcacccccaccgacaagaacacccaggcaggcatcgactggtgccatgctttggccgaggaactgggctttaagcgcatcaccatcctgacgcctgccgagcacgactacatgatcggctacgtcagccagctgtgccatgccattgcggtgagcctgatgtgcgcatcggacaataccgagctggccaagtacaccggcgactccttccgcgatttgacgcgaattgcccatatcaacgataaaatgtgggcagaactgttcttgtggaacaaggacaacctgatctccgagattgacatgttcagcgatgcgctgcaatcgatgcgggaaaagctggtgcaggacgaccgcgaaggactggaggagatgttccgcctgtccaccgagcggcgctcggcctttgacaaaaagtaaccttgtcttataaaacgcaaaacccgtgtgct

SEQ ID NO: 7944 - DNA, 95235 bp, Unknown
  gut microbiota DNA sequence
tgtcttataaaacgcaaaacccgtgtgctgatgaatggcacacgggcttttttgtttgcaggcagcaaaaagccccgccgaagcggggccaacgaaatgaggctgtgtaatgcttgcttagtccttgggcagcaggtgggctttttccagcgccgggcgcagggccaggtacaggataaccgcgcagacggtggacagcagcgagttgataagcgtaacgccgctggcgatcttggtaaagaccgaggcgatctcggcaggctggccgaagatgaagcggttgcggaagtagccgatgaacgggtcggtaaacacgttgaccagcaggccgctgaacgcgctggcggtgacgaccagcaggtacttgcctctgttggcggtagggtaggtcttcaggtggatgaccttatgcgccacaaagccgcagaccaggccgatgatgaacttaaggatgaaggtggtgatggcataaccggggtcgccagcgagaatatcggccaaagccaggccgatagcaccggccaagccgccggagacgccgtccagcagcatagcagtcagcgccgtaaaggtgttgcccaggtggaaggacgagccactgccgaagacgttcgggatgcggaagaactcatacgcaaccaggctgagggcggccatcacgccgatgatgctgattttttgcacagtaaatttcgttttggtcaaagctgctaccagcagggccagcgccactaccacaaacagcagcaaccacatggtggatgtagacataattttctgctcctctgtcttttttaccacaaaacggttgacaaatacttccttgcaaggtatgctcctattatagcgctttctggcatcaataaaatgcccagtttttgatttttttatagtgccagttaaggagagatttgccatgatcgaactggacccccgcttaaaaagaccattgtatgagcagctgtacgccgccctggcggacgagatacgccgcggcgaccgcgcccccggcacgcctttgccagggcggcgcaccatggccgcccagcagggcgtgagcgtaaacaccgtggacacggcctaccagatgctggcagccgagggcctggccgaaccgcgcccccgcagcggtttttacgtgcagaaaacctacggcatgctgcatacccgcacgccgcgcccggccccgcaggctgttgtgcctgccgccccggagcctgtgggcgaacccgccacgctgtttgacctttccaccggcagtgtggacacggcgctgttcccggcgcgcagctgggggcgcatccaaaaggagctgctctaccagcggccggagcttttgcagcgcggcgagatgcagggcgacgctgacctgcggggcgagatcgcgcactacctctcggattatcgcggtgtggagtgtacgccggagcaaatcgtggtgggtgcgggcattgagtatctgctgggctgcgtggcgcacctgttcggtaattacacggcggccatcgagaacccaggctactcccgcacgcgggcggttttgggcaacagtggcttgccttgtacgttggtggacattgaccgggacggtttgtcggtttcggcgctcgaggccagcggggcaagcctgtgctatctgacgccgagccatcattttcccaccggtgtaacgatgcccgccacccgccgggcacaactgctggcctgggcggccgaaaaaccggggcggtatattttggaggatgattacgattcagagttccgctttgacacgcgtcccctcccctgtctgcagggcatggcgggggcggacgggccggtggtatacctgaccaccttctccaaaagccttgcccccggcatccgcattgcctgcatggtgctgccgcaaagtctgctgaggcggtatcgccgggattttgcggcctacgccaacacggtgagccggtttgagcagcagacactttgcgagtttatggcgggcgggtattttacccgccacctggcccggatgcgccttgcctacaagcgccgcatggaaacttttgccgcggcgctgcgggcggccctgccgggcgtggaactggacggtgtacacagcgggctgcattttctgctgacgctgccccaagccgagagtgaagccgccatggtacaggccgccgcccagcacggtgtgcggctgcggggcctgagtgaatattacatggcccggccggagttgtgccgacccaacacggtagtggccggttactcagctctgaaagaggacgacatccccgccgtaacagcagctttagcgggagcatggtgttcctttctttgaacctgctttctttgaaaagaaagtaggcaaagaaactttaaaacattaaaatcacaaagagggtacacgattttttcgtgtaccctctttgattaaaagttcttttggttccttttccttcaagaaaagggccaagcccccgttatttgtccgcagcagcctctttgatagcggccacggtggcggcgaggttctgcatatcgctggggacgatgagcttggtagctttgccgtcagcgaccttctccatagcttccatgctgcgcagggccaggaagttgtggttggggttagcttcattgatcatgcggatggcgtcggcctgggctttctgcacagtcagcagggcctcggcttcgccttcagcctcacggatacgctgctgcttgacagcctcggcgcgcaggatggcggattccttttcgccctcggcgcgggtaatggcagcctgcttttcgccttcggccagcaggatggaggcgcgcttctcacggtcggccttcatctgcttctccatggcctggcggatctccacgggcggctcaatattcttcagctccacgcggttgaccttgatgccccagcggtcggtggcttcgtccaggctggcggtgatcttggtgttgatggcgtcgcggctggtcagggtctcgtccagcgtcatggagccgatgatatcacgcagggtcgtggcagacaggttctcgatggcctggatgggacggttgacgccgtaggcgtacatcttggcatcgaacacctggaagaagacgacggtgtcgatcatcatggtaacgttatcgcgggtgataacgggctgcggggggaagtctgcggcttcctctttcagcgaaactttgcgggagatgcgctcgacgaagggcgtgcggatgtgcaggcccgcaccccaagtgtctttgtagacaccgagccactcggttacgtaggcgttggattggggcacgatgacgatgcagcgcaccagcaccaccagaatgatgataagaagaatggcaaggatccagatcatggcagggttcccctttctttttggtctttcttttgtttattctacggacgttgcttctgtcaccggggtgaccagcagaacggcgccgtccacatcggctacgcagatacgcgcgccctgtgggatggcaacttcggcacgggcctgccaatccagaccatcgacgcggacacggcccggcatgcccggctcaatggccaccagcacgatgccctgtttgccgatggtcagcggcgagccgttggtgaccggcggcttatgctctttccggcggcgggtcagcgtaggcaccataatggccaacgcaaccgccgataccaccgcgaacaccgccgcctggatgcccagcgaagatgtaaagaagctggcaaacatagccgccgccgcaccgatggcgaaccacaccgacaccagcgcggtggtagctgtttccacggcgataaacgccacgatggccaccagccataggatcgtatcaaaccacatacaggctgcctcctttccggcagaatcatttgtgaacactttaacatagtaaagcactgctgtcaagtcttgggacgaaaaaagacgaagcagaaacaaaaaaggctccctctaagagggggccttttgcacgcacctctacaacggggcgcgttataaatagctcatttcctcgcggcgtttgccagccaggtcgggattgtcgaggacggccccggcaccaagggctacgcagtccagcggggcttcggcgatgtgcacatcgatgccggtctcgttctggatgagggtatccagcccgcgcagcagtgcaccaccgcccgaaagcataatgccgcggtcgatgatgtcgctggaaagttccggcggggtgcactccagcgtatccttgatggcgtccacgatgcgcagcaggctttcgctcatggcctcacgcacttcctcagaccggatgaggatatccttgggcaggccgtccaccaggttgcggcccttgatctccatgctggtctcggggtcctgggggcaggcagagccgatctcgatcttgatctgctcggcggtgcgctcgcccaccagcaggttgtacttgcgcttgatgaaggcgatgatgctctggtccagcgtgtcgcccgcacagcggacgctgcggctggacacgatgcccgacaggctgataacagccacctcggccgtgccgccgccgatgtccacgatcatgctgccgatggcatcggtggtgggcaggcccgcaccgatggcggcagccataggctcctcgatcaccgtgacttggcgtgcgcccgccttggcggcagcctggcgcacagcgcggcgctcgacctcggtaacgccggagggcacgcagatgaccacccgcgggtgggccagaatactgttgccgcaggcctggcggatgaaactttgcagcatggcagcggtaatatcaaagtccgcgatgacgccgtcctttaacggtcggactgccacgatggaccccggtgcgcggccgatgacggcctttgcctcgtgcccgacgctgcggacccgcagttcatcactgcgcgggtccacggccaccacgctgggttcccgcatgatgatgccgcggcctttcatatacaccagcgtgttggcggtacccagatcaatgccgatatccttggtaaacatagcctgtattctcctgaaaaatgcagtcagagtgtctttgaatttgcccatgcagctcccactttctttggcggggctgttggcaaatgttacgcaaattcgcgcaaaagctgtgccgcgcggtggaccggcagccccataatgttgtaatagcacccctcgatgcccgcgcaccagagggcagcatgcccctggatggcataggccccggccttgtcatacggctccggcgtgcggacgtaggcgcgcaggtcgtcctcgacgatggtcgagaaatgcaccagcgtcgtctccacggtagcggccgcgcggccgcccttgcagatgcagacgccggtgtgcaccttgtgggtgcggccggagagtgcccgcagcatgcgcagggcgtcagcttcatcctggggtttcccgaacacctcaccgccgcagtccaccacggtatcaaagccgaggacggtatccgccgggtgcagtttggccacagcgcgggccttggccgaagccaggctctgcgccaggtgagccggggtatcggcggcgatcttaccctcgtccacatcgctggtgatgacggtatagtccggtgtgatgagtgccatcagttcgcggcggcgcgggctgccggatgccaggatcaatgccatagcagggtgtcctttcgtgtttgattatagccggggcggggtgtcgaagtctgttcgttccgctcgaggctggaaaattttggaaatttcgtttttgtgggtgtctgcgggttatgttccgccgggtttacttgccggtggagccaaagccaccggtgccgcggtcagtatcggagagttcctcggccgccgcaaacccggcctgccagacgggggcgatgcacagctgggccacgcgctcgccgggctggatggtgtaggcggtgtccgacaggttgaccatcggcacacggagttcgccgcggtagtcactgtcgatgacgccgacgccgtttgccatgcacaggccgtgcttgatggacaggccgctgcgggcgtacaccagcgctacgcaggaggcatcgggcagctcaatggcaaggcccgtgggcaccagcgtgcgctgcatgggggccagggtcagcggctcatccagcacagcgcacaggtcagcagccgccgcgccgggggtagcgtaggcaggcacctgggcgcgggggtctagctttttatattttacggtaggattcatggtcgtctcctaaacatcagttattggtatagtatagtccacgggtgaactcgctgtcaaagggttgggcggcaaaaagctctgccaaaatctgggccgtgcgctgcggggtctcggtggtaaaggcggcaacggccgtatccaccggcatctcccgcaggcggtcgcccatgtagagcggcaccgggttgtatactgtgcggatgcccgccccgccgggggccgagcaggtcacggtaaagtcacggcccttgcggtcccgcagggtgccgccgccgcggcaggaagcgcagtcatgcacattgcgcagcgggcaggcgcgggtcagcatcagcggaaggtggccgtagcagagggccgcagtaggtacaccgggggccaccgcctgcatggcggtcagggccgtttccggctgcagaagcatgccttgcaggcccagggacgtatagcgggcggcgctcatcgggttggtgatgttcaggcccaggccgccatagagggtccagccgtcggtatagcgcagctgggcggggttgttgaccaccgccccggcaaaaccggcgtctttcaacgcggccagacaggcggcggtctttgcctccagcttgccaaacatgacgcggggcagttccagcagggtcttgccgcgccattcggcagggatgctgtcggcttcagcgatggggaataccagccactgcagcttttctacagagtccgccgggcactgggccgcgcgggcaaagcgggccgccaactccgggatgtgacctacgctgtgggctggatagacgggcatctcaaagggatggatagtgtggggctgtacaacactgcgcttttccagcagcttgtccagcgcctcgcggcgcatctcgttccaggcagagccgggcaggaagcccaggctcccctcccctgcgtccaccgtgataccggcggccgcaaagggggtgccgccggtcttgttcagcgcacgctcaattccgggcagcgggtccttctgggcgggctgcggctcgtcagcgctgtaaacgttgaccctgttgcccgcatcatcggcggcggtcagcttgatgccgccatcctcgacgcctccgctgacggtgtactgtatcggcacccgctgcagttctcggcggaacagctcgcgggctttgggcgtggcggcgcgggtggccgcagcgtcagcctcggtgcggacgccgaacatcctgccgtcgttatggttggtcaggtagccgtcggtgaagccagaccgggagaagatgtcccgcaccagcttttcatcatagggctggccctcccgcacagcacggcaggctgccaccgcggcggcagcgtattcgggcgtgcgcagacggccctcgatcttggcgctgaccacaccggcgtccatcagttcccggatgtggggaatataatccatatctttcaggctcaggtggcaggctttgccgggctggccggggcgcaggcccgcgctggcatcaaagggcaggcggcaggggcctgcgcaggcgccgcggttgccgctgcgtccgcctaaaaaggcgctcatcatgcactggccggatacgctcatgcaaagggcgccgtggacaaatacctctacctcaatagggctggcggcgcagacagcgcggatctcttccagcgagagctcgcgggccaagatcacgcggtcgtagcccaatgcggccagttcccgcgcaccctcggacgtgtggatgctcatctgggtagagccatgcaggtgcagcgtgggggcgatggtctttaccatctgggccgcagccaggtcatccgaaatgacggcatcggccccggcttcggccacggcgcgcacggcatcggccagaccgggcagttcgcggtcatagaccagcgtattcagggtaacgtgtacctttacgccgcgggcgtggcagaaactgacagcctctttcagctcgtccggggtaaagttgcccgcagtgcggcgggcgttgaatcccgtaaggcccagataaacagcatcagcgccgctaaaaacagcggcgccaagcatttcacggttacctgccggggctaagatctccagcttgttgctcatgcatcctccaggggggtctgggcgcggcgcaggcggcgctccagttcatcaatgcggcgcttcagcgaggcattctcgcggcgggtctcctcggctgccatcttggcgctggcggcatcctcgaggtaatccttgatttgacggcgcatgttgtcagcgctgccgctggccttttccagctcatcacggtagttcagcgccgtcatcacagcggcggtagtgatcgaaaccgagtttgaggaagccatcagttcattcatatccaggttcaagcggtcggcaaggttctgcatgtagtcctcgctctcgcttgtattgacaacgtagctggacccgcagatgttcagccgcacttttgaagtggccatgcccatgatttgtactccttcccaaattgtgtctaaattcagccctgctccaaccgcggctgaaattttatgctagctttattataatacaaaaccgggcgcagcaaaagggcttttttcataaaagtctaaaaaaagccgccaagcaggcaattttgacttgcgtaatttatactttttagctataatcaataaagtggtgtgttaaagcaaccgcaaagtacgccgtatccctgaaacatacggcggaaaatgatggaaagaacgactgaagaaagttaggagagaacgatttgaaatacacaaagcgtgagtttgagaagctcctgaaagataagttgaccagcgagtgcaatgtcaccctggatactgcttccgccgaccagatctatcgctgcctggcttctgtcacccgccagatcatgtctgaccgccagaagcagttccagtccaaagtgctgggccagggcaaaaagcaggtctactacctctgcatggaattcctgatgggccgcagcctgcgttccagcctgttcaacctggggctgaacgaagtggccgagagcgtgctggcggatgccgacatcaagatcgataccatttacgatcaggaacccgatgccggcctgggcaacggcggtctgggccgcctggccgcctgctatctggacggcatggctactgactgcattcccggcaccggctactccatcctgtatgagtacggcattttcaagcagaagatcgtggacggctggcagcaggaaactgccgacaactggctgcccggcggtcaggtctggatcaagagccatcccgatcaggcccaggagatccgttttgacggccaggctatcgagacttgggagggtggcttccaccacgtcaagtacgagaattataactctgtcatcgccgtgcccaacgatatgtatgtggccggttacggcagcaacggcgtttccaaactgcgtctgtggcaggctaaggcccccagctttgatatgagcagcttcaacgccggcaactacaacaccgctatcagccagtctgcttctgccgagctgatctccaagatcctgtaccccaacgataaccacaccgagggtaagatcctgcgtctgcgccagcagtacttcttctctgccgcgtccatcgccgacatcctgcagaaccacctgaatcagtacggcacgctggacaacctgcctgacaaggtctccatccagctgaacgatacccatcccaccgtggccatccccgaaatgatgcgcatcctgctggatgagtgcagctatgagtgggatgccgccttcgacatctgccgcaaggtcttcgcttacaccaaccacactgtcatgagtgaggctctcgagaagtggaacgccgacatcttccgctccaccctgccccgtatctggcagattgtctgcgaaatggaccgccgttgccgcgccgagctggcccaggcattccccggtgaccagggcaagatcgactacatggccatcatcggcgacaaccaggtgcgcaccgccaacatctgcgcttacacctgccacgctatcaacggcgtttccaaactgcacagtgagatcatcaaggacagcgttttccacgattactacctgttcaagcccaacgccttcaaaaacgttaccaacggcatcgcttaccgccgctggctgctctgctccaaccccggcctgacccacctgctggaagagaccatcggcgacggtttcaagaccgatgcctctgagctgaagaagctggagaaatttgtggatgacaagagcgtgcaggaggctgccgccaaggtcaaacgcgagaacaaggttatcttcgccaactacctgcagaagtctaccggccaggtcatcgaccccgattctatctttgactgccaggtcaagcgtatgcacgagtacaagcgccagcacctgaacgccctgaacattgcggccgagtacctgtacctgaagagcaacccgaacgctgagttcacccccaagacctacatcttcggtgccaaggctgcccccggctactacatggccaagcagatgatccgcatgatctgcaagctgggcaagctgatcgacgaagatcccgctgtgcgcggcaagctgcgcatcgtctatctggaggactactgcgtcagcctgtctgagcgcctgatgcccgcctccgaagtttccgagcagatctctctggctggcaccgaggcttccggtaccggcaacatgaagttcatgctgaacggtgccatcaccctgggcaccctggacggcgccaatgtggagattgccgatgccgctggccacgagaacgagatcatctttggtatgctgacccccgaggtcaacgcactgaagggcatgggctaccatcccggcgcctttatcaacggcgacaacaccgcgatggccgtgctggacttcctggagaagggctggaacggcgaaaacttcagcgaggtcaccagcaacctgcgcaatgctgacccgtacatggtcatggcggacttcaaggattaccgccgtgcccagcacgacctgcagcagctgtaccgcgacaagcagaagtggaatcacatgagcctgaagaacattgccaacgccggtatcttcagcgccgaccgttccatcatggattatgcgcgcgatatctggggtgctgctcccgtcaaataatcatatcttttgatttttgccgtgccccgtgaggggtacggttttttattatccaaagcgaggacaactatgtctcacacctattacaacagcctggataccgcctgcaaaacgccatttggcgcggtgcctgccgggcaagaggtcacttttcgcctgacggtcccggaatccctgggctatgtggacccccacctggtgctgaccaaggaccgcgaggctcccgtgcattaccgcatggagttcgcgggccagacaccccagcagaaccactttacctttaccatcgcccccaccacgccgggtctgtacttttaccactttgacctgtacaccgatttccgccgcatctaccgcgatgccggcggcgagggcgtgctgagctggaccgatggcaccgactggcagctgaccgtttacgagccggatttcaagacaccggactggatcaagaacggcacgatgtaccagatcttccccgaccgcttttgcgagggcaagcccggcaagccgatgccttttgccgaccgcatctaccgcgaggacaagaccggcgagccctacttttggcccaccgagcagcaggaaggctacctgaacatggactattacggcggcgactttgcgggcatccagcaaaagctgccgtacctgcgcgatttaggcgtcagctgcatttacctgaaccccatctttgaggcccacgccaaccaccgctacaacaccgccaactacctgaaagccgacccgctgcttggcacgaacgaggagtttgccgccctgtgcgctgccgctgccaaagaaggcatccgcatcattctggacggtgtattcagccacacggggtcggactcggtctacttcaaccgggagggccgctatggcccgggcggtgcttatcgcgatcgcaattcaccctatcgcagctggtacgacttcgactccggctatcccagcggctaccgctgctggtggggctttgagacgctgcccgaggtgcaggaggactcgccctcctacatcgattttgtctgcggcaagggcggcgtcatcgatacctggctggggctgggggcttcgggcttccggctggatgtggccgacgaactgcccgacgcctttattgagcgcatccgccaggccgtcaaggctcacggtgaggacaagctgctgattggtgaagtgtgggaggatgccaccaccaaggaggcattcggccggcggcgcacctacctgcgcggcaaggggctggacgccgtaatgaactaccccttccgcaatgcggcgctaagctatgtcaccagcggcgacgtgcacgcggtggccgagcagattttgagcatctgcgagaactaccctgccccggcgctgaactgcgcgatgaatttcctatccacccacgataccgagcgcgccatcaccgccattgcgggtgaacccgccaacggccgtgaccgctactggcagagcggacggtgcatccctgccgagaaaatggacgatgccatgcgcaaactgctgctgggctacgccatgatctttacactgcccggtgtgccctgcatctactacggcgacgagattgccatgcagggctaccgcgacccgttcaaccgtgcgttctttgattggaacagcaccgagcagcggctgcgcggcccgctgaaaacgctggcccacctgcgcaaaggctgtgacgccttcgacggcgggcgactggagatcgtgcgggcggacaccgatgtgctgcactaccgccgcattggcaagacccagaccgccgagatcatcctgaaccgcggccctcacctgatcgccgagctggcctttggcaaatacgccgaggtaaaccccggcggctttaccgtgctggtggaggaaaaccaccccgaacatgtggggtatttctccatttactgatttttaacgatttataagcaaaaagcatccgcttaccgcgtgacaaaacgcacgataagcggatgcttttattttttatgttcgcggccgggcagcggcaaactgcacaccagcgcaatgcccagggccaaggccagggcgatttttaaggtttccacacctttgttcaaaaacagcgtgcggtcatcccgcaggaagtaataggcggtgtaatagatgcccgcccccggcaccagcgggaagatgcccggcagcagaaataccgtgacgggggccttgtggtagaccgagaagaaccgtgcgcagagcgtcagcggcagcgtggcgatgagcaccgcaacgggcgcgctaacgctcagcaggtcgtagcagaggatgtaggccatccagcccaccgcgccggtcaagccgcccgccagatagtgccgcttgggcacgtggaaggtgatgccaaagctaatggtggccaccaccgccaccacaaactgtgtaaggtagttggtccagaggggcgtactcatacggccacccccaatccgtgcatgaccagccagcccagtaccacgccgcaggcaatgctgcccgcaatcagcaccgcatccagcaggcgaatggaaccagagaggtagtcgccgttcaggatgtcgcgcacgcccatggtcaaagcgacgccgggggtcagcaccatcagcgcaccgatgatcgccgcattggcactgacggcgggcagtgccgcctgcaccccgaccgaccacactgtgcaggcaaaggccgccacaatatcggtaaagatgcggttgatcttatgctggccgaaccactggcagatcaaaatttccagcaggcccgccacggtagccacggcggcgtccaacggtgtaccgccaaaaaggtaggcgaatccagccgcgccgacgatgcaggccagccgctcgcccgccggcgaagtgcggggcacagactgtgcctgctgcaggcgggcttcggcttcctcgacccccagccgaccggcggccagctcacgggaaagctcgttgatggcttcgacccggcccaggtggatggacactgacggcacatggcggatgagactgacgttgtgggtgctgcccatggatgctgacgcgaagatgccgtttgtcagcacgtagacatgaaagtcccgcacacccaggctgtgggccatgatctccatcgtctgctggacgcgaaagacctcgccaccgttttccagcagggtctgcccggcgtccatcaccaggtcagccgcccgttccagcaggtcattctccacggatattctcccgtacagcgttaaattccgggtaatgggcgtacaggtgcttggcgatggcttccatcagcaggtagtcatgctccgagtcaatatcaatgatgccggtgtccatcataacgctgacgccgaacttggagtgccacaggatggggtccgggttgtccaccagaaaggcgcggcggatgacgtagatggaggcgttgacatcgtagacctcaggggcctgctggcggccggtgaactggctctcgatgaccatctcggcgtggtcgcccacaattttgaacatgttgaaccaggggttgcggcgggcttcgcagacgctgaagatgatctgcagatcctcgcgctcctgcgctttggcaaaggcgttctcgatgtcctgctcagtgcgcagggggctagtgatgtccaggtcgatcatagcgtcgtagggcttgccggtgcgggcctccatacgggcaaagctgtccttgtagacctccaccttgggcacacggtcgccgcccagctcagccccgcggggcaggtagatgacctcggggtattcggcagccaccagcttggccaggtcctcgctgtcggtgttcagggcaatgtccacttccagttcggggtggtttttgataaacagttcggcggcgctcaaggagtaataaaccagcggtttaccgcagaaatttttgagatttttgtttttaaagcctttgctgcctgcacggccgcagatggtgataagcagacgtttcatatcagtgttcccccaaagtcagtttcaggacatccagcgccagcgcgggcgggttgcagctttgctgttcgtcgcccagggcgtagtcagtaaaatattcgatctcccgctcgtagcggcggttgacgtcctcttcataatgctgcacggtgccgtcgggcagggtcagcgtaccggcgccaaagtcggccagatagctgccgtcgcggcagaaaagttcgatgctgcgccgatagccgcggccgaaatagtcaagatgcacctcggccagcaaggtgggatacttggcgatatagaccgacagatcgtcggagtcgatctccagatccgagtaggtgcccttaaaattgtacagctgctgcggcacgccgaacaggtccacaaggtaatcccactcgtggatgaggtcgatggtgacgccgccgcccagcgccttgtgggcgctgtagaccgtgcggtagtcgacacccggccgccaatccggcaggtagctggagcagatgacccgggcgcaataggggtgcagcgtgggcagcaaatctttgagggccagcatcacaccgcaccagcgcatgggcgcggccacgtaggctttctggttttccggcaggcagtcggccaggttcaggccggtctgttcggcagaaaagatcggtttttcgataaaaagtgcttcaccgcggcccttcacctgctgcaatgcctcgacatgcaaactggtggggttggtgataaacaccatatcataccgggcaggtgcggcggccaaatcggtgtactgggcgtgcagcagctcagccacgccgtcccgcagggggcggtgcaggtcactgcgcagggcatcggcctgcaaggtccagccgcggtcagtgcaaaggttatgcaggttttttaagtggcgggtgccgatggaacccaaccccacaaacagcgcggtgatggtgcgcatggatcaggcctcctcgattttgtccatcagctggatggccgccaaatccttggtaaagctccagcgtggcgtctcagtgcccttcagcacgccaaaaaagttcgtcagttcgtccacataggcgttctcgacgatgttgtcgctgtagcggctgtcatgctcaaagctggcgtaagtgttcacaggctgcttgtcgccgtccttgaactcgtacagggccttggggttcccctcccagaaaaggtggatgccgtcgccgaagcactcaaagctgcgcacagccttgcggctgaccacatccgccgccagcacaccctgcacgccgcccttgtggcgcagcagcagggtcacgcagtctgggtacggcaggcccaggtcgctgatggtatccttctgcacagtgacagactcgacatccccgaaggcatccaacagccagggcaggtcgatgccgaatatctcgcgcacaccgccggtacgggcattgcccacaaagaagtttttgtagttttcccaggggtgccaatccggcagatactgaccgatgtggtagatataatgcaccggcttgccgaaagcctgcacctgctgtttgatgtactgcgtttcgcggcggtacagcatggtggaggagaggaacagcggcaggtttttggcggccgccttggccatattctcggcgtagccgtcccctaccaggttcagctcggtaaaaacaggcaggtcgttatccagcagttcgccgatgaccgcagcgtgggagagcggcgcggtgcaaaccagagcggcgtccgggtgctcggcggccacggcctcggcaatggtgggataggcggcatccgccaggcccagggtgcaggcctcggcacggcgggcctcggcggtatccacgcccacaatgtggagggcggcgtcaatgcctttggacaggcgcgcgcggcgcttgcccatactgcccagaccaacgatgagaagtttcataccaaaacgctcctttgggggtcaaattccggcacagggccgtcataaaatattttaggctttgagaaatcaaagttttgcagcacggtgcagatcttgccgctggtgtccccgccgccgtaggggctttgggccgtggcggcggtggcggcaaacttcggacttaacgcgcggcgcagggcggcttcaatgaccggtttctcggcatcacagcacaaaacgttggcgcagatagcgcgccccgcctggcgctggccgatattgacggtaggcaccttaaaggtcggcgtttccaccacgccggaggaggaattgcccgccaccagcacggcgtactgcatggccgaaaggtaccgccgcaatcccaggctttggatgaacccggcgcggtcggggtgttcggcggcaaagcgctgcatgcgggccgtgcagatctgcccgcctgcgtcggcgttagagccggtgatgagccagtagacgccgggcacggcttccatagcggcgcaaagggcttcactctgggcggcaggcgagccggcatcggcagaagtctcggggtggtaagtcaccagcgcaaagggctgctgcagcgggaagcctgtggaattgcacaattcttcccggctcattttgggcagagtgcggatgttctcatcgcccaggccgcccacgcaaaacaccgtttcgggagcttcgcccatacggaccaaccgggcggcgctatcagcgcaggacgggaaatgcaccgctgccattttggtgatgcagtggcggtagtattcatccgccgcgccaagggtcacatccccgcccgaaatgtgggcgatggggatatgccgggccgccgcagcggtggctgccgcgaaaatttcaaaccggtcgcccagcagcagcacggcgtcgggacggtgggcggaaaagtatgcgtcaaacacggtaatggtgcgggcaatggtcacggccaccggctcgttctcatcgcccacaaaaatcggcagacgggccgcgatgggtacgccgtcggcttcgatctcccgcactgtctcgcccaaacgcgggcagaggtgcgcgccggtggccaccagctgcaattgcagcgtgctggacgccgccagcttttgcaccacagggcgcagcagaccgtattccgcccgcgtggcggtcactacacaaatcgtgcgcataaaacctcgttacatctcgattttttcatcctcggcaaagtcgcgcttggcggcttggcccagcacttcgtaccagcgcatgggggaaatgccgtccccggggcgcttggtggtcaggttctcggtggtaaagatctcccctgccttgatggcgcgggcagccacgatgcttttgcgggccaccgttttgttgggggcttcgctctcggtcaggtgcttgtgaccgtcgcccagggcggcttccacatggcgcaccgcgtccaccatagccttgaactcggcagggtcgaggctggctttctggtcggggccgggcagggatttatccagcgtgaagtgcttttcgatcacctgcgcgcccagcacggcagcggcgacgtcacactcccagccgggggtgtggtcggacaggcccaccggcaggccgaactggtcgaacaattccatcatggcggtgaggttggcgtcctcgtagggggtggggtactgggtgttgcagtgcagcaccgtgacctcggggcagccgccatcgtccaggatgcccagggcgtcggtgatctcattcaagttgctcatgccggtggaaagcagcacaggggtgtgcagcttggccacttcctcgagatacggcaggttagtgatctctccggagggcactttaataagcggcaggcccagagtgcccagaaactgcacactggggatgtcaaacggcgcagaaaggtactggatgccgatggaatcgcagtattctttcagctccttatgcccctcgaaggagaagtgcagcttgcggatcatctccagctggctttcggccgcatcggtggtctgcttctggtactcagccttctcggcgaatttgctcacgaccagttcaggcacagcggtctggtactttacaatgtccgcgccgcactctttggcggtcagggccagttttttggccatttccaggtcgccgttgtggttgacaccggcctcggcaatgatggttacgggcatcagggtgcctcctttactgctggctttccagcttgcgtctcattttttccagttcttccagctggcccatatccatccagctgctctcactgatgggatacacgcccaccttctcgccagcggcgcggtaacgctcgatgacatcggggaagccgattttctcgccatcgcgcatctcctccaccacgcggggctccaccacgtagacgccggtgttggtcaagaagtccagctccggcttctcgcgcatggcggcaatgccgccgtcctcgcccagttccaccacgccgtagggcacggtgtagtgcttgaaggcacaaaccatcgtgaccaggttgccgtgggccttgtgatactcgtaaatatcgccgaagtccacatccagtagcgtgtcgcagttggtgaagaagaagggcgacttcatcttgcctttcagcaggcaaaggccgccgccggtgcccataaatacatcctcgtcggcgaaattgacggtgtaatccttttccagttcgccaaaatagcttttgatcatgccgcgcttatagttgacgatcatggtgaaatcgtggcagccaaaatcgcggaagcggtccataatcaactcagcgatgggctgctcccctaccgggatcagcggtttgggcaaaattttggtataggggtacaaccgggtgccaaggccgcctgccatcataacgacggggatgtcagcgcgtttgcggttgtccacatcctcgccccgggcaaagacgatgtcggtgacgacgccacgcttgttgaggatgggcagcgcgtcgatgcaatgcttttgcagcattttgcgggctttaccgcgctccgacaccggcaggctgaggggatggtagttggcggcgttatccactgtctggtccggcgtgccgccgcgcaggaagaatttgcggatgtcgccatcggtgataacggctttcagctggccttccggcgcgatgaacaggatgcgctggccggtctcgtccagcttgcgcagggtctccagtaccgtggcggtaggctcgataaacaactcttctactttgatcaagggtcagccccctttcgggcggttatttttacagtaccagcacggcctggcagacgcgctcgcagtcctccatgctcaggttggtggagcagggcaggttgactatgtacttgcggtaatcctcggccttgtccagggcgtaggcctcgttgcgggggtagtcggcctgctcatggatgagcgcccagaccgggcgggtctgtatatgctgggcctgcagcttttcaatgacggtgtcacgatccaggccggaatccttcaggtacaggctgaagaaccagtggttggagcggcactcttcttcgcggaagggcaggatgcgcagacccttgacgccgtccagggcggcgacatagtggtcgtacagttcctttttgtgggcgataaagccctccagccgttccagctgggccaggcccaggcaggcctgtacgttggtcatgcggtagttgtaacccacctcgtcatgcaaaaattgcagcatatcggccttggcctgggtggaaaggtgcttggcgtgctcggcccaatcgggatgattggagacgaccgcgccgcctgcgccggtggtgatgatcttgttgccgttgaagctgtagcagccgatatctccgatggtaccggcaaacttgcccttgaaggggccgtcgatgcactgggtacccagggcctcggtagcgtcctcgatcataatcaggccgtagcggcgggcgatggccatcaggcggggcatatcggccatgttgccgaagacatgcacagcttccagcgccttgacatgggcaccggtggtcttgttgtacagtttgccgtcgcgcagttcgcagtggttggcgcagaagtcctcaacagcgtcggggtcgatgcaaaggctgtcgtcgcagccgatgaagatgggttcagcgccgacgtagcgggtcagcgggttgacagcggcgatgaaggtcagggtcgggacgatgacttcatccccgcgggtaatgccggcagccatagcggccaggtgcagggcgctggaaccggcgttgcaggccacggcgcggggcatgcccacgtagttggccagcgcttcctcaaactcggtgactttgccgccgctggtggagacccagccggaggtgatagcctcgctggcaagctctgcttcgcgggggccgaaattcgggacagaaagcggaataaattcagacatgatactgcctcccaaacacgcggggcggtggagcctgccgcgtggcatagttacaaaaacattctattttattataccgcatttggctgtgtacgacaagtagcaaacgaaaaacaggcggcttgcctcccacaaaccgcctgtaaaatgtttgattttaaaagccgatatggtaagtcataatcggcacgttgtaagagactccctgcatcagccgcaccagatagcacacgccgctgatgatgtgccagcccagcgccatgccgcacagcacggtgctggcgcttttgggcttggcgagtgcctgcttgaggaagatgcccaccgattccagccagagcacccagaagcagatgaacggaccccaccagaggttggcgtggtacagccggtcgccgccctccaccagcagcagggcttcggccatggcgacagcaaacagaaacaggctgaatttataacggaagctgccaaaagccggccagcgcagcagcagcgccaccgccgccacaaagggcagggagcggagcaggcccagcagcgcggcctcgttaaagacgccccacagcaaagcgtggcggtcgaactcggtggtgaagatcagccgcagaccgctgccttcctcgttaaacaggacgttggcctcgaggatgcaaagtcccacgccggggaaaacgctgcagcccatcagcacctcattgccaatattttttgcgcgggtgcgtatgaaatcagcaatcagcagcaccagcagcgccggggcgaaagcgaagatcaggtttgccttaaaggcggtggctgccgttaaaaatgccatgtaaatcagccaggtgcgcagatcgatcctgccgtcgatcccctgccaggcgcggtagaaccacagtacggccagcagcgcaaagggtgccagcataatgtacgttgtgttgtggtaaattgtgccggtgatggtaccctgataccagtagccgccgcgggggatgtagaccgcctgggccaggttgaccacaaagctggccagcagccgggcgggcaggctccattcgggcagggcggcctttaccccccaggcaaacacaaccacagcggccagatgaaacacggccagcagcagcgcaatgcccatcttgccgcccgcggcataggccgggccgataagcagcgaggtggccgagtagatcagcccgctttgggcaaagtgcagatgctgccccaggtcggaggtataggggtcctcgccccggccggtggcacaaagctgctggtaatgcagccacaccatggccgcagcaaacagggccagcgccgcaaggcaaagggcccacagcagcctctttttacgggtttgcgtcatgtaagtttgtactccttgattcagctttgcagccgcagcgtatcgcccacgatgggggcggtctccggcagggtgaccagcgtgccgccgttttcggccttggtttgcgccagttctgccaggggctgggtgtgctcggtctcggtaccgtcggcggcgcgggtggtgtaggcaagggtgcccgccaggtctgtctgtttgggcaggtagacggtcatgccggtgacggtgtcgaggttatcatccgctgccgtgcccagccaggaaatatcggtgcgcttatcactgcccagggcaaagcctaaacggcagacggtggcctcatcatggctttcggtgcgccagacaggcaggctgtgggcgttggtgtcggtatcggcatagcgcaggaagaaggcgttttccgcctccaggtcgccaccccagacggggtaatcggtcacgacaggcgtttcggtgccggcagcatcggccagaccggcctctacgccctcggcaaataccgtgtaagcgcggccgcctttctcataggaacgggccgccgagcgctgccacaccaccgagaaggccatacccgccgccagcagcacactgcacacggggcgcagcttcggccaccagtttcttccgcgcacaaagcgcagcagcaccacgaacacagcgacagccataaggcccacgccgaaggactcgacggtctgggggatgtaaccgtggcgccaatctacattgatgccgtcctgatatttgggcgaaatgccaatgagcagcgccggggccgacagcagcgccagaccggtcaaaaacagcagcaggttttccttgcgggtgggcaggcggtccagcacggccaggacagccattacgcaggccgccagcgcaatgccgcagatcacgtccgaaatctgcacattggtgggcttgatcttgccaaagaccatggcgttgagggggaaccccgccgacatctgcatcacccaggtgcgcagcaccgcaggcagatcaaagttaggcgatacgccgccaatattaacgccatttcccggcaggatgccggcacggcgaagctcgttgaccaggcgggaccccatattgaagccgaagctgatgatttcgcccgccagcggtgccagacaaaggcgcagggcagggcgcatcttgccggagccggtgtagagccatgcgaagccgaacagcgccgcaatgtaggtaaagccgatttcaaaggtgccgcaggccatgaacatgaagaaagccgacagcaccgcccaccgcacatggtgggtatcctgccagcgcagcatgcacaggcccgccaacagcaccggcagcagcgtactttgggccagcgcgccgtaggagtacatgctgttgcccgtggcgtcctgccagagggagaacatcatgggcagcaggcagaacgccagcgcgcccagctttttactgtgggtggccttggcggtcagccaggccgtcagggtgatgtccgcataggtccaggccaggatgtacagccggtacaccaccagatcgcccaggaaccagctgttgagagagcggaccggcggcgaggaaaacggccggaagcgggggctttgcagggccagctggttcaaaatttccttggcgtgagtcagcaccacctgccaccagggagtgtgggtgatgtagtagtagttttgcagattgatgatctcgtcatcgccgcccaagggcgcgcaggtggtgatgctgagataccaccacccgaacacgaaggacaccgcgcagaccacgggcaaaaaccagcggctcccggtaatttttttgaggttgttacgctccatcggtcatcctttccccagcgggatgtagcacagggtgccgccctcgctgatgatgacatcgctttcgtcacagcctgtagcgtcgatcagcgcctgcagggtgggctgctgttcttcctcggtgtagccgtccaggtccaggtagatgcccgccatgccctgggcgcgcagttcggccaccatggcctccggctccagctcgctggtcgccttgtaccagttgtcgttcttggtaccgtagcctgcgccgtagctgaatttcagcgttttgctgtgcagcgggccgcgcagcagcgtgtagtcccacattttattctgggggccgttctcgaagttcttcatgtagggcagctggaagatcatagcgtcctcccctgccgccgactcgacctcggccataaagtcctcgtcctgctgccaggtctcctgtacggattcgtacttaggattgtaaagcccctgctgctcccagaagccgaagaccagcagcaccgccagcaccgcggcaaaggccgccctggatttgccagtgcgctgggtcagccgcttttctgctgtaaggcccatggtgagcagcgcaaagaagataatgtacgggctgatgcggttgtacccgcggataaagcggataaaaatgccgatgatgctgccaaagccggccagggtggccagcagcagcgccataacgttcagccggctgagcagccagacacggtcgcccagttcggggcgcccggtgcggccggccttccaatcccagttatgcagcagcatcaggatcaaaaacaaaaatccgatgatgcccatgatgccgagatagccgtagctgttctcgttgtacatggggccttcgtcggtggagaggatctggaagtagcgctggatccaccgcgtcagcttgccgatgccaaagccgttgggcgaaagcagcaaactgctgatgcgcaggctgtagatgtccgcacccaccgggctgcggtagacgccgttggtgatggtgctgccaacccccaccagcttgcccagcaccatggggaagaaatccggcaccatccaggcgacgatctcgccgatggtgaccaggcagggcacggcgggcttccaggcgtggtcacgcagcatcagacagagggccgtaacgcagaggaaaaagcaggtaaagtacgggtagtaggccgcaccgttgttggcgatgccccaggccatagccagagccagccagttgcgcttatttttgaagaagcctttgccgggcttgttaaaattggggtcctctgcgcaccagaggcagagcaggaccgagaacggcacaaactccacggcggccagcatcatgtggccgcccaggcgctgctgcacataggcacacaggccgaaggtcatgccgaagccgtaggacagccaccggcgcatgcccaccatgcggaataccgtgtacccggccagcgcattggcaaaggggataaccaggatgtacaggttgaacaccgtgccggtatccttggtaaacaggcccacaaaggccacaaaaatgtcgtagacaaggtcataattcggctcgtaggggctgggggcctggtagaacggccaccccagggagccggtcagctcgccaaagctgcgccggatctggcccacccagtagatgccgtcgccgccgtagagcatgggcaccttccaatccagccgccagagctggaaaaaccagtattccgccagcgcaacgcttgccagcagcagcaccactgtcaaagcttcgcgcagaatatcctgttttttattcagcatagcgttcctttcattccccgcgctgcatggctgccacgtaagcatcgcacacttcagccgaggggccgtccccccgcaggtggccatggtcgatccagatagcgcgcttgcagagctgcttgacctggttgatgtcgtggctgacgaaaagcagcgtcgtaccgccggaaagcatctgttccatgcggtcgtggcatttctgctggaacataaagtcgcccaccgacaaaatttcgtcgcaggccaggatgtcggcccgcacctcggtggcgatggagaagcccaagcgggcgatcatgccggaagagtagtttttcaccggcacatcgacaaaatcccacagttcggcaaagtcgatgatgttcttgaagtgctcgtccatataggcacggtcgtgccccaggacggcaccgttgaggtaaacgttctcgcgggcggtcagctccatatcgaaaccggcgcccagctcgatcagcggggcgatctcaccattgacccgcaccgaacctttggacggatacatgacaccggcgataagtttgagcatcgtgcttttgccgctgccgttgcggccgatgagcgcgacagattcgccgggttcgatggagaaggacacgtcctgcaaagcgtagaactcgttaaagaaaagctgatgtttcagcagttttacggtgtattctttcagcgtctcggtcttttcctgtgccaggttgaaccgcatcgagacgttatccacctgaatgatgggcatagggggaactccttacagatacagaataaagttgcgctgcagtttgcggaaagccgccaggcccaccaccatcatgcccacagcacagacgatgcaggcaaaccaggtgttggggccgggcaccgtgccatacatgaccaggcaccgcatgcagttgatatagtggtacagcggattcagcttaacgatcgctaccataaaaggcggcaaagccgagatggggtaaaacaacggtgtggcgtacatccaggccatggtaacgatgccgtacaggtattgcaggtcgcggaagtagaccgccagcgccgacagcagcagcgccataccgcaggtgaacagaaacagcagcaccaacggcgcccataccagcagaaaggtcaggtggaagggcgagcgggtgatgagcatgaccagaatgatagccgccaggctgaacagcaggttaacaaagctggacaccacacggctgatggggaaaataaacttgggcacgtacaccttcttgataagggacgagttgcccagcacgctgcccatgcccatattggtgctctcgttaaagaagttgaacagcgtgttgccgcagatgaggtagagcgggaagttctcgatctggaagcggaacatataggaaaataccagcgtttgcagcagcatcatcagcagggggttcaggatgctccacacatagccgaggaagctgcggcggtattttaccttgaggtcgcgggtgaccagctcgcggatcagcggccggtacttggaaaagttgtgccagctgccgcgcagctgggcggtggttttaccttgcattggaaaatggctcctagtaaagttttgattttttggggcgggccgcgccgctttgcgcccatagggcggcgggcgcagggctgccgttactgtttaaagggggtatccccggtcaggccgtctgcgcgcagcatgttctgcatcacgtcgatgtcggcgctgatgtccatggcatcggcggcaaacagctggtccagctgggtctcaaaggcatgcaccagcgtgtccatcgtctgctcaatgcggtgtttggactcggtgatgttctcgccctcgacgccctgggaatccagctcagcgtaggtttgcagcagcttcagcgaggtgggcaggtagtagtccatgaacttgcgcatgcggggcagcttgtcagggtcggttttggcctgctcaaaaattttggccgagacagcctccagacggctgatcttgtcgctcatctcctcgtcggggatggcatcgttgacgcggcgcagttcgtccaggatcttctggtaccggtccttggtctgcgcggcctctttggccgcttgggcctgggtctcctgcgttttggcgggggccttgggggccgtcgtttcgggggcttttcccttgaccaccaggcagcggcgcttcatatccaggtaggcgtccgggccaaagacaccggcatcgatgcagttttccaggtgcttgcggcacttgtcatagccgcaggggatggcagcggcaatgtcctcgatgtacatatactgcgaatcaccgacgatattggcgatctttttgcgcaggcggttgccggtgcgcagcttgtgggcgccgaacaggcagccgatgccgcccgccgccgcaatcagcatcggcatgctgtcctcgatgagccagcgccagtagtagccgccctcggccagcgcatcaggcagccagaagatgccatccggcagggcgatcagcgcgcagatcagcagcgcaacgcccgccacggtcagcgccgtagcggcaccggtctttttgccctgcttttcggcggcctccacagtcgattgcggcgggacgctgcggccataaatgggggtgtttgcgtccgcgttccggctggtggacgttccgctctcgtccacgcggcggaactgggcctcgtaaacggttcggccgtccgatccggtcgtggtgcgggaggtatgggtaaactgggacgtccgctgtcgggcacgctcctccaagtcggccatcttgccctctttcatcagcttgttcatgatgataaaggcgatgccgacaggccacatcccgatgcaaaacgggatgacgatggcccaccaggggaactggaacggcttgtctgccgggcggcgggaccgggtggaatattggttttggtagcggccgtcactgccgctgtaggggtggccggggtctgtgtagcgcggcccctcatcctgattctgcatacgatgctccttctgcaatactttccttttaggcaataccgcacaattctaagtgccgatatggcatgccgcagccgccggagcggtgcttaggccgtcaggccagaattgtgcggcattaccttttacggcaggtcggccagctggctctgcatctcctcgctgaggtagtaggtgctgccgggctgatagggattgtttttgctgtaaggcgtgtgggtacacaggtagctgacccacttgttgtagcccgaaaccgtcagatggatgccgtccggctgtgcgtaatcggtgagcaggtagccgttttcgtcgctgaactctgcgttcaggtccaggtagtacaggccgcgctcctcgcacagggccttgatctgctggttgatggggccgatgtggtccggcgaaaggccgggggcgtcgtcctcgacggtctcctgcgtggcgcacagaatggattgcacataaaaggtggtgttgggcagcgcggcgcgcagctcgtccagcatgcgggcgtagtaattgatgaagctgtcctcgttgccggtctgcaccagggcgttggtgcccagcaggaggtagagcttggcgggctggttggcggccagcacgtcgagggctacttcctcgccgcggtcagggctggtgacagtggtgcggttgacgatggtgttggggctgatgctgcggtagccgcagatgagcgcaccgcccacatcgatgttgtattcgttggcgcagaaacctgcggtgagggagtcacccaggaaagcggcatcggcaaaccagctggtgctcacgcggccaaactcgcccaactgcacagatttttgcggtgtggcggtgtaggtgtaaccggtatcggcgctttgctgctgcgggccgacggtgccccagttgagagtctgcacggtgccgctggtatcgctgctgttggtgcccgcgtagggcagcggggccaccagctgggtggtgcccattactgccggggcttcgggttcggtctcgcctttcacacttttgggcaggatcagcgtgatgatgccggacagcgccaggatacccgctgccgtgcccaaaaaggcggcacggcggcggcgacggcgcatttcccggcggcggcgagcagcttgcctccgctggcggtcggtcggggccgggcggggaggctgctcaggcggcggagtggggcgtgcccaatccccctgccaggtatattcagtttcggggcgcgggctgcgcggttcctgcggcgctggcataggcgtgccctcctttgtttacagatagctatgcagtattgattatagcacaacccctgtaagaaaaacagtaggaagaggaaagttttttgtgtagccttgggatgcaacaaaaaagctcccctcaaagggagcctttttgttaccgatacaactttttctgctgctgatgggctgcaatcttgatataggcggagcgcggcagatagcggcccagggtcatgccagcggccaccagcgggccgggcacgatgatggtcttgcggcggtggatgccgtgcagtgcgcatcgcacgcagaattccggcgtgatgccctttaaggcaaactgcacgttggccacggcgttgaactccgtgttcaccggcccggggcagaggcagcctacatagaccgggctgtgcatctcccgaagttcctcggccacggcgctggtcaggctgacaacataggccttggtggcgtagtaggcagccatgtacggcccggcaggcatcagccccgcgcaggagccgacgttgagcagcgcgccgcccccctgctcttccatctgctggacgatgcgcttggtcaggatgtgcagcgcccggacgttggtctcgatcatctgcagttctttttccaaatcggtctgcagaaacggcccgcaatcaccgaaaccggcgttgttgatgaacagatcgatgcggcggtcggccaaagcatccgccagacgcaggcactcgcttttgcgggccaggtcggcggtgaaaatttcacactcggtggtcaagctgttggaaagcgcctgcaaacggtcggcccggcgggccaccagcatcaggttataaccgcgggcagaaagctgacgcgcgaactcggccccgatgccggagctggcaccagtgacaacggcaaatttaggcatagggatgttgcctccttttctaaaaatgccccggcgcgaagccgaggcactgtaaaactgcttaatggtgacggcctacaccgccgccacggctggaaccgccgccggtgtggtagccgccggatggacgggaaccgccagaggggcgcgatggacgagagccgcccgaacggcctgcgccgccaaagcctcccatgccaccgccggtgcgataaccgccggggcgaggaccaccgggtcgcggcccaccgccggggcggggcccaccgccaaaaccagggccgcccggcggcgggggcggcgggggcggcggacgccgcggccgacgggaagcacggcccatgctgtaccagaacatatcacggccaacgccaccacggggccctccgccgcggggcggacggggcggtcgggtcagcgtggagacgacccagatgatcaggatgaccgcaatgataaccatgataaagcccatgatgttgctttctccgtttctgccaaatgtgttgttggctacggacgaagtatccagggtcacaccatagatgccgcacagcttatccgcaatcgcggccacggtagcgcacacgccggcatcgtaatcgccgctgacccagttgggttccatcttgtcatccaggatcgtgcccagggtgctgatggacagggccgattccaggccggtaccgcgggtgatgtagtagtcatcctcgccgggggccagcaggagcagcacaccgttgtccctatcactggagcccaggccccattcgttcagcacgctgtaggcgtagccttccatggtggagttgccgatgtactcggtcgtatagacgccgatctctgcgccgcaggtgctttgcagggcggacgagatctccgtaacataggcaatggtatcccgggaaaggatgccggcatagtcgtttacgggggtggttttatccacctggggtgctgccgcagccggcagcgccaggaccaccaccgcaaacaagctgaccagcactgccgccaggcggcgcgccagtttatttgcagatacgttcattttcattttccttatcgtgtcacggttcaaaggtcggaatgtcctttacgccccacagcgcagcctgcaccccgccggggaagccggaggcaagcttcaggtagctgtcggcttcttgattataggcagcggtctcgcggtccaggatcatctggctggaaacaaagctgtcatacaaatcggtcagctgccctttggccttgctgtccgcttcgtcggcggcggccgtgtacagggtgtcgacggcggtgtacagctgccggttcagcgtgtactgctcgttggcatctttgcggtcggcggcttcgttccagttatccagcgcagtctgggcggcctgcaggtccgcatcgtcggtacccactacggcagatgcaatgcggatgaggctggcggcggcatcggcctgattcgaaaaatcctgctggatgccgttgccgtagtcatcgatctgactggtgtagatctcgctggtctcgcgccactggccttttaactgtgcgccgccgatgcccagcaccgacgccacgatcgccacggccagcacggccagggcggcggggcgctttttggccgcggcgggcagcctggtctccgcctcgccaaagacctccagctgggggcctttgatttcgaagctctcctgttgttccagttgcatagttttatccttgttataaaatgccgttcgttaggggttccccctgagagggggcctttcgagtgggacccttttacgcgttgatctccagcagtttgctgcggagctcgccttcgatgcggcccagctcctgctcggcgttggcgcgcttgaccttgccctcggcgcggatcttgttcagctcgtccagcgtctcgatgagctgcttgttggtctgccgcagggtctcgatgtccacgatgccgcgctcggactccttggcaatatcgatggtgccctgcttgagggtagcggcgttcttgcgcagcagctcgttggtggcgtcggtgacggcgcgctcggcctgcatggcctgctggctgtgggcgatgcccagggccaggaccatctggtttttccacaaggggatggtgttgacgatggttgtctggatcttctcggccatcatcgtgtcattgctctggatcaggcggatctgcgggcccatctggatggagacgttgcgggtcagctccaggtcgtacagcttcttctcaaagcggtcacacaggtcggccaggtcgcgggcagcctgagcatcctcgggcagctgggtgcgctgggctttttcctgcgcagccttcaggtcagtattgcgcacctgctccagcttctttttgccggccaggatgtacatcgtcagttctttaaagtagacaaggttcagctcatacatcttgtccagcatggtgatgtccttcatcagggtgacctggtggtcttccagctgggccttgatgcgctccacgttcttgtcagcactttcgtagcgggtcttgagctgttccaggttattgcttgcctttttgaacagacccagaaagcccttgggctgctcggcggtggcgtcaaagccctgcagctcagagatcaggctggtgatgagttcgccggtctcgcccatatccttggtcttgacgcgggagagggcggtctcggagaagtcgctcagcttcttctggctggcggcgccgtactgcagcaccatctgggagttggtgatatcgatcttctcggcaaagtcattgaccatcttctgctcttcggggctaagcggggtgtcctcgaccttgacaggctcggccttgggggtttccagcttggcagcctcggcggcttcgtccgcgatagggtccagtgtcagggtgggggcagcgggggcggtcaggtccagttcattgttcagttcagccatgggaggtcttcctttccatttcaaaatatatgaatatgatccaatcaggttgcggctcaggtcaggttctggctcttcaggatgccgtccagcacctcaatatcggtggagatgtccatcgcctcggcactgtacagggcgtccagctggttttcaaaggctttggccgtggtggcggcgttgcggcgcagctcggtcaagatctggtcggcgttcccgcctttgacgccgttcttttccatgttggcgtaggtcgtcatcagcttgatgacctcgggcagatagtagcgggcaaaacggtcgatgctgcgggccttatcgggggactgctccaccgctgcggcaatgctgcgcccggccttttccatccgcgtcatggcggcggaaagttcggggtctgggatggcgtcgttcaaggcatggagcttatccaggttggccgagatacccgaaagcatggtgtccacatcctcactgcccgtggcgtagggcacctgcttacggatgacgcgggtggggcagaatttggtgcccagcccgtaggccgccagactaagccctgcgatgatgagcaggttggacagacggtaagccggcagcagcagtgcgcccaccggccacaccagcgccgccagatagatcggcagcaccgggcgggtgcgtttttcttcccatttattcatctgcaaagttctcctttgcgctgcttatgttaaaattgtagcgatatattcctattatagaacaaaatcggtacgttcgcaaccgttttcctgcaaaaaaggcagcagttcccggccccaggcggtgcgcagacggtccatcgaccacgccgcgttggcgggactggtgctgggcagcaccacggcgggcatacccgtgcttgcctgggcatattttgcatagacacgccccgaagccgcgccgttgcagaacaccgcctgcacccccagtttgcggatgagggcggcgacgtcgttcggttccacattgcggatggaggcatcggacgcgccgcggatgtcgcaggcaccgatggtatcccacaccgccaggccgtgcttcaggatgatggcctttttcgcctcgatgtcctgccaggcgggcaccggctcgccggtcaggctggccatcagcggccaaaagcggttttgcgggtggccgtagaaaaagccctgctcccggcttttggggctgggaaagctccccaaaatcagcgctttggcccgcgccccatacagcggcggcaggccggggcccacatgggtgtaggcagctttggtcccggccatgttagaatgcctccggccaaagttcccggcagaggtcagccacgccgtggggttcggcgtcggggccggtgcggtcggcggcggctttggcgttggcgctgccgttggccatggcgatgcccatgcctgcggcagccaacatggcggtatcgttgtcgccgtctccgatggccacgcactcctccggcgtcagacctgccagcccggccagctcgcacaggccggcgcctttattgacgcccttttgcataatatcgcagccatcgctgccggggtaggagtagagaaactgcaggccgagatagccgtacttttcctggaactgcgcggcttgttcctggggcaggaagccgaagcagccgaagggcatctccaccagatggtgatcctggtcctcgccgtccacgatgttgttgtacaggttcttggccttttcccggcggtcaaactcggcaaaatcaatgtaggcgtagttggcatcgtggaaggtgaaccgcaggggcagctcgtaatcctcgaaaaagtccacgagagcgtacatttcttcagcagtcaggcggtggagggccaggtcattgcctttggcgtccaccagctgggcgccgcccgcacagacccagtaatcgggcttgaggtcccgcagcaggcccttgcccacgccggtgcggccgcggccggtggcgatggcgattttgacgcccgctttctgcacggcgcgcacggcggcggcgttctccttggggatctgctcgcagctgccggggcgcagcgtgccgtcaatatctaaaagcaacagcttgtatctcatggtttgtttcctcctggtttgatcccttaggcaataccgcataattctaagtgccgatacggcgagcgaggtgcggcagctgctaagccaaaagcgcagataatactttgtgtattatcgagcattttggcaacgcaggtgccgtgccgcagccgccggagcggtgcttaagccgtcaggcgggaattgtgcggtgttgcccttacattatagcagagtatgcggggcaaccgcaaggcatattctggggtggaggtggtgcggatggcacgggacagcggattgatctttgcggagcagccccgcaggcggcgttggccgctttttgtgctggcggcggggcttgtgctgcttattgctgcgctgccccggctggcagtgcttttgcccgccggggtgcagcgggtggatgccgcgctggcggcccgctttgtgccccggtacgaggcccggctggcgagtttgcaggcagagaataccgctttgcacaagcatctggccggggcgcagattgccttggccgagaatgatgccttgcggcagtgggcaggcatcgaacgcccggcggggcgttggcaggccgcgcgggtggtgttccgctggcacgaccatgcagaactggcaggcgtgtaccccgtaggggctgccgtatgcgatgggcagggacggttcgccgggcgcatcaccgaagccggggccgaccgctgcacgctgacctttgcggggtatctctcccctgctgccgccggctttgccggggagcaggccgggctgctgcaaaagaactggcggctgaccgggctgcccctgcccaccacgttggccgcaggcacggtcgtgaccaccgccgacggcctgtggctgggcacgctggcggggatacctgcccccgccgccgacggattgagcgccgaagccccgctgacggatacggcagatttagggagccaggtgttttttataaaaatgtaacatcttttttgccgcggaaatgttgctatttcgccagggattgcctatactggatgtagacacatcaaaagcctccctctgggagggaggtggcgcggcgtaagccgcgacggagggagagagccatatctatgcccaaagtttcgggcaatcggtaagctccctcccccatcgcctacggcggagccccctcccagagggggccgtttgcgtgtgcgctcggcatagaggcaaaggaggtctcacccatggataaaccgcaaagcacccggcggcgcaaggcgcggcggcgagtgatggtgctgctggtgctgtgttgtgccgtgtttgcgctgtttctggcgcggctggcctggctgcagtttgccatggccgaccactacgcccagaaaatggccgaggccagttcggccagctacaccctgccccagcatgcggcgcggggtgccatcaccgaccgcagcggcacggttctggcccaggatgagacagtctacgacgtatacctgcgggttcccgccccgccgggcacgaacctgcgggagacggcaaacacaatagcggcgctgacaggcggcaaggatgtggaaacacagcttgccgccttttgttctgccgtttcggccggggagctgccggttacccaggggttggacagcatcggggccgccgcttactaccgcgccgggctggtgcaaagcggcgcagtgcggctggccgcgcggggcgtacgccgctggccggatggcacaattttgccccacacgctggggtttacggggccggtcaccgccgaacagtggcccgctgccagggcccaggggctggcgatggacgcgacaataggccaaaacggtttggaagccgcctacgacaccctgctgcgcgggcgggacggccagctgcagatcaacgtcggtttggacggtgtaacgcgggaaaccatgcagacatccacccctgtgcccggctgtacgctggtgctgacgctggacgctgacctgcaaaagaccctgcagactgccctgcaaaaccagatggacaccctgcgcaccaccaagggcatcggagccggacgagaggtcagggccggggccgccgtagtggtggatgtgcgcaccggcggcattttggccgcagccagcctgccggattttgacctgagccgctatcgcagcgactatgccgcgctttcggcggacagcgccgctcccatgctggaccgggtctgccaggggctgtatgcgccgggttcggctttcaagcccgctgtggcggccgcagctttgacagcgggcatcgaccctgccgctaccgtaaactgcacaggtaagtacttttattacagcaactaccaccccggctgtttgcagtacggccaccgcgggccggtggacctgcgcaccgcgctggagtacagctgcaacattttcttttacgataccgggcggcggctgggcgtggatactttcagtgccatggcccggcagctgggccttgccaacgacaccggcgtggaaattacggcggcgcaggggcggctgacctggtccaccgacaccaactaccaggacggcctgaccctgatggcggccatcgggcagggcaacaccgccgtcacgccgctgcagctggcccaatacgcggccacgctggcaaactacggccgcaagccaaccctgcattttgccgaccgcgccgtgcagcctgccaccggcgcagccgtgtggcagtacgagccggctttcaccgagatccccggcggcgaggctgtgttcggccccatccgggatggcatgaagcggatggcccagaccgcccgcgccctgcgggaggcccctgttaccgttgcggccaagaccggcagcccccagctggccgacaccctgcccggcgggagccactacgtcaactcggtgttgatcggctacgccccggcagacgacccgcagattgccatggctgtggtgctggagtatggcggcggcggcgccaacgccgcgcctgtcatgcgcgccgtgctggacgcgtggtttgaataaagcttgcatgattgcatgacttttgcaggcttcgtttgcgctttgcgcaaccgcttttacaattttattgtgatattgcgcaaaaatattttgtgattttttaccaaaaaatctgttgccgaagcgcagacagtatgctataatgtagacagaatagtgtcgcggtattgtgcggcagagggagcttccatgagcgcacaatgtattatgatctgttccggtaaaggcggcaccggcaaaagcaccgtttcggtgctgctgggtgcgggcctggcccggctgggccgcaaggtcctgctggtggagctggattccggtctgcgcagcgtcgacattattgcaggcgtctatgggcgcacggtgtacgacatcgaggatgtcctttgcggccggtgtgaaccggccaaggccatcgtgcccagcccgttgtacgccgggctttcggtcatcagcgccccgtatgagggcggcgaggtcgcggcggtgccgttgggacggctgctgcaggccgtgcggccgtactttgattttatcctgctggacaccgccgccgggatgggtgcaccgtttacagcggccgccacagtggcagaccgtgccctgctggtgctgacccccgaccccgtggccctgcgggacggcaaaattgtggccgaccggctgctggcgggggggcgtccccaaagcgccgtgcgcctggtgatgaaccgcgtcacgcgggacagcttcggcaagcgcgccagcgtggaagatctggatgaatgtatcgacaccgtgggtgcgcagctgatcgcagtcatccccgaaagtgtcgctttacagcaggccggtgccgccggtactgtgccccctgcgcacgatgccgctgttgtggccgggcaggctttggcaaaacgcttatgcgggcaaagggtcccgcttactttctaaggtgcatatttgtacgaattaccgcaaaaggatggtggatcactcatgacgatcgctctggttgcacatgactccaaaaaggagctgatgatgcagttctgcacagcttatcgccacatattggcacagcatcacctgattgccaccggcacgaccggccgcctggtggaggaaaacgtcggcctgcccgtgcagaagttcctgcccggcggccatggcggcggccagcaggtcatggctcgtatcgcctgcgaggaagtggacatgctgctgttcttccgcgaccccatcgctgccaagcccagtgaacccaacgagatgaacctgctgcgcatctgcgatgtgcacaacatccccgtggccaccaacatcgccaccgccgaggttctcatccacggcctggagcacggcgacctcgactggcgcaccatcctgcacccgtcgcatgcgtaaaagtcaaaaaattgcgcaaaaacacccccgcagatttggttggtctgcgggggcgctttgtttattgcggtttgcttagtagttcataatatccttcaccacgccggacatggagaagagtctggcggagaggtggtcgaggtagacgatgcccagcttgtggccggtttcctcgttgtacaggtcggccagctggggcatgacctggaaagcggcggcctgggcttcgggggtgttgtcaaagttggcagtgccctgcacgcgcagccactcgccgcggtcgttggctgcgcagatctccaggttggtgttgtccagcagctgcttgtaggcggccttgtgcttgcccagggcaatgcacaggtggtccttataccacatggcaaagccgatggggcgcacgcggggcaggtaaccatccacggtggccagatagaaagtggggttttccttcaggaattccataatttcttcattcggtttcattgtacgttcctccgatgaattaaagtgcagccagggcggccttgatgcgggcagcagcctctttggtgcgggctgcgtcaccgaaagccgtcaggcggaaataccctttgccgcaggggccaaagccctcgccgggggtgccgaccacgttggccgtttccagcagccagtcgaagaactcccagctgcccatattgttggggcagcgcagccagatgtaggggctgtttttaccgccgcagtaccacacaccggcctcgtccagggcagcggcgatgacggcagcgttggcgcggtagtagtccaggttctgctggatctcgcgcatgccttcctcggtaaagacggcggcagcaccgcgctggacaacatacgcaacaccgttgaatttcgtagtttgacggcgcagccacatcttattcagcttaccgccggccaaggcagtgggtaccacagtatagccgcagcgggtgccggtgaagcctgcgatcttggagaagctgcagacctcgatggccacctccttggcgccctcgacctggtagatgctgcgggccaggcccggctcggtgacgaagcactcgtaggcggcgtcaaacaggatgacggcatcgttctgcttggcccagtccacccaggctttcagctgctccaccgagtaggtggcaccggtagggttgttggggctgcagatgtagacgatgtcagcgtggggggcttcgtccggcatgggcaggaagttgttcccggcggtggcgggcaggtacaggatcttacggccagccatcacattatcgtccacgtagaccgggtagacggggtcgggcacgaggatggtgttatcccggctgaacaggtccagcaggttgcccaggtcgctcttggcgccgtcagagatgaagatctcggccagatccagcgatacaccgctcttggcgtagtacttccggatggcctcgcgcaggaacgcatagccctgctcgctggggatgtagccgtggaaggtctccttgcggccctgctcctcgacggccttgtgcatggcctcggtgaccgaagcggccagcggcagggtgacgtcaccgatccccaggcggatgacatcggcctccgggtgggctttctggtaatcagcgactttatgggcgatggtgctgaagagatagctctcgttcagctcggcataatgcggattgagctgcatggtagtccccctctatggatgttcggtattcctctaattaggataactttaccacaattttgcaatcggtgcaagataaaagcggcggaacttgctttaattaagcaaacggacctcccacaaagcgcgggcgaaacgctctcccggccatcttatgccggggaaactgcgcaaaatgccgcccaccacttgcgaaatacctataactggtgtaaaataagtaaatactagaaatttggggtgcaattatggcagaagagaaattttccaactttttgacggatattatcgatgccgacctggccgagggcaaggtcgacgtggtgcatacccgtttcccgccggaaccgaacggctacctgcacattggttcggccaaggcaattttcatcaactacaccatcgccaagcattacggcggtttgttcaacctgcgctttgacgataccaaccccgcccgcgagggtgacgagtacgtgcagagcatcctgcaggacctgcactggctgggtgccgaccccaacggcggcatctactacggcagcgattattttgagcgctgctatgaatatgccgagcagctcatccgcgagggcaaggcctacgtggacgacctgacccgcgagcagatgcaggagtaccgcggcaacgacgctggcaaacccagccgtcccagcccgtaccgtgaccgcacgcctgaggaaaaccttgacctgttccgccgcatgcgcgctggtgagtttgccgacggcgaaaagaccctgcgtgccaagatcgacctggccagcccgaacatgaacatgcgcgacccgaccatctaccgcatcaagcatgtgacccatcaccgccagggcgacaagtggtgcatctacccgatgtacgactttgcccatcccatccaggacgccatcgagggcatcaccttcagcctgtgcagcctggagtttgagaaccaccgcccgctgtacgattgggtcatccggaacctgttcggcaaggaattcccgaagcagcgcgagtttgcccgcctgaacgtgaccaacaccgtcatgagcaagcgctacctgcgcgaactggtggagaagcacatcgtggacggctgggacgacccccgcatgcccaccctgtccggcctgcgccgccgcggatacacccccaccagcatcttcacctttgttaaggaggccggtatctccaaggccgacaacctggtggacatgcgccagctggaggccgtgctgcgcgccgagctggagctgaacgcccagcgccgtgtggctgtgctggaccccatcaagctcatcattgacaactatcccgccgaccgttgcgagatgttcgacctgcccaacaacccgaaccgcgaggtcaacgacaccaccacccgtcccgtggcctttaccaaggagctgtggatcgagcgcagcgacttctttgaggtaccgccgccgaagttcaagcgcctgaccctgggcagcgaagtgcgcctgatgggcgcttacctggtgcgctgcaccggcgtggacaaggacgaggccggcaacgtggtggccgtacatgccaacgccgacctggagacccgcaacggcaaccccgccgacggccgcaaggtgcgcggcaccatccattgggtcagctgcgagcattgcatcgacgccgaggtcagcctgtacgacaagctgttcaccgaatccaacatgaacagcatccccgacgatgccgacttcaaggattacctgaaccccgacagcgtgaccaccgtgccccacgccaagctggaagaaagcctgaaggacgccaagcccggtgaccgcttccagttcgtgcgcaacggctacttcacccccgacagcaagcacgcgggcacctacaaccgcatcgtgacgttgaaggacagctttaaagtttaattcgcatagcaagacccggtctgccctgaaaaatcggagcggccggtttttttgacaggccggaaaaaggaggagttcccatgagacgcatcatgcttttgtctgccgggctgctggcgctgggccttacggcctgcggggctgccggggcggtgaatcccgccgcatcccctgccgcaccggcgcccactgcgctgcctgacgaaaacgcgcctgaaatttctgagcctgccgtttctgttgagccttacagcgacctgcgctatctgccctggctggatgactatgccaagcagacctatcaacccgacgaatacaacgcctctgacctgtacacctatacctacaacaccggcactgcgtttgccggggccgaggacgaagccgccgcattgctggaggcgtgcaaagaccccggcctgggtgtgcgcagcttgcaggcgcgcggcatcaccggcaggggcgtgaacgtcgccatcctggaccagccgctgctgaccgaccaccccgaatttgccgaccgcatcgccgcttactacgataccggctgcgagggggagaccagttccatgcacggtccggcggtagccagcctgctggcgggcaaaaccatcggcgtggcgccggatgccaacatttactatgcggcctggccttcctggctggaagacagccgctatgccgcggatgcactggattgggtgctgcagcaaaacgaggcgctgcccgaaggtgagaagattcgggtcgtttccgtttcggctgcgcccggttccgccgatatgttccagaacaccgacctctggaacgccgcagccgcccgtgccgaagaagccggggttctggttttgaccgtagagggcgcaggcacaaaaccggaccgccttatgccctatcctgctgtccttgacccaaacgcccgggatgacccagccgcctgtcgggtcggctttcctggcgaggacggttcctcggtgtttgcaaaaaatgcacttgctctcccctgctcttaccgcacaacagccgaggaatacaccgccgggcagttcggctacacccactacggacaaggcggcctgagctggggcatcccctactgcgccggggtgatggccctgggctggcaggtggaccccaccctgaccggcgatgagatcatgcggtatttgctttccaccgccgccaccggcacggatggcaactccattatcgacccggtacattttgtcgagacgctggaaaccaaccgcagcacctgaaccaaacagccagccccgattttgggggctggctgtttggtttataggcaaaatctcacaaaatttcaaatccctgggtggtgggatattgaaatttcgagattttgagacaacgtcataccatcgttgattttttatgttatggaacgatggtgtaaagagaagtgaaataacgggtagtttgtactaaccgtattctcaaaatttcattatttcactatccagctcatgaaattttctatgagaaaatagcacaggaagtagtattgcagtttccaggtatagggtaatacctggaaactgcaatactacttccctgcaatgatagagcatgtagggtcgaacactgttcgcccgtcaacttggcgtggcagcgccttgccgggaaagttgctcatgcggcaaacggccgcgggcgaccagtggtcgcccctacgatcaggtttgtgcgtcccgcttcgcaatgcagcgtttcagccaaccgccgcgcaggtagtagaggatgaacagcagcgacgccagcgtccaggtcagggggtagctgaactcgaccgtggcgatcgtgtgatagagcgggaccatcgtggtcagccacagcatccgcaggccgcagacgaaaaacaccgtgatcagcgtcggcacgcggacgtcgccgcagccgcgcagtgcgccggacagcacctcgatgctgatataggtgatgtacaccggcgtcagcacatgcatcatctgcacgcccaccgccaccacgttgttatcctgcgtaaacacgcggaaaagcggctcggccccaaagtagaagctgacactgaccaacagcgtcagcccggcggccatggccatacacacccgcacgccgctgcgcacgcggtcgtactggcgggcgccgaagttctgccccacaaaggtggtgatggcaatgcccagcgagttgatggtcatccagaatacgaaatcaattttgccgtagacgccccaggcggcgatggtgtcggtgccaaagctgttcatgcagctttggatgaccatgttgctgaggttgtacatggcgctttgggccgccgccgggatgccgatggtgcagatggcccccaggatgcccggctccatccgcattttgtccagcgagacatgccagggcatgccctcggagccgatgacgcagcgcagggtgagcagggcgctggccacctggctgaccaccgtggcgatggccgcaccggccacgccccagcccagcaccgcgatgaacaccacgtccagcacgatgttgaccagcgacgcggcgatgaggaagtaaagcggccgcttggaatcaccgatggcacgcagaatataggtgccggtgttgtacaagatctggggtatcatgcccaaaaagtagatgcgcagatacagcgtggatgcgtccagaatttcgtccggcgtgcccatcaggcgcatcatgggctgggccgtcacaaggcctgccagcgtaagaaccgcaccgatgaccacgctgaacaccagcgccgtgtgtacctggcggtcgacgccgtcataatcccgcgcaccgaaactttgcgataccacaacacctacgccgctgcaaagcccaacgaacaggcctaccagcaggttgacgaacgcccccgttgcgcccaccgctgccagcgcccgggtgcccacaaagttgcccacgatgagggtatcggcggtgttgtacagctgctggaacagcgtgccgaaccagatcggcaggaaaaaggccagcagctgcctggggatgctgccggtcagaatatcagtctgtttgacatttgccatgtttttgctccgtttttcttgtcttttcttccatttcatatttcttgccacactattttatgctataatgtgggcaatgtaaaggggtgatttttgtggccgtactttgggaaaactgcgcacggggggaaaactgcgcgcgtggtgcgcgggtgctgcggatgctgggcgatacgccctgcccggtggtgccggataccgtggatggcctgcccgtggtggagatcggcccctattgttttgccgacagggccgtgaccggcggtgccctgtggcctgcggacagcgccgacacccatgaagtcaccggcaattttgtacaggaagtcaccctgcccgacacggtgcgggtcattgacagcgcggccttttataactgccgtaagctgcgccggatacggctgggcaaagcggctgacagctttggcagtgacctgtttaccaactgccgcagtctggaagtgctggagctgcacgccggtcccggcgaggcaacggggttaaagcggctgctggtggccatcagcgcggacgtgacggtggagttcaccggcggggcgcggttgttctaccccgaatattttgagctgctggacgaaaacacccccgcacacattttcaaccacagcatcgagggcgagggctaccgcatgcggcaatgctttgcggcggacggcagcctggactttgccgcctacgacgccagctttgcccaggcctgcgtgggcgaaagtgaggagaagctctgccgccttgcgctggggcggctttgcctgccctacggtttgggcgacgatgcccgtgccgactacgagttttatctgactgcccacccggacgcggcgtttacgttggccatcaccgcccgggatgaagcggcggtaaaactgctggttggcctgggcctgcccaccgccaacgctgccgctttttgcgcccggcaggggtggagcgcgggagccgcgctgttattaggccgccccaaacgcgccgcgaaaaaaacgtacgattttgacgatttgtagaatattagcaaatataacgttgcgtattgcagaaaggagggcaccatggctaagcacatccaaacccaaaccgagtgggaatccacaatggcacggcgcattatggatcagctgcggggcgagttgtatctcgaccagcgctacctgaacgccgccctgggtgccctgccccctgccccgctgccccccggtaccaccggcgcggcctttgccgccgacggcgcccgcctgtgctatccgcctgcctgggtgctggccacctaccgcaaaaaccggcgctacctgccccgggcttacctgcacagcgtgctgcactgcatcttccgccacctgtggctgcggggcggccgcgaccgcaccctgtgggggctggcctgcgacatcgccgtagaaaacacgctggacagcctgaacaccccggccaccacccgcccggtgggctggctgcggcagcaggcctaccagcaattgcagaaccaatgcggcttgctggccgccgggcctgtttaccgcgtactgcgggagtgcgacgaggaaacgctgaccaggtggctgcgggagttcacctgcgacgaccaccgcttctggcctgccgacccggacagcccgcaggcccagatgcagggcaaacagtgggagcagctgggccgccagacgcagctgagcatggaggaatccggccggcacgccggcgaaaacgccggtgcccgcgccctgcaagcgcaagtacaggccggccgaagccgccgcagctaccgggattttctgcgcaggttcgctgtctggcacgaggaaccccatctcgaccccgaagaattcgacctgggcttttacagctacggcctgcgggtgtacggcaatctgccgctgatcgaaccgctggaaagccgcgaggtgaaaaagatccgcgactttgtcattgtgctggacaccagcgaatccaccgccggggagctggtgaaagcctttttaaaggaaaccttcaccttattaaaaagccaggacagctttttccgccagtgccgcattttggtgctgcaggcggacaatgccatccgggacgagacctggctgaccgatctggacgcactggaccgctacaccgcccgttttacgctgcacgggggcggcggcaccgacttccgccccgcgtttgcccgcattgccgaactgcgggagcaaggcgagctccgtgacctgcagggcgtcttgtattttaccgacggcaagggcatctaccccgcccaccggccgccctttgagaccgcctttttgtttttggaggacggcaccccgccgccggaagtgccctcctgggccatgcgcctgattttgcagcctgaggaatttgaatcgattgagcaacacgaccgcaaagccccgccgaaaggatgatgcgttatggatattcaacgtgcgaaagaggaaatcaaacaaaccgtgcgggcttaccttgcctgcgatgacaccggtgcgccgctgatcccgccggtacgccagcgccccatcctgctgatgggcccgccgggtgtcggcaagacccagatcatggagcagatcgcccaggagtgcggcattgcgctggtggcctacaccatcacccaccacacccgccaaagcgccgtcggcctgccttttatccgggaacgcagctacgcgggcaagacccgcagcgtgaccgagtacacgatgagcgagatcatcgccagcgtgtacgccgctatggagcgcaccggcaaacagaacggcattttgtttattgatgagatcaactgcgtcagtgagacgctggcccccacgatgctgcagtttttgcagtgcaagaccttcggcaaccaggccgtgcctgccggatggatcatcgtggccgccggcaacccgccggagtacaacaaaagcgtgcgggagttcgacctggtcacgctggaccgcgtgcggcgcatcgacattgagccgaagctgagcgtctggcaggagtacgcccgcgcccaccgcctgcaccccgccgtgacggcctatctggaactgcggccccagcatttttataaaatcgagaacgatgtggacggcgtgcagttcgtcaccgcccgcgggtgggaggacctctctgcctttttgcaggccgctgacaagctggatctgccggtggacgagggcgtcatcggccaatacctgcgccatcccgaggttgcccgggacttcgccgcctactgggtgctgtaccgcaagtaccatcaggactacggcgtcgaggacattttgcagggcaagccctttgatgcggtggtggagcgtgccgtcaaagccggctttgacgagcgcatcagtctggtcagcctgctgctggcgggcctgaacacccgctttgccgccgcgcggaacattggcgctgtgaccgatgcctgctaccagcaattacgcagttttaagcgggcgctgaaccagcagcccgaggccgggcctgccgccttgtttacggagcagtgcgagagctaccgccagcggttggaggaagccaaagccgccgccagcctgctgcccgaggaactggccgcccgcatccgcaccgccgccctgctggacgcctggggcaaaaagctggacgaagccctggacgccgaggatgcctttgacgccgtgcgggccgagttcaatgcccaggtgcgccgccgggaggacgccgtgactgccgccggggacgcgctggagtttgcctttgactttatggagcggatctacaatttcggtgagaccgggcaggagatggtcgttttcgtcaacgagctggctcttggccccgactctgccccctatctggccgagaacgagtgcgagcgctttgagcggtacagccaaaagctgttgctgcaccagggcgatgacgaaattctcgccgaactggaacgggatgatattcgggcggaggaacacagcgcagagttttgatgcagtagagcataaagcctccactcgttctaaaagtcctactttctttactctttcccgccattctgttataatactggtaatccggcaattgggccggtgttttatgagggggtatatcgtatgaaagcagttatcaccgtcatcggccgcgacaccgtgggtgttgtcgccaaggtcagcgccgtctgcgccgagctgaatatcaacatcgaggacatcacccagtccatcatgcaggatatgttctgcatgatcatgctggtggacatggcccactgcaacgcagaccacgttgccatgcgggaccgctttaccgccctgggcgctgagatgaagatgcaggtcaccgtgacccgtcaggaagtctttgacgccatgcacaccatctgacggggaggaattgggagatgcgaattctgaaccgcaacgacattatggaaaccatcggcatgctgaccgatgaaaacctcgacgtccgcaccgtgactatgggcatcagcctgttggactgcatcgacccggacggcgagaaagcctgcgagaagatctacaacaagatcacccgcctggcgggcagccttgtctccaccgtggacagcatcagcagcgagtacggtattcccatcgtgaacaagcgcatcagcgttacgcccattgccatgctgctgggcgccgcccccgatgcggacccggtcatgtacgccaaagccctggaccgcgcggccaaggccgtgggcgtcaacttcatcggcggctttggcgcgctggtgcacaaaggcttttctgccggtgaccgccgcctgatccaggccattccccgcgctttggccgagaccgatattgtatgttccagcgtcaatatcggctccaccaagtcgggtatcaacatggatgccgtcaagctgatgggcgaagtcgtgcgcgagaccgccgagctgaccaaggacaacatgtgtatgggcgacgccaagctggtcgttttctgcaacgcccccgaggataacccctttatggcgggtgccttccacggcgcaggcgagccggattgcgagatccacgtgggcgtttccggtcccggtgcggtgcgtgctgccctggccaagctgcccaaggatgccccgatggacgaagttgccgagctggtcaaacgcacggcgttcaagatcacccgtctgggccagctggtggccaacctggccagcgagcgtctgggtgtgccggcgggcattatcgacctgtccctggcccccaccccggccatcggtgacagcgttgcgaatattttggaagaaatgggtctggaaagctgcggctgctgcggcaccaccgcctgcctggccctgctgaacgatgccgtcaaaaagggcggcgtgatggccagcaaccatgtcggcggcctgtccggcgcattcatcccggtgtccgaggatgacggcatgatcaacgcggccaactgcggcagcctgacgctggaaaagctggaagccatgaccgccgtttgctccgtgggcatcgacatggtggtcatccccggtgacaccaccgccgaggtcatcagcggcctgatcgctgacgaagccgccatcggtatggtgaacagcaagaccaccgctgtgcgcgtcatcccggccatcggccacaaggcaggcgacgtgctggatttcggcggcctgctgggccacgcccccatcatgcccatcagcaagttcagccccgccgtcatgatccaccgcggcggccgcatccccgcccccatgcaggcgttgaagaactgattttacagggattttgttccttctttgcaaagaagggatcgaagaaactctaaacaataaagatattgcagcctaagcggttcccttgtgcaaaggagcctttgaccgcactatgaataaatccctccccaacgcgccatactggcgtacagggagggatttttatgtccgtattcaaaaagattttgctgctgctggccattatcggcggcatcaactggggcatctacggcatctggggctttaacgccgtgggctggctgctgggcggctcgctgtcctggctgtcccgtaccgtgttcatcctggttgggctggcctcgctctgcctgatccccagcctgtgcatgggcgattcctgcaaaggcaaagaggcctgacctcacaagattgccactgcatccacacggctgcgccgcgcctgcaaacccacactcagcaccaggccgacgcagaagtacatcatcaccacgctcgacccgcccgccgagaaaaacggcagggtcacaccaatcacgggcagcacctgcaggttcatgcccaggttgatgaccgtctgcaaaaacagcgcggcaaaaatgccaacgcagatattgcggcctaaagcgtcccggctttgcagcgctgccgtcagcgtgcgcaggcacacccccagcagcagcgccagcaccgccgccgcgcccacaaagcccagcacattggcgagatacgcaaagataaaatcgttccatgcgttgggtacaaagatatgctccggcgtgaacagccccgtaccggtcagcccgccggtgccaatggccatggcacccttgttctgctggtaggtaatatctgccaggttcgggtcatcgggcgtgatgaccgccaaaatgcgcttgaactggtagccttttaagatgccggggcgcagctttagcagcgcgccgccgcccacaacgcccgccgccagcgcaccgcccgcgacccagttggacagcccgcccgcgtacagcataaatacgccaatgccgagaaaaacaagcgctgtaccgtcatcgccctggatatggatgagcgccgtaggcacgccgatgtgcaaaagcaaaagcagcaggtttttgggctgattcacccggccccgcacccggcttaaatgcagcgccagcgttaagataaagctgatctttgccagctcggcaggctggaaagtcatgccgcccacccgataccagctgtaattggaggtcccgcccgcatcgtacccgatggtgacgacccccgcccggaagttgtgcaaaaacagggtgggtagcaccagtccccacgccaccgtggcatgcagcggccaggcgcgggccagggcacgataatccaccgtggagaaaatgaccgccagcataatgcccagaaaacttgcaatgagctgcaccgacgccttgttgttggagccgagctgcgtctgcccgatggagaccagcaccaccacgctgaccgccgaacacgccgcgcacagcgccagatacagcgcatccacccggcgtaggtagcggcgtaacagggcaaacatgggctggcctcctctccaaaatttttgcgtacaatatattttctaccgcatattataccgcatcctgcggcaatatgccaactttgcaattaaattttacaaatcgcgcttttcgtattataatatagtacgaatcagggcgcggggtttatgcaataccgtgggcccttaaaaggagttttcctatggaaatcatcactcattcccgcgaggagaccgttgccgccgggcgggagtttgccaaaacactgccgggcggggcgctcatcgcgttcaccggcgggctgggcgcaggcaagacagcgttctgccagggcctggccgaggggctgggctgcaccgacccagtttccagcccgacgttcgccatcgtcaactactaccgcggcccgcgcccgctggcccactttgatttataccgcatccacaccgagaacgaccttgccgccgccgggttctacgactatctggacatgggcgcggtggttgcctgcgagtggagcgagaactgcgccgacctgctggagcaggagcagcccatccatatccacatcgaccgggtggacgagacgacacgtaagattacgattagttgattttatagattttattacataacgtataggtgattgtatgaatatcctggctgtagataccgcaggcaagtccgccgccgtagccattttgcgggacgacaccctgctgtacgagacccagtgcaacaacggcatgacccacagcgagaccctgctgcccatgatcgacaccgcgctgcgtgcctgcgggcttacgatggaggacatcgacctgctgggcgtgaccagcggccccggcagctttaccgggctgcgcatcgggctttcggtggtcaaggggctggccctgccgcggcagatcccttgcgcgggcgtttccaccatggcagcgctggcctatggtctggcgggcgagggcactgtcatcggtgcgcaggacgcccgccgcgggcaggtgtactggggcgcttttgacctggccacccacacccgcctgaccgaggacgccgccgcccccgtaacaagtttggaaaaatttgtacaagactgcaaaaaaccgctgttttttgttggcgatggcgcaactttgtgctacaatagttataagcaggtctgcggggtcgcaacctgtccgcccgccctgcaggtgctgcggggtgccggggtggcgctggccgccaaagccatgtgggaaaccggggcctgcgtgccgcctgctgccctgctgccggactaccaccggttgagccaggcggagcgtgaacgcgctgaacgcgaaaaacaacaaacagaggggactaaataaccaatgaagtttgacaaaccgatcgcactggctgccgaccacggcggctacgagctgaaagaagccatcaaagcacatctggatgagctgggcgttgcctgcaccgactttggcaccgactccaccgccagcgtggactacccggactatgccgccaagggctgcaaggccgtgctggacggcagctgcgcactggtcatcctgtgctgcggcaccggcgtgggcatgtcgatgtgcgccaacaagatcaagggcatccgcgcctgctgctgcagtgataccttcagtgcagagttcacccgccgccacaacaacgccaacgccctgtgcctgggcggccgcgtggtgggcgctggcctggcctgccagatcgtggacgctttcctgaacgctgagttcgagggcggccgccaccagaagcgcatcgacaagatgatggcgctggagaacctgtaacccattacccctgttgacattgcctgcacgggcaggctggaataaatatttgtacaaggagataccaccatgagcgttgtagaaattgttgaccatcccctgatccagcacaaaatcagcctgctgcgtgaccgcaacaccggcaccaaggagttccgcgatctggtaagcgagatcgccatgctgctgtgctacgaggccacccgcgacctgcctactgaggaagtcgaggtcgagacccccgtggccctggcccgcaccaaggtgctggctggccgtaagctggccctggtgcccattctgcgcgccggcctgggcatggtcgacggtatgctgaacctgatccccgccgccaaggtcggccacattggcatgtaccgcaacgaggagaccctggagcccgtcgagtattactgcaagctgcccagcgacatcaacgagcgtgaggtctttgttctggatccgatgctggcaaccggcggcagctcctgcgatgccatcgcccagatcaagaagcgtggtgccaagcacatcaagttcatcggcctggtggccgctccccagggtttgaaggctctgcatgaggctcaccccgacgtcgacatctacgtcggcgccctggatgagaagctgaacgagaacggctatatcgtgcccggcctgggcgacgccggcgaccgtatcttcggcaccaagtaatttttaacaggtaacagtaaatcccccgcagttttacgctgcaggggattttttattggatcttcaactgttatttcaggtggcgcaggtcgccgttctcgcggaagtcctcgtaatccagcgagagggacgggctgtagtaggggtcatggaggatgttctccttgccatgcaccgcgtacagacggtcatgctcggcgtcaaagcgcgccttttttgccgggtcgttctcgtccgagccgcgggacttgctctcgtggtggtacagctcggcgtagggcgtccagacgatgcgccagcccgcatcccgcacccgcaggcagaagtccacatcgttgtaggcgacggtaaactcctcgtccaaaccgtggacgctgtcgtacacggcggtgcgcaccagtaggcaggcggcggtcacggcggagaaatcctgcacagtggccaggcggaacatatacccgctgccgccgcgcttgtggtatttgtggctgtggcccgcgtagccgcccagcccggtgatgatgcccgcgtgctggatggtgtcgtcggggtagtaaagcatcgcgccgcagatgcccacgccgggctgggcgcactcccctgccatctgggtcagccagtcgccgccgataacctcgatgtcgttattgagcagcagcaggtacttgcccgccgcatatttgcggccaaaattgttgatgcggctgaagttaaacccgcccttatacatgaccacccgtgcgttgtcgtaccgttcggggatgcgcttgtagtagtcgaaggtggcggggtcggtggagttgttctcgatgacgatgacctcgaagttttcgtaggtcgttttggcgtagatgctgtgcaggcacttctccaaatcatcggtgtggtccttgttgggaatcaagatcgaaaccagcggctccgggtctggcaggttccacaccacatggcaggtgccggggaatttgcccggctccacagtgccgtggcggccggtggcggccagatggtcggccaccgccttacgggcggccgcttccacgtagggcttagccccggtgccgccgctggtggaggccgcatgcacccgccagtagtacaacacctgcgggacatgcaccggcttggcgtcagggtcgcggcgctgcatttcatcgataagccgcaggaaaaggtcatgatcctgggcaccgtcacactccgggcgctcgccgcccacggcttcgaacaattcttttttgaacaccgccaaatggcagatgtagttgacggccatcaggtattccggcgcgtagtcgggcttgaagtggcccacgcgggggtgttcgggggtcttctcaaacaaggcctcgtcgctgtaggcgaagtccgcgccggtctcagccagcagcttgcccatacagtaaacggcgtgaggagccagcatgtcatcatggtcggccagcgccaggtaggtgccggtggccagcttggcggcctcattggtgttggcagcgatgcccttattttcaatcctgcggtagacaatgcgcgggtcggatgccgcgcgggcctgcacggtgcgctccacgtcggtgtaagccgcatcgctggcatcgaccagcaccaactgccagttgggggacgtctggccctgcacgctgtccagaaattgctgcaggaattgcggcggtgtgttgtacagcggcgtcaaaatgctgatagccggccagcttttggcgttttgcccggcgtccgcacgttgggtgtccagcgtttgcttggcgggcaggtagcgggcctttttgccgaagaaccgccgcttaaagaaccctgctgcccgggccgccatcacaccgacgccctgttccttcatcagggtgcgcgcatagccgaacagttccttgatgcgtttcgtttccaggctcatggtggtggctcctttatcgaggatttcttaccttctttgaaaagaaggtaagcgaagaaactttaaacattttaaacaatattagccgtgcaggccgttggactgacgctccatgttttcgatgatgatggtgtggatgtcgccctgggtggcggcgtattccaacaccttccacggggtgtcagtgtggtaatgcaccttgacgacatcatcgtcgccgacgaccaacaggcaatcgcccttggcgctgttcaaaatgccgtcgtggatggcgtcctcgtcgaggtcgtggccttcaattaaaaactgggtatcaaacttattttccatgcaaaacacctcctcacttcaacccgaaattttcaaacaaattgttgaaatgcgggttgtagtaggggtcgtaattgtcgatatactgtttatatttggcgtagaagttggccttttcccgctcatagcgcttggcgttctcacttaacgtgtcaagacctcggctcttgctttcgtagtggtaagcctcggcgcggggggtatagacattcagcaggccgcgctgccacagctttaaacagtagtccacatcattgtaggcaacagcaaacttttcctcgtccaggccgccgttggcacggtacagcgcggttttcgtcatcaggcaggcaccggtaacggccatgtagtcctgggtggtgaccaggcggtacatgtcgcccacggcggtgcggggatagctcttgtggctgtggcccgcgctgccgttgatgcccatcagcacaccggcgtgctggatggtgtcgtccgggtagtagagctttgcgcccaccgcgcccacgtcgggccgctggctgtaactgagcagttcccgtaaaaagtcgtgggaaagcacctcaatatcgttgttcaacagcagcagatgctcgccgtcagcgaactgcgcgccaaaattgttgatggccgagaagttgaacgtcccctgataccgcaccaccttacagcgggcaaaccggccggggatggtctggtagtaggcctcggtggcggggtcggtggagttattctcgatgacaatgacctcaaagttatcgtacccggcgttttggtacaggctggtcaggcagcggtccaggtcgtcggtgtggtccttgttggggatcagcacgctgataagcgggctgcctgtcagctcataccgcacctggaacgcccccggcgcgtcgggcaccgccatggcgcagccgggcaggccgaggcgctgcagctgggcgtcgatagcccgctcccccgccgcgatggcatagggcttggcctccatgcctgcggcggtggaccctgcgtggccgcgccagatatacagcacctttttgatatgctcgatgcgctgtgccttctcagtcaggcgcaagatcaggtcgtggtcctgagcaccgtcaaactccttggactcgtaggcaccggcagcatccagcagcggtcggctgaacaccgccagatgggtgataaagttcaccccgcgcaggtagtcgggcgcaaaatccggcttgaagtggtaaccgcccagctctttcaaatccgccgagagtacgatctcgtcactatagacaaagtccgcacccgtgttttggatggtctgcacaacctcaaaaagggcgtttaagtacagcacatcgtcgtggtccagcagggcaatgtagtcgccgtgggccatctcaaagccgcgggtggtgttggccgcaataccgccgttttccaccggctcgtacacgatggtgccgggcacagccttgggcaggcgtctttccaagcgcttgtccgggtcactggcatccaccagcaccagctcccagttttggtaggtctggcgtgtcacgctgcgcagcatttcgtcaaaaaacttcgcaggtgtgttatacagcggcacgatgatgctgattttcggtccccgcaggttcgccgcacgctgggctttcagctcccgtttcagcggaatatccgcccggtggcgccaatcgtcatggtgcagcgccagcccgacgcggaacttcacgtcgcgccaaagctgctcggccccctgctcgtgcagggtggcggcgccgcgtttggccagatcacgcaggtgggcggggttcagcaggcgcttggccatgccgcccacgctgtcctgtacggccaggtcggcggggcgttcgttgttcggtttctcgctcatcgttattcctcggtgattttggccggcatggcgtcttttttctcaaatttgcggtactctgccgtgatctcggcggtggggccgaggcggcgcaggtggccatggtccaaccaggccaccttgttgcacatgcgttcgatctggtcgatggaatggctgaccagaatcacagtcgtaccaccggaaagcagctcggccatgcgcttctcgcacttttcctggaaaaggaagtcgccgaccgacagaatttcgtccgcaatcagaatgtccggtttggtcatcgtcgccacggcaaaagccaggcgggccaccatgccggaggagtagtttttcagcggaacatccaggaattcttccagttcgctgaactctacaatgtcattaaacttggaatcgatatacttcggtgtgtagcccagcaccgtaccgttgaggtagatattctcccgggcggtcaggtccatatcaaagcccgcgcccagttcgatcaggggggcaatggtgccgttgacagtgaccttgcccgcgctgggtttgtacacgccggaaatgaccttgagcaatgtggatttgccgctgccattcaggccgatcaggccgtaaaagtcaccgggcatgatgtcaaagctgacatcatccagggcgaagaactcatcaaagcggatgccgccgtgcaacagcgccacaaaatattctttcaggctctcgtgcttttccttggcaaggttgaagcgcatcgacacatggtcgatggagataatgggtttctgttctgccatagcgctgcccccttacatgtacaggacaaatttgtcctgattctttttaaagacgtagacgcccaggcccaggctgagggcggcgcagaggaacgggatcagcaccatgttgggggtcagcccctcgccccacatcacgcaggaacgcaccgaggtgatgtaccaataaatggggttgaggttgataacgtactgcatccagctttccatctggcgcgggtcgtagaagatggcgctaccgtagaccagcagggtgcagaaaacttcccaaatatgcatgatgtcacgtacaaaaacgtacatagtggacaagatcagccccacgcccaggctgaacgcaaacagcatgacgatgggatagattgccagcagcacggtattgacggaaatgtgggaccaggtcagcagtgccacgatgaacagcgccaccaggctgaagaagaagttgaccagcgcaaagcaacacttttccaaggggaaaatatacttaggaatgtacactttgcgcagcagcgggccgtttttcagcacgctttccatggccatggcggtgctctcgcggaagaagttgaacatcagctggccgatgataaggaacagcgggaaatcctcgatgccctgccccttctggttgaacagggcaccgaacacggcccacatgaccaggcaggtcagcagggggttcagcacactccaggccacgcccagcacactgcggcggtatttcagcttaaagtcgcgggtgatcaggttttgcagcaggtagcggtacttccaaaagcccgcaaagctatttctcaggttctgcacggcttatcctcaatacttctcaaaatactcgaacttctggtcagcaaagggggtgtgctctttatccttggcgctggtcttgtgctcgcagccgcagtccggccactggacgttgacagtggcgtcgtcgtaggggatgccgccctctgcggtgggatcgtagacgtcggtgcatttgtagcagaactcggccacatcagacagcaccaggaaaccgtgggcaaagccctcagggatccagagcatcttcttgttctcagcggaaagggtcacgcccacccacttgccgaaggtcttgctgttggggcggcagtcgacggcaacgtcgaacacctcgcccatggtcacgcgcaccagcttgccctgggtgtgcttggtctggaaatgcaggccgcgcagcacgcccttggtggagcggctctggttgtcctgcacgaagggcttatcgatgcccgcggcggcgaaatcgtcgatctggtaggtctccataaaatagccgcggtcgtcgccaaaaacggtcggctcgatgatctgcacctcagggatgtcagtcttaacaaaattgaacttactcatgttctttattctccttttcgacaattgactttatttaattacagtatagtatacacatagcgacacagtatatattatactcctgtttggcccactgggcaagatggcggacatattttaaacaaattttgcgcagggtgtaacatcgggcgcgttttgccgtcttgtagggtaaggggcggatatggtacaatgataggaaaaaggaggccgcagccatgaccaaaaccgaagcccgcaagcttgccaaagcccgccgcgccgctgtggacctgcataccgtagggcacgcaatggccggggtgctgtttgccctgcccgcctggcagcacgccgacacggtgctggcctttgccagcatgccggacgagccggacaccgccgacatcctgcggcaggcgctggccgagggcaagcgtctgctgctgccccgggtgctgagccgcaccgagatggattgggtggagatcacagcgctttcgcagttgcagccgggggcctatggcattttggaagcgcccgcttccctgcctgcctttgataccgcccatttgggggatggcgtgctggcgctgatcccctgcctggctaccagcccggacggtgtgcggctggggcgcggcggcgggtattatgaccgcttccttgcacattataaaggcaagcggctgctggtttgccccacagccgccctgctgggcgacctgccttgcgagggctgggacgtccgattttttccccatgaaatactgaccgagaaaggaatacttctatgaaaaaactgaccctgactgcggccctgctggccgccctgaccctgacggcctgcggcaacaagaccaccgaggcaacgcccacccccaccccggacctgaacgcacctgccaccaccccggaggaaggcatggagattgacccggagtttagtgttgaccccgagcccgaaatcgatgaaaatgcccagcctgcaccggacgccgagctgagcgatatggtggacgcgatctataagatccagccggtggagctgatgggcatggagacaacgggcatcgacctgaccgacgagacctggtacggctacctggccgggctgaccgccaacaatgtgggcaaggtggacgcggcggtcatcagcgagccgatgaccggcagccaggcgtacagcctggtgctgctgcgcctcagggacaaggccgatgcccgcgagattgccgattcgatggaggaaaacatcagcatgcgcaagtgggtctgcgtggaggcagataaggcccgcgtggtcagctttgatgataagctgctgtatgtcatggcagacagtgaactggtcgatgtcgatctgttggcggatgctgccgcaaaggcctttaatgcgacattcgatgtcgatgattccctcgttaatgaggacgagagcgagttaccaccggagctgctgtccgccccggcggtggcggattgaccttcacgctgggacgcggcatcttataaatagataaggcgctgccaaacgcagggtgcccatttagtataatgcaaaaaatccgcagcctttttacgggctgcggatttttgctttattagcttacaggaaaatatacttgaggatgaacagcacggtcaggacgtacatcagcggggtgatctttttttccttggctttgccggtcaggacgttgatcagcgtccaggagatgatgccgatggcaataccctcagaaatactgtaggccagcggcatgaccaggatggtcaggaacgccgggatggcatcggtcatgtcgtcaaagttgatcttggcgacagcgcccatcatgtagaagccgacgacgatcagcgccggggcggtggcgaaggacggaatggtgaggaacagcgggctgaagatgctggccagcaggaacagcaccgcggtggtggtggcggtcagaccggtgcggccgcccacggtaacgccggaagagctttcgacgtaggtggtggtggtggaagtgcccagcacagcgcctacgctggtggcgacggcatcggccatcagcgcacccttgatgcggggcagcttgccgtcctcgtccagcatgtcagccttggaggcaacaccgatcagggtgcccagcgtgtcgaacaggtcaacaaagaggaatgcgaacatgacaacgatgaagttgacgatgttgaaattagagaagtccagattgaacacctggccgaaagttttgcccagagaggagaaatcaaagctgacaaaagcggtggggatgaccgaatacataccggcgtcgggatcggggatgtagataccggccagctcgcagacgatgcccagcacccaggtgatcaggatgccgtacaggatggcgcccttgacctgcttgatgagcatgacggcgatgatcagcacaccgatcagggccagcagtgcaccaacgccgacgctgtggaaggtctcgcccttgaagtgctggtaggtcagcagggtggaatcgctgttgacgatgagcttggcgttctgcaagccgacgaacgcgataaacaggccgatgccgacactgacggcggatttcagcgtcatggggatggcgttgaagatggcctcacgcacattggtcagggagaggatgataaagacgatgccctccacaaagacggccagcagggccatctgccagctgtagcccatcgtcagcacaacggtgtaggcaaaataggcgttcaggcccatgcccggggccagcgcgaacgggtagttggccatcagcgccatgcacatggtgccgacaaacgctgccaacgaggtggcgatcagcacggcttcggcatccataccggccgcagacagaatgttagggttgaccgccaggatgtaggccatcgtcataaaggtcgtgataccggccatgacttcggttttgacatccgtgtggttctctttcaggtggaagagtttttccatgatgtacctccgatttataaatcatatatccttgctgcgccgatattttccgcaaaacgcaacgcttttattgtacctctttatggcgcatttgtaaacatttttttaacaaaagtatgttgcaaaagcattttgcatgcaaaaagggccgcacccttatgcgggatgcggcccttattacgctttacgattcaatcaagccttggcagctttgatctccttgatcagctcgggaacgaccttgtacagatcaccgacgatgccgtaggaggcaacatcgaagatgggggcgttctcgttcttgttgatggcgatgatggtctcggagtcctgcatgccggccacgtgctggatagcaccggagatgcccagggcaacgtagatgcggggatgcacggtcttgccggtctggccgacctgatggtcagcagacagccagccttcatcggtgacagcgcgggaggcacccacgacgccgcccagaacaccggccagctcctcggccagcttgatgcccttctcggggtcggcagagatgccgcggccgacagaaacaacaacgtcagcaccgatcaggtcaaccagtttctcggcgctcttcttgatgtccaggacctcgacatggatgtcctcggcggtcagggcgggggtgaccttctcgatcacgaccttggcagcgctggcctcgtcaaacggctgggtctgcataacgccggggcgcacggtggacatctgcgggcggaagcgggggcagatgatggtagccatcaggtggccgccgaatgcagggcgggtcatcttcaggttggtgttttcctcaaacttggtgttgtccacatcgatgttggaggtggtgcgcaggaagttcttgtacttctcgacatccacatccaggtgggtgcagtcggcggtcagaccggtgtgcaggcgggctgcgcagcgggggccgaggtcacgacccaggttggtggcgccaatcagcatgatctcgggctttttgtccataatgagatcgcacagagccttggcatagccatcggtggtgtagtccttcagcagagggctgtcgatgtagtacacgcggtcggcaccgtagccgcccagcgccttgacatagtcctcattcagttcgctgcccatcacaacgccgcacagctccacgcccaggtcgttggccagcttgcggccttcgctcagcagctggtagctgatggtctggatctgaccttcacgctgctcgcagaatacccacacgcctttgaatgcggcggtgtccattgcattgaattcagccattgtttgtttctccttcctcaaatcaggtgcttgtcgttcaggatgccgaccagctgggcagcgtcctcgaccttcatgccggcgcccttgaccggaggagcaaaggacttgtaaacgttcgtcggagagcccttcaggccgatggtatcggtctcgatgagcggatcatctttcagtgcgttgtaatcgaacacttccagcggcttgtcgtagcactcgaagatgccgggcacgctcatgtagcggggggtgttcagctctttgatgcaggtcagcaggcagggagtctgaaccttcagctccatgtagccatcctccagctgacgcttcacggtcagggagttgccgtccttccggatgtcggtgacataggtgacctggggcagatgcagcttctcagcgatctgggggccgacctgggcggtgtcaccgtcgatggcctgacggccgcagaaaacgatgtcctcagggccgacgccgatcttattgacggcagcagccaggatctgggaggtagcgaaggtatcggagccgccgaactcgcggccggaaaccaggacgccgcggtcagcgccgcgggccatcagctcgcgcagcatgccttctgccggcggcgggcccatggtaacgacgacgacttcgcagccggtctcatctttcagctgcagggcagcctcaacagcgttgaggtcatcagggttggtgatggtggccatagcggcacggtccatcgtgccgtcagccttgacggcaaccttgccctgcgtatcgggaacctgtttgacacaaacgattgctttcattacgtcttgcctccttacttcagcagcgcgccggaaatgaccatcatctgaacttcgctggtgccctcatagatctcagtgatcttggcatcacgcatcatacgctcgatggggtaatcacgggtgtagccgtaaccgccgaacagctgcaggcagcggcgggtcacgtcgctggcggtacgggcggcgatcagcttcgcctcggcagcctcgacgctgtagcggaccttggcgccgttcatggcctgctgctttttcaggccagccttataaaccagatacttggcagcatcaacgcgggccttcatctcggccagctcgaactgggtgttctggaactgggcgatggagcggccgaactgcttacgctctttgacgtaggcaacggtctcgtcgatggcgccctcggcaatgcccagagcctgggcagcgatgccgatacggccgccgtccagcgtagccatggccagctggaagcccttgcccttgacgccgagcagacgatccttcgggatgatgcagtcttccatgatcagctcgcaggtggaggaaccacggatgcccatcttgtcctcgggcttgccgaccttgaagccgggatcggtgcgctctacgatgaaggcgctgatctccttctgcttgcggccgcgcttgtcggtgacaaaaccggtaacagcgatgatgatgaacacatcggcaaagccagcgttggtgatgaagatcttggagccgttcagcttccagtggtcgccctcatccacggcaaaggtctgctgaccctgggcgtcggtgccggcaccgggctcggtcagaccgaaagcgccgatccactcgccgctgcacagcttgggcagatacttttccttctgggcgggagtgccgttctcgtaaatgggagcggcgcacagagaggtatgggcagacaggataacaccggtggtgccgcagaccttggacatttcctcaacggccataacgtaggacagcacatcgccgcctgcaccgccgacctctttggggaagtagatgcccatcatgcccagctttgccatcttctcgacggtctctttggggaagtactcctcagcgtcgacctttttagcgaggggcttgacttcgttttcagcaaactccttgtacatcttctggaccatttgctgctgcttagacagagtaaaatccatttgataaacctccatatactcaaacaaacgcagcccggcgcggttctgcactgcgccaggcgcgtaggttggttcaattacagggcgtcaacagcggtcttggtgcggtcggcattgtagacatagaagcccttgccggtcttgcagcccaggttgccgccgcgaaccatcttgcggatcagcgggcaagcgcgatacttgctgtcgccggtctccttgtacaggacgtccatgatggccaggcagatgtccaggccgacgaagtcgcccagctccagggggcccatgggatggttggcgcccagcttcatagcggtgtcgataccggcgatgtcagaaacgccttccatcttaatgaaggcagcttcgttgatcatggggatcaggatgcggttgacgacgaagccggcagcctcgttgacctggaccgggctcttgccgatctcggtgctgatcttcttgatggtctccacggtctcggcgggagtgttcacaccggcgatgacctcgatgagcttcatgcggtcagcggggttgaagaagtgcatgccgaccaggggacggctcaggcccttgccgatctcggtgatggacagagaagaggtgttggaagcgaaaacacactcgggcttgcagatcttatccagctcgccgaaggtggtctgcttgaccttcatatcctcgaaagcagcctcgacgatcaggtcgcagtcagcgcacagatcctctttcaggccagcggtgatggcagccatgcggcggtcaacttcagcctggtccagcttgcccttggcaaccagcttggcgtagccggcggcgatcttagccttgccgttgtcagcccactcctgcttgatgtcgcacagagccacggtgtagccctcgacctgtgcaaaagcctttgcaatgccctggcccatagtgccagcgccaataacgcctaccttcatagtagtaacctcccaatttgttctaaaatgttctttttaaaacggcggggtgcggggcactaagcgcccctcccctgcttgcggaaatcagttgttggtgaagaccggtttcggcttcggcttctcgcggctcaggaagcagcccataccctcgacctgatcgtgggtctcgaagcaatcgccgaagagcttctcctcgacctcaacagccttctcgatgggcaggctgatgccgtcgttgatagccttcttgcagttgcgcacggcgatgggggcattcttagcgatcttgccagccagcttgagggcggcgggcatcagctcttcctgggtgtacacggcgttgaccaggccgatgcgcagggcctcgtctgccttgatgttcagggcagagtagaccagctgcttggccatgcccatgccgaccagacgggccaggcgctgggtaccgccgaagcccggcgtgatgcccaggcctacttcgggctgaccgaagacggcattgtcggagcagagacggatgtcgcagctcatggccagctcattaccgccgcccagggcaaagccgttgacggcagcgatgaccggcagcgggaagtgctcgatcatcaggaagacatcgttgcccagcttgccgaaagcctcgccctcggccttggtcatggtggacatcgagccgatgtcagcgccagcaacgaagctcttgtcaccggcgccggtcaggacgacacagcggacggtgttctgatcgatggcctcgaaagcagccttcaagtcagcaagaacctcggggttcagagcgttgagggctttcgggcggtcgatcgtcaggacggcaacggcgtcctggatctcggtagtaacaaaggacatggtaaactcctccgatgattacatttcaacgatggtggcgcagcccatgccgccgccgatgcacagggtagccaggcccttatgagcgccgcgatgcttcatggcgtacagcagggtgacgaggatacgggcaccggaagcaccaacgggatggcccagagcgatagcgccgccgttgacgttcagcttctcctggtcgaagtgcagagcctggccaacagccacagactgagcagcaaaagcctcgttggcctcgatcagatccatgtcgtcgacggtcaggccggtcttggccatgaccttcttggtggcggcgatggggcccagacccatgacctcgggctcaacaccagccagagcaccggcgacccaggtggccagaggctcaacgcccagctccttggccttctcctcgctcatgatgaccagagcagcagcgccgtcgttgatggcggaggagttagcagcggtgacgatgccgtccttcttgaagcagggcttcagcttagccagaacttccatggagctcaggcgaggaccttcatcggtatcaaacacggtgtcgcccttcttacccttgatgacaacggggacgatctcatccttgaaagcaccgtcggcaatagccttggctgccttttcctgagaacgataggagaaggcatccagctcctcacgggtgatggggttgtagccgtacttcttctggtaggtcttgttggtgcagacattctcggcggtcatgcccatgtgcatgttgtagccggtagcatcccacagagcatcgttgaccatggtgtcaaccagctcgctcttgcccatgggggaacccatgcggtagccgtagcggcccttcatcatagcgaagggagccatgtccatgttctccataccgcctgcaacgacgatgtcggcatcgccggcctcgatcatctgggcagccatgttgacgcagttcagaccagagccgcagacgacgttgacggtgacggcgggggtctcgataggcaggccggccttcagagaagcctgacgagcgacgttctggcccaggccagcctggatgacgcagcccatgtaaacatggtcgacctgctccggcttgacattggcgcggttcagagcctctttgatgacgatggagcccagctcagcagcggggacattggcgagggtgccgccgaacttgccaatggcagtacggcatgcgctggcgatgacgatttttttcataagtagcctccaaaaatgttcttttcaaagtaatcggatagactattgagtaacttgtttatcttcaaagccgatgtccggctgtgaatacgatttggatttaaagctcccctgcttcgcgcctggcgatgagagcggtctcgacgttgggcggcacgaacttggaaacatcctggccgtagtgggctgcctcccgcacgatggtggaggaaaggtagctccacttgatggccgttgccaggaagaccgtttcgatgccgggcgccatggcgaagttggtgtgggccagctggatctcgttttcaaagtcggtcaccgcgcgcaggccgcgcaccatgacggtggcgtgtttctgcttggcgaagctgacggtcaggccattgaaggaatccacttctacgttggggatgtccttgcagcattcccgtagcatggcaacgcgctcctcgaccgtaaacaagggctgtttggcactgttgaccagcaccgcaacgatgaccttgtcgaacatacggctggagcgcttgataatatccagatgcccgcgggtgacgggatcgaaactgccgggatacatggcaatgggcatattggtttgaacctttcggaaaccgccgttcgattgttaaaaattaaacatctttaggcggaaatttaggcacctgcgccgtgtctggttgcagatgttgcctgctcaggtgggcggcggccggtgccgcagcagtggcgtggcgggtctcgccaaattcactactatagttttaccatcttgttaaggttttgtcaatgctttattcgttaattttcagacatattttgtccttttcttttggtaggtgcgctaaaggcagatgaggtggttgttatatttaaataggtagataggtctgttgcttccgtttccgcgccaccttgcggcgctttactcgttttaacagcttcttggcgtcgggtgctccttttggagacccaaaaggaaggcttaacggctgcctgccgctataaaaggccctgccgcgaggtaggcagggtcgccgaagcagccccttaaggcaataccgcataattctaagtgccgatacggcgagcgaggtgcggcagatgctaagccaaaagcgcagataatactttgtgtattatcgagcattttggcaacgcagatgccgtgccgaagccgccggagcggtgcttaagccgttaggcgggaattgtgcggtgttgccttaagacaaacgagcgtgaaatctttcacattatccccttgaccctggggcaactatatgttattattttaacatgcgagggtttgtgccctcccacacattttgtgatgtagagtaaacgaggtgctgtaaaatgaattttgaggacctgatcgctaaagtaaagacctgcggcaagcagaagctggccgttgccgccgccgaggacgatgccgttctggaggctgtagacgctgcccataaacagggcattgccgatgccatcctggtgggcgatgaagccgccatccgcaagatcgccggtgagctgaacatcgacctgtccgactacgaaatcatcaacgagcccgataaggtccaggcttcgctgaaggccgtcaagctggcccacgacggtgtggccaacatgtacatgaagggcctgctggacaccaagaccttcctgaagagcgtgctggataaggaagtcggcctgcgcaccggccacaccctgtcccatgtcgccgtgttcgaggtcaagggcattgagcagctgctgttcctgaccgacgttgcctttatgacctatcccaccctggaagataaagtacatatcatcgagaacaccgtcgccgtggcccatgcctgcggcgtcgagtgcccgaaggtcgctcccctggccgccgttgaggtcgtcaaccccaagatgccctgcaccgtggatgccgacgagctgcgcaagatgaacgccgagggcaagatcaccggctgcgtcgtcgacggccccctgtccatggacatcgccatcgatcccgaagccgcccaccacaagggtgcccaggaccgcccggctgccggccatgccgacatcctgctgttccccgacatccaggccggcaacctcgtctacaagacgctggtccacaccgccgattgcaagaacggctgcatcctgaccggcaccaaggtgcccgccatcctgaccagccgctctgactccttccagacgaaggtcaactccatcgccctggccgccgttgtggccgccggcttggctgaataagaaataaaaggagacgtttcaaatgtctattaaaacgctggtcatcaacccgggttctacctcgaccaaggttggtgtttttgaggacgagaccctgctgtttgaggaaaccctgcgccatcccacggaggagatcgccaagtacgccagtgtcatcgaccagaaggatttccgcaaggccatcatcctggactttttgaaagagaagaactgcgcccccgagagcttgaacgtcatcgtcggccgcggcggcctgctcaagcccatccccggcggcacctaccccgtcagcgacgctctgctggctgacctgaaggccggtgtccagggccagcacgcttccaacctgggcggcatcctggcccgcgagatcggcgacagcctgggcatccccagctacatcgttgaccccgtcgttgtcgacgagctgaccaacaaggcccgcatctccggcatgccggaactgccccgccgctccatcttccacgccctgaaccagaaggccgtggcccgccgctttgccaaggagaacggcaagcgctacgaggatctgaaccttatcgtcatccacatgggcggcggcgtttccgtcggtgcccacaatcacggcaaggtcgtcgatgtcaacaacattctggacggcgaaggctgcttcagccccgagcgcagcggcaccgtacccgttggcgacctggtcaagatgtgcttcagcggcaagtacacccagcaggaagtttacaagaagatctgtggcaacggcggtttcaacggttacctgcacaccaacgatgcccgtaccgtgggcaagatggccgacgaaggcaacgccgaggccaagctggtctgggatgccttcttctaccagatcgccaaggacgccggcgctatggccgctgtcctgcatggccaggtcgatcagatcatcctgaccggcggcattgcttacaaccccaacaccgagaagtacctgaaagagtacctcggcttcatcgctcccatcaccgtttatcccggcgaggatgagctgctggccctgtgccagggtgccctgcgcgtgatgaccggagaagagaagcccatggcgtattgatacccgccccctaaacagcaacagcctctgcccgaaaaggcagaggctgtttttttgtgttttatcggccaaccgtggtatcagcttccaaaattgcatcattttgttctttgtactttgcggcggtctcgtcgtccagcacatagaccgtcaccgggatgacagcgttatccaccgactcatcataggtctcatagtacagatcgatgaacgcatggccggtcatcatagccgtgccggtatccgcagcgtaggcatagccatagacgaattttccgtcatcgctggtgatgtacatcagggaaccatacggaatgatgctggggttgatggccacagtgccgtaggtcaggcggcggccgctggcccccttggcagtgccactggccgagtaggccgtggcgcgctggctggtgtagacggcagcgacaccttccacgggcacgccatcctcgacctcaggacccacgaagctggagacagacgcctgttctccatagactttctggatggtggggatcatgccgatctgggtctcgcggccgatctcctcggtgtcgacctgctggccgtccacccaggtctcgcggtaggttacagtgtccaggccatctgtcccctgctggaccacctgcactttgtcctgtttgcggtaatacaggctggtggggatctcctccacctcgctgaggacggtctcgtcctcggtgtactccacatagctgacgcgctgcagtgtgacgctgctgccctcggggacggtctcgtcggcggcgggggtcaggtagtcctcctcggtgtaggtcaggcccgcctgggtcagcaggtcgcgggtggtcgcgccggtagtgatgatctcctgggtctggccgtccgctgtgaccggcacagtgtaggcccgcagcacctgcatcagctcaccgtccggtgtctccgaggtgacgatgcggtcgttttcccccagcggggccacgcccgcctgggccagcacagcggcctcggtctggttgaccgtcaggatgcgggtgctgccgccgtgggtgtcggtaacggtgacaaaatgcagggcagaggtcgtgaacatgatcacgcccgccagtgccaccgcgccgcccatcagtgcgccccacttagggccagccagtgccatgcggcggcggaaatgctcttttgtttttacggataaaggcataagggctccttttgcacaaaaaagcgccggccccgcaaaggaccgacgccggaaatgctggttatttgctgccgcgcgggacagcgtagtacaggatttcttgctttgcgtttcggcttgaaataataacacaaaatcgtgcattttgcaagtcttttgacaaaacagccgcacatgttacaaaaatgtgcggcatcccgggccgcttttgtgcttgttgcccagccttacgcgggaccgtgctgtaagcacagccagactgcgccgacaccctccccgttgccgtaggcctgggcaatatcgatcggcggtagccgacgtcgatagcgtttcctgcatattttatgtcattttttcaggcggcaagcgcagcaaggatataaagcagcccgatgtgcgtcgggtaaaagatccagctttacaccccgtttctttcattatatcagaaacgggggtgattttgtggttttttgacaggctgaggaaggctccggcgcttttggcaccggagccttccttgagtcttatttcgcaagtacaacggaaattttgatctccttttccgcctcgctcaggtcgaacgcgccgccgtccgcgacgctcacacgcagctcatacagtgtgccgtcggccagggtatccacgccagtcccggcttcatccgtgattgaccacagctctttgctgacctccgccagctttccgtctgcaccgtaggcatagagcttcagcccggcggcgtccccggaaagattgttcatccggaacgagaccgtcgtgttgggatgaacattttcgaccgtcacagtattgcgccagcttgcaaccgtgccgtcaccgccggcctgctcaaactgttcctgtgtcagtacgttccgcgcggccttatcgagatcgacctctcggtacggcatttcgggcagatagacgaagcgatcctgtaatctgagcagctccagatagcccgtcgggcagtagagcgcgttgccgctgtttccggcatacataccgatagccatgttattgtagccatatttgttggagacgtccatggtgaataccgtctcgccggtggcaaagtccagaatgatgtactgccacatgccgctttccagatcctgcacatagccgtagatatagcccgtcgcggtggagagcttgagaatcgatgtgtcgctcaggtcatttcgagaccagatgctcttcatctcatagccgctatcggttttcacggtgtccacgcgctcgacgccgggcgcaatcatgcagttgccctttgtcagccagtttgtgtcatagatgttggcatagctctggatggaagagtcactgttgggatcggcaaggcctgcgctgcctgcgccgaaccagttgcacacgatagtgctgacggtgccctcactgtcgtcatagacgatggcagagttttcaatcgccacctgatagccctcgggcagatcatccagcactggcacgcttgcaacgatctcaccggtcttcatatcgagcgccagcagcttgactggatccgcgttgtcggtgaacatcacaagatccggcgtcagcgacggggagcagccgccgccccaggcaagaccgccgccggtggtcttgtcgttttcgccgctgaccttcgcgccgacgctctcatacggtgtgcaccagacagcctcgacaccgttattggcgcgcagcagatagcagttctggtttgtcaggatgaccgcgccgtccttggaggcggcaatcccgttttccgcgccctcgccgagcgccagcccgtagacgaagacggccttcgaaaggtcggcctgctctccgttcaggatcgcctcgatcgccgagtgggcgatgtagcccatcacgccctgctgctggcgctccgggtagatgcggaagccgccggtggcaaaccagaggtttccatcgtagtcaaaaaccacggaaagaagattctgcgtcagctccttgccgagcgcagcttcggctgccgccttgatgtcaatgtccagcaccttttcaaattcaggcaggacgtttcctgcttcatcggttgcctgcagcatcagcacatggttgttgctggtggggcagacgatgcggttttccgagtccaggaacgtataggagctctggatgacgtaaccgccgccgtcatgctgctttggagagaaatagcccaacgtcgtggtttcctccgcgttcagatcgcggatggcgatgccgccgagcagcggaacgactgcgtggccatagctgtcaaagtaaatggcaggcgaagcgttcgcgttggttctttcataggaaacattgatctccggatagatgccaagcggcaggacttcatccgtagagtcggtattgtagccgtcgtggtgaatgttggcgtcgctctttgccatataagggttttcgtcaacacgtttggcattcatggcctttaccggcagggcagcgcttaccgtggagtctgtatccgatgcgggcatgtcggaagactgcttcgcaccgcaggccgccaatgtcaggcacaacacgccggccagcagaagggttggtacagaacattgtaactttttctttttcattgatttcctccatttttgtgcttgttgtctcggtttggttcgatgcccgtttattcaatccaggcattcagtccttgttggaatgcttcttcggaaaccggcttcatcaggaaatagtcggcccgcagccggaaggcgtgaagagagaaatccaggtcactgcaccagatcatccggcacgcggggcataaggaacgaaggtgctccgccgcattcaacccggccaccccggaaagtgcaatgacggcattggtcggagcatctttctgcgccgtttcaaaaaaacgttcctgatcgtcatattgcatgacctgcggaaacagccccttcgcttcacaaaaccgggtaatttgctcggcgtagcgctgccgctctgcttcctgttctgccagcacggcgatacgatacacagatctccctccttccttcatccgatttggcatcttgcttgcactcagtataaaaaggccattcggttttttcaagcgccgtagcacgaaaggggcgattttggcacgaattccgacagcggttctttgtcatcctcgacacgctgtgatataattatcttggaattcaagcacaaggagagaaccttgcatgagaattgcgattgtggatgatcttgccgcagagcgcacactgctgaaagaccggctggaacggcagcttcagcggagaactgtgcaggcggatattctggaatacgaaagtagcgagacatttctggaagcggcaagggaagcgccctttactgccgcatttctggatatttatatggatggcatgacgggcatggaggcggcaaagaagctgcgggaaaccgacacggactgcctgctggtttttaccacgacttccaccgaccatgcgctggagggctttcaggtgcgggcgcttcactatctggtcaagccatttaccgaagcggacatcgacgcactgacggacgagctgcttgcccgcgtaccgcagccggataaatatatggagctaaaggtggagggaagcgagatccatctgcgctatcaggacatcgtctacgcagaacacttcgcccacttgatctacgtccatacgacggttcaaaagacgtttaccacgcgccaacccttcaagacgttcatcgccccactaaaggatgacacacgcttttttgtgtgcgggcgcggcgtgatcgtgaatctggaacacgcggaggatctggaaggcgccgccttccgcatggcggacggaagccgcgtgtttgtcagtcaggatcttctgaaaagcgcccggcaggcacttatggagttcttgcttcaaagggggcggatggcataatggagctgctgcgtccaattctggagctcggcgtggtgattcccggcatgctgcttgcctacttcccggtaaaatccagcttaaagcagccgctgtcaaagcttgttttgtggcttgccccgttgcttgcactgctttgtgccgccggaggcgtggtgtgctatgcgcgccgcatgccgactgcgccggtgctttcggggctgaccttgctcgcagccgtgatctacataaaaacacttcggatctcgctttggaaatccggaacggttgcattatctgtctgtgcggtatttgcctgtatcaacagcctttgccgggcgatcaacgccgctatgctggccggtttgccgcaggcgcaggctgcgccatggttctgtctgcgggccgtgatttgctatcatgcgatctgctggctgtttgccgccatcgcctattatcctgcgacgcacagcgtacggaggatggtcgaggacgaaaattttgcgcagacctggtatgtgttctgggtgctgccgctggtgttcattgcgctgaatctgtttatgatccccaagtatgcggacacgctctataccgggcgtgttttgcaggggtattttgtgatcagcatcgcacttttgtttttgatgcttttcttcaacgcaatcttccttctgacggcgatcagcatcaaccggaatgtgagattgcagcaggagaaccagctgctttccatgcagcagcagcgctacgaaagcctgaaagctgccattgaggaagcacggcaggcgcggcacgatctgcgccaccagctatgtcagctcgctgcccttgcagaagaagggaatcttgaaaaggtcaaagcctatctttccggcgcagtttccagaatcccgagtctggagctgcatttctgtgaaaaccgggcggcagacggcgtggtcgggtattactgcgcgcttgccaaacgggagaatatcccgtattccgtgcagattgatctgccggaatgtcttcctgtagacgaaatcaatctgtgtctggtcctttccaatctgctggaaaatgccctggaagccagcctgcgcactgcgcctgcccgtcgtaaaatcaagctgactgcctatctgcacagtggcagcctggcgctgattcaggttgaaaacacctatgacggagtcatccgtgaaaaaggcggtgtctttcagtcctccaagcgaaaaggagacggtgtcgggcttcagtccgtccgtcacatcgcagaaaaatctggtggagtaagtacagtcacctatcaggacggtctgttctgcgcaaaggttatgcttcgtggataattatgcccgacctttccaaaagggcacgaccacagatttcagcagtctcgcttccggcaatccctgtatgtaccggatcgccgtttttgcaaagacgttagatttcactgtgtcccaatctgccagttttactatctcggctgtgccgttctcaaagtcaaaccgcagctcgccccactcgccatcgttgtctaccagatattcgtagacagcggcggtgatcgtttcacctgttttccgacactccgtctgccgcaaagagatcgtgtgtgaggaattgccattcgattcttttgccgccttcgtcagagggagtggtctttccggaacgcccatctcaaacggcacaaccacggatttcagcagcctcgcttccggtaagcactgaacaaaccggatcgccgtatttgcaaagatgttagattttaccgtatcccaatccgccagcctgacgatctccgctgtgccgttttcaaaatcgaaccgaatttcgccccattcgccgtcgttgtccgcctgatattggtagacagcggcggctattcttttgttcttttttcgcatatcggtttgtttcagtgtcacggtatggatcacaccgctttccagcagcttcagccgtagcttgtctaatgtgcgccgatagaatcgctccgcaccgctggctgtcgttccttcaaaatccaccgctaaatcttcaaaggtggactgcgtggacaaggggctgacgcgcccgcaggtcatgcagatggcgttccgcttttccagataccattgctctttgtaggaaagctgctcaaacgctgccgtgaccgcctttgcctgtattgacgaaatcaaccgtgccgtgatggaggggaaagacgatttggtctttgagctttgcaaggtctttgaccatgagagctactttgatccgatctttgacccgccggagtcctttttgcaggagtgcgaggcctattggaacagacgaagccccttctgcaaaaccgtggagcgcaagattggaaacacgtggtacaccattgaaaccgtctgtgacggaaccgagccgcttaccgccaaggtaaaacggctcattttttctgaccgggaggtggcttgttaatgacagtgacacaaaaccatgataatataattccaaacacaccgattctgtcggctgacccgaacgtgaaggaggacgttatgacggatcagcaaaaaattacgatactctactgccgcctcagtaatgaggattcgcaggatggcgagtcgaattcgatacagaatcaacgcgagcttttaaccagatacgcacgagatcatggctacacgaacctgaaagtgctggttgacgatggctataccggcacgaactttcaacgccctggcgtacaggagggctttgaactggtaaagcagggattggtaggctgctggctttgcaaagacctatctcgctttggtcgtgattacctgactgtaggccagtacaccgacatcatcttccccagctacgatgtgcggttcattgccgtcaacgacggcgtgaacagccagcgcggggacggagagggctttgccgcgatccgcaacctgttcaacgagtggtatccgcgcgatacctccaagaaagtccgtatcagcctgcatcagcgcggcaccagcggcaagcagctcggcaagccgccctacggctaccgctgcgacccgaacgacaaggacaagtggattctggacgaggaagccgcgccggttgtcaagcgcatctttgacctctgcatcggcggcaaaggcccggagcagatttcccggatccttgaacgggatcagtttcttacgaccaaagcgctgtatgccagccgcaagggaaagccgctgccaaagaatccgtatggatggaaggatcaatccattgtcgggattccggaacggcaggaatataccggctgcacctgtaatttcaagacctactccaagtcctacaagctgaaaaagcggatttccaacaatccggaggatatgttcatcgtaccggatacacaggaggcaatcgtttctcaggcacaatgggacagagtgcaggagctgcgcaaaaacaagcgccgccccgcaaaagcggaacggcaggggctgttctccgggctgctgtattgcgcggactgcggcggcaagctccactttgccacctgcaagagctttgagggcaaacaggatcactacgtctgctccaaatacaagagtgggcgcggcgattgctcggcgcattatatccgcgaggatgtactgcgggagctggtgctggaacggattcaggcggtcaacgagtacatccgcagcgacgtggagggtttcaggaggaatggctgcactatcaccgcgcagatcaggaacgggacatccgggaaggtcagaagcgcatggagcaggcaaaaaagcgccttgcaaacctcgatgtggtcatgtcccggctctatgaggactacgccctcggcgagatcagcaaggaaaagtacaagaaaatgacttctgattatgaagcggagcaggaacggttaaagctcgaaattgaaacgacggaagaatggatcgagcagcggcaggcaatgggtgacgatctggacgctttcattgcgctgacgaaaaagtatgtggatgtcacggagctgacgcagacgattgtcaacgagtatatcaagaagatcatcattcacgcaccggataagtctggcggcaagcgcagacagaaggtggaggtcatctttaattttgttgacgaggtggagatccccgtgctggcagaacccatgatcgcagaatctacccttggactcaaaaaaacggcgtgaccttcacggtcacaccgttctctgccccaaccgcaagccttatagttccttacgactgttaagccttctgttttgttgatttttaagggggctgcgactcttttttgtatcactcttgtagcaaaacagcgatatttctatcaagtagcttatgaatttttaaaactcgacaaaaagcgcttgcccttttgcggcgcatattgtatattaaatttcaaataacagtgtttcttgcacacattttattttgctgtgtaaccctgtttgctgtaagagcctttttcacagattttccgacatcttacaatttgttgcttccccccttcattgggatagtataaaaattttattgtttggaggagtatctatgttaattgttgtgttggttgttctctgtgtcgcgtctctcgctgccgccgtgctgcagaccatgcgcctgcgcaccttgcagcaaaagatggacgcactccgccaaaatgtggagcatgaggtacgcaagcaggaggcactgtggcacgacatggtccacgacctgcgcaatccggccgcctgcatgtattcgctggcccagctcatccaggaaaaccgcaacggcgacccggagcagctgaaccactttctggacgagatgcacaaatcgtcttcgaaagtattgcaggtcatggccgaccaggtaccgccaccgccggatatgagggttgtgtttggtgatgcccctgcaccatcggagactgacgatacgattgagcagaaaaagtaatagcatacataaataatataaacccgcccctgtcctggcttaccaaagccaaacggggcgggtttatgttattgttggatcgtagagagatcgtgcggttcaaagttttatttgggcagctggatctccggcatcagctcgtcggagacgacttgcagcatttcttccagtttagccaagtcatcggggctgaagcgctgtttagcgcgctccatgaccaggtgcaggtaggaatagctgatgttgtagtaatcaatgtacttttgggttgggcgcaggcggtattcgcgtttgtcggtagtagaccgaatgcgctcgacatagccttttttaaccagcgagttgatcttataggcagcgttgggggtggaaagattcatcatgtggctgaactgcgcgatcgtaggttcgcccaatgccatgataacttccatgcagaaagattctacagtcgtcagcgtagcttcgcggtcctcgaatcggctgaagatctgcttatagaaatgcagcttgaatttggtatatacctgtccgaatgtctggtccagcatggcgagaatccccctgtaggttaatggctttattatagcacaatccgccatgcaaaaccagccctcaggcatccgcgagaacaaacgttagttcggcgttggccgcgcgcacgccgtccacccaggcggtagccttaccgatgcctaccgggccatgctgttctaccagttcacattccaaagtcagtacatcgccgggcacgacctgacggcggaagcgggcgtttttcacaccgccgaacaaggcgagctttccacggttttccgacaggcttaatgcggccaccgcgccggtttgggcaagcgcctctagaatcagcacgccaggcatgaccgggtggccgggaaaatgcccctgaaaaaacggttctgtacgggtcacgcatttgacgccccgcgcccattggccgggggtgtagtccaggatcttatccaccaaagcaaacgggtaacggtgcggcagaattttttcgatctcagccgccgtcagagtccggggcggttcattgggtgtatagttcatcctcatccctcccagcgtttgaacaccacacaggcgttgtgaccgccaaagcccaggctgtcgctcatagcgtactcaacctgcgctgcgcggccctggttggggatataatcaagatccagctcagggtcaggctcttgtaaattgatggtagcgggcaagaaggcgtcgtgcagggccagcgcggtaaatacgccctctactccgccggcaccgcccagcagatggccggtcatcgacttggtagaagacacggccagtttgtacgcgtggccgccgaacaccgttttgatggcggccgtctcacagctgtcgttcaggtgagtggatgttccgtgggcgttgatgtagccgatctgttcaggctccaccccgccatcggccagcgccagccgcatgcaggccgcaccacctgtgccgcctggtgccggggcggtaaagtgataggcatcacagttggcgccatagccaacgacctcggcataaattttggcaccgcgtgcccgggcagcttccaactcttccagcagcagtacaccgctgccctcgcccatcacaaaaccactgcggcgggcatcaaaaggaatcgaggcccgggccgggtcatccgccgtgcaaagggctttcatgctggcaaagccgcccacacccagcagactgatgcagctttcgctgccgccgcagagcatgcggtcctcgtatccatcgcggatacgatggaacgcatcgccgattgcattcgtgccgcctgcgcaggcggtggtggggcagctgcacatgccctgcaagccaaaacggatggcaatctgtcccgccgccatattgccgatggacatggggacaaaataggggctgactttttcaaaaccacgctgctggccgcgggtatgttcttcctcgatcgtgggcaggccgccgatgccgctggaaagaataaccccgaatcgtgtgcggtcaatttcttccagcgcaaggccgctgtcgccaatcgcttcctcggcggcggctacggcgaactgggtaaagcgcgccattttgcgggcttcgcgcttgtcaatgcgttcggcagggtcaaagttcttgacttctgcggccagtttcactttaaaatcggccgtgtcaaaagcggtaattggctcaacggcacagcggccatccttaatagcggcccagctttctgccaccgtattgccggtagggtttaccgtgccaaggccggtgataacgacccggcgtttcttttctgttttcatagcacacctcacattcccattccaccgtcaacgcaaaggacctggccggtaatgtaaccggcttgctcccctgccagaaaagccaccgctgccgcaacatcctcggcatggccgattttacctgccgggatggctgccgcggcagccgcgcgggcagcttccggcatggcggcggtcatatccgttgctataaagccgggtgctaccgcattggcggtgatattgcgggcggcatactctttggcaacgcttttcgtcaggccgatcagccccgccttgctggccgcgtagttggcctggcccgcgttgccgtgcagcccgaccacgctgctgacgcttacaatgcgcccataccgctggtgcatcataaagcgggtggccgccttagtgcagaaaaatgcccctttcaggttggcggcaagcacgttgtcaaaatcagcttcggtcatgcgcagcagcaatttgtcggcggtaatgcccgcgttgttgacaagcacgtcgatccgtccaaaagcagcaacggtatcttccaccagtttctggcaggcttcaggggtgcgtacatccgcctgcagcgtgatggcctgcacaccaagggcgcggcagtttgcggcagtttcctcggcagcggcggcactgccggcgtagttgacggcgatgttcacgccgttttcggccagcgccaggcagatggcccggccgatgcctttggccccgcctgtaaccagggcggcacggcgcagggtttcggtttgcggcatggtcaggctcctttcatggtgcgcagcaactgttgcagctgcgtggcagtttccaccgggtagcacgagatggcacttcctacggtctttttaacaaaaccggtcagcaccctgccagggccgatctcaatggcggtgtccacgcccaattctgccaagcggcggatggttgcttcccaacgcacgccggactgcacctgtttttccagcagcgcggcaatggtgtcggtttccgccatctcgtgccccaggcagttgaacagcacagggagctgcatcgacgcaaagcgggtggcgctaaatttctcccgcagcgcgtccccggccgggtgcatcaacgaggtatggaacgggccactgacgttcagcggcaggcagcgccgtgccccggcagcaagcgccagcgcggcagctttgtccaccgcggctttgtcaccgccaatgaccagctggcctgggcagttgtagttgcagatctgtacaataccctcgtcggcagctgtatcgcagcatgcctgcaagggagcttcgtccagccccaaaacggctgtcattccgcaagtgtgcccggccgcagccgcagccatcgccttaccgcgaaaagccgttaaggcaaccgccgtccgcacatcaaacacccccgcacaggccagggcagaatactctcccaaagacagccccgccgcataatccggtgtaacacctgcctcccgcagtacggcagtaaggccggcggcaaacgccgtcatgcagggctgggtgtattgggtctcgttcagtacgcctgttgtgtcagtaaagcagacttctttcaaatcaaaatccactgccgccgcagcttcgtcaaaagcggcgcggaacgccgggaaagcctcgtaaaggtcctggcccataccggcgtgctggctgccctgcccggcgtataaaaatgctagtttcataaggtgatctccttgtgcagcccgtcgatgcagtttttggcatcgcttaccatggcggcaaaaatttcttccaccgggcggacttcgtgcagcagccctgctgcctgccctgccatcaggctgccattctcagtatcgccatcaaatacagccttgcgcagactgcctaaagtaaagcgctccagctccattttgtcagttccggccttttcctggcggacatactcacggctcatgcggtttttcagcacgcgcacgggggtgccgctgatacggccggtcacgatggtatcactgtcacgggctttcagcagggcttctttgtagttttcatggatcgggcactcgatgctcgccaacagacaggtgccgacctgcacaccgcaggcccccagcgccagtgctgcagccagcccgcgcccatccgcaatgccgcctgctgcgatcaccggcacgtgaacagcatccacgacctgcggaaccagggccatcgtggtcatctcgcccacgtggccgccgctctcggtgccctcggcaataacggcgtcaatgccaagcggttccagatgtttggctaaaattgccgctgccaccacggggatgaccgtgatgccggctgctttccacgcggccatgtactttcccggatttcccgcccctgtggtgacgatctttacgccctcttccaccacgattttggcaaattcatccgcctgcgggtgcatcagcatgatgttcacgccaaagggcttgtcggtcagcgcgcggcagcggcggatgttttcccgcagggcggcggcatccatgccgccggagccgatcagccccagcgccccggcgttggaacaggcagcagcaaactcgcctgtagcgatattagccataccgccctggataatgggatattttgtacctaaaatttcgttgagcagcttcattttctaccctcatacgtcagcagcatcccgccccaggtcagcccgccgccaaagccgatgcaggccagcgtctggccggggcgcagcaaatcatttttcgccatttcatgcagggcaatcggaatgctggcggcactggtgttgccgtgacggtccatatttttgtaaaatttcgacggttctgcgtgtaaatgtttgacacaatggtcaatgatgcggctgttggcctggtggcagaccacccaatccaggtcagacaatgtcttttggctgcggtccagcacggtttgcaggcaacgcggcatagtttccaccgcaaagcggaaaactgccttaccgtccatcgtgataggcgcggtgtcgcaggccgcagggccgcccgcacggatggcttcactgccccgtgcgcccaaagtgatggcgaacggtacattttcggccagctcaaaaacagctgcgcctgctccatcgccaaacaatacacaggtcgtgcggtcggtcgggtccatcatgcgggagagtgcctcgcagccaatgaccagcgcatattgccctcccagggtggtcagcagcccgtgggccgtggcggcagcataaataaaaccggaacaggccgcatttacatcaaaagcgggtcggtcctccggcaagtccagcgccgcctgcacgcggcatgcgatgctgggagtagccgttggagccgaaagtgttgccacaatgcagcaggcaatgtcgtttgccgtcaggccgctgcgggccatggcctgacgggcggcggtgatggccagcgtggcggcatcttcgttttcggtgcagtaatagcgctggcggatgccggtgcgagtcgtgatccattcgtcactggtgtccacttgtcggcgcaagtcctcgttcgtcaccacgcggccaggcaatgccccgccagtggccaacagccgtaaacctttcatgcgcccctcatttctccgatgcgacggtattttttgtatcgctggtctgccagagctttgccgctcatcttgcataaggcagtaaggtgcaccgcaatggcggtgtccaaccggctgaaaagcagctgccgcccgcgctgtgcgccgcccagcggttcggggatgacctcttccacaatgccgtctgcgtacaggtcctgtgctgtcagcttcatcatggtgcaggcctcgccgctgcgggaagcatctttccacaaaatgctggcaaacccctcggggctgagcaccgaatacacggcgttttccagcatcagaatgtggttggcaacgcccaggcccagcgcgccgccgctggacccctcaccggtgacaatggccagcaccgggacagtcagaccactcatctccatcaggttgcgggcaatggcttctccctggccgcgctcttcggcatctttgccggggtaagcgccaggggtgtcaacgaaagtgatgatgggacgatgaaatttctctgcctgcttcatcacgcgcagggccttgcggtagccctcgggtcccggcatgccaaagttgcagtgcaggttttcttccagcgtggtccctttgcggtgccccaaaacggtaacgggcatcccgtggaaccgtgcgatcccgcataaaatagccgcatcctctttgcattgccgatcaccgcactgctcaaaaaaatcggtaaacaggttgtcgattatttcggtaatgtgcgggcggtcggggcggcgggccagaaagactcggtcctccggcgtcagcgaggtgcagcgctgcaaaagcatgttttcctgtgcggaaagctcggccagctcagccgcatgggtggtcgtgtccgtcatctcggcatcgtcggcactgctgcacagcgcgtcgatctgcgcgtccagcggttccaattgctgcaaaacttccttgatcatctgcgtttcctcccccgcgtgtggagctgcaagatccgcgttaagacctcttttaactcggtgcgcggtacgacctggtccacaaagccgtgttccagttggaactcactgcgctgaaacccatcaggcagtttttccccgatggtctgttcaatgacacgtggcccggcaaagccgatgagcgcacccggttcggccagtgtaatgtcgcccaggctggcaaagctggccgtgactccgccggtagtggggtgggtcagtacgctgacgtacagcccgccgctgcggttaaaacgttccagtgcggcgctggttttggccatctgcatcaggctgaaaatgccctcctgcatccgcgcaccgccgctggcggaaaaaatgatgagcggcagacgcttatcggcagcatactcgatcgcgcgggtgattttttcaccaacagcggtactcatgctgcccataaaaaagcggctgtccagcacagcgaccaccgcctgcacgccgccgatcatgccggttgcagtaacggcggcttctttcagaccagtcttgaccgaagcagcggccagtttttcctgataatcggggaaatgcagcacatcattgggggcaatgtccgggttcagctctttaaaggtcccgtggtccaaaaccgtactaagccggtaataagccccgataggcagatgcaccccacagttggggcacacatacaggcttttggtccagacctggcgggtggcgcggcggccgcactttttgcaggcaacaaattgcggcggcacccagtttggcgcggccgtaccggcatcgcggcgggctttcagctgaaagctgcgctcctgcgggctggccggaaacagcttttcaatggcactcattctgcaataccctttaggctgcccgtgcggccagatagttgaagatgtcgcccacggttttaagcgtccccagatcctcatcagcgatcgtaaccccaaacttttcctcaaacgccatgttcaactctacggcatccagactgtccgcctgcaggtcctcggtcaggctggcggccatcgtgaccttgtcagcatcgcagttcagggtgtcaacaaatacttctttcagttcttcaaagctcataatgcgtacctcacataatttaactaaataaattgacatatttgtcaatgaggacattatagcacgtttatctcgcatgtcaatattgttaggtaaatttatttatctaattttatttttcgcctgtttccatcgctgcgtagcggcacggcaaaaaaaaggcgggttactccagcacaaaggctgaaataacccgccgtttttgcggatgctatcctgttactttccgctttctgggaagatgattttattcacaaagaagaaaatgaccatcgagataccgccgttcaaaacggtggtgccgatgttgtagatgaagtccggcaccagcaggccagccaccgccacccacacacagttcagctcctgcgcggggcggaagatcttggcatcgggcttggctacgtagacctgcacgatctcggcaccctcacggtcgccggtgttggtcacggtcaggcttacgccctggggcgtggcttttacgtcagcataggcaaaggtggtgtagcttaagccaaacccaa

SEQ ID NO: 7945 - DNA, 24915 bp, Unknown
  gut microbiota DNA sequence
aataggtagatgccgacttctcttttaagcaaagcgccttatcccgcaaggggtagggcgcttttgctattataaaatagcagcaaaaaagccgcccctgcgggcggcttaccatacaattatgcgtgggtatatgtattctggcggggcttatccagcttggcaccatacttattataaacatcgcgtaaaattacggtacggcgaaccatgccgatgaagacattgcggtcgtctaccaccgggacaaagttctggtcgatggcggcctgcagcaggctgggcatgtcggtggtgacggtgacggccttgtagtcgcggcggcgggggaaactggagatgggcacatcctcgctagcctccaggtccaggccgtgcaggttcttgatgccccacagaatgtccccctcggtgatggtgcccacatactcgccgttgcgtttcagcacggggatggtggcaaagcgctggttcgcccatttttccagcgtttgacgcagggtgaaatcctcgtaaatgtacaaaacatcctgtttgggagtaaggaaaaacaaaaggttcatgcgaaaatggcactccttttcttgtgtgatgggaaatcagtaaccgaattgtcttacttttagtatatacgcttacaaagcaaaaattgtgaagcgtttgttaaaaaagcgtaacggcacaattttatcgcaaagccactgttcaagcgggtaaaaaaggtgtataattacaatgattaacgtggtatagcccacaaaggaggatcgcagatgatcaccaaggtcaatccttacggacatatttctctgaccaacgattatttctccggcttagtggaacaggccgccaagcagtgctacggcattgcggccatgggtcaggccccggccgaaagcgtggtgcgcaatgccctgcgcaccggcagcctgccccccaaaggcgttaccgtgacgcaggaggaaggccgtctggtcatcgcactgcatatcaaagtggggtatggtctgaacatttccaccatcacccaaagcattacccaccgcgtaaaggacgaagtggaacatgccaccggcctgaaagtggcacgcattaacgtgtttgtcgacgacattatcgctgactgatgggcgtttaacagaaaacatgaggtgtaataaaaacatgattactggccagaccctgcgcgacgccattctttccggcgccaacaacattgccaaccagcgtgtccgtgtggacgagctgaacgttttccctgtgcccgatggcgacaccggcacaaacatgagcatgaccatcggcgccgcacgcggcgaactggaggctctgcccgacacctgcaccgtggccgaggccagcaagaccgctgcttccgccatgctgcgcggcgcccgcggcaactccggcgttatcaccagcctgctgttccgcggcttctccaaggccctgaagggcaaggatgaggccagcgccgaagacctggccaacgccctgaagatgggtgttgaggctgcttacaaagccgttatgaagcccaccgagggcaccattctgaccgtctcccgcctggctgccgagaaggctgccgagtgcaccgagatggagatccccgctatgtgggacgccaccctcgccgccggccaggctgcgttggaggacacccccaacctgctgcccgtgctgaaaaaggctggcgttgtggatgccggcggtcagggcatcatgttcatctttgagggcatgaagcaggtctttgacggcggcgagatcgttgccggtgccgaagtggccgctaagccgaaggtctccagcgaggctgccggcaagggcgtcttcaccgacgacctgatgaaggtcgaggacatcaagaacggctactgcacccagttcctgctgcataaggatcccggcgccagcgtgacccgcctgcgcgctttcctggagtccaacggcgattccgttgtggtcatcgaggatgacgacgtggccaactgccatgtgcatacctccgaccccggtatgatgctgagcgaggccatcaagtatggctacctgaccaacttcaagatcgagaacatgcacgagcagttcctggcccgccagaagcaggccaagggcttggagaagcaggccgaggccgaagaaaagaaggacagtgagttcacctacgctgccgttgaccccgagcgcgagtacggctttgtggctgtggccgccggcgagggcctgaagaatgtgtttgccgacctgggcgttgacgctgtcgtcagcggcggccagacgatgaacccctccaccgaggacatcctggcggcgatccagagcgtaccggccaagactgtgctggtcctgcccaacaacaagaatatcatcatggcgtccgagcaggcacagaagctggccgaccgtaaggtcatcgtgctgcccacccgcaccgtgccccagggcatgaccgccatgctgaactttgaccccgagctgaagcccgaggagaacgccgttggcatgatgcaggctgctgaccatgtgagcaccggcctgatcacctatgccgcccgtgacagcgagtttgacggcaagcccatcaagaagggtgagatcatggcgctggagaacggcaagatcgtagccaccggcaccgacatcgtcaagatgacctatcgtctggcccgttcgatgaagaagaaggacagccagttcatcaccgtgatctccggctgcgatgtcagcgacgaggacgccgaaaagaccaccgagatggtgcgcaccaagtgcggcagcagtgtcgaggtcagccacatcagcggcggccagccggtttactactacatgatcagtgtggagtaattgacgttataacattgggaaaaggcgaatttggggtgagaccgagttcgccttttttggtatatctttgttattgatttttgcttgcggctgatgttccgcgccaccctgcggcgctcactcgctttaacggcatgttgcctttatgtgttccttttgaagacccaaaaggaaccgaaaaggtctccgctacttccgataacgcgggaggcccggcttaggggctgcttgcccctaagtaccggcggcgactgctgcggtttccattttttcaaaaagcaatccacagaaaatcgttggtcctatgtatcaaatagtaaggagcgagccgaatggaaaagcgatacggcatcttgatacttggcacttttgcctgtgccgcatgtttcctgttatccgactgcgcagggccagctgcggaacagtcatccgttcagccaccctatgacgggcagacccaggatgccgatgtctttatcgacatgccgaacctgcgccagtatggcggctacacctgcgggaccacctgcgtgcagatggtgatgaactggctggacccataccaggccgattggaaccttaccgcctatgaggaagaacttggcaccaacgaggaagccggaaccccgccaggcagcattgtcagcttttttgaggaaaacagcgtaaccgtcacggcaaaggagaaccgaacaacgccagaactggcttcggctctgtaccaggggcaccctgtgctgctctgcattcaggcatgggccgcggcagaggatggctacaacacccaaaattccgatgatgcggacacctatttggccgagggacactgggtcatctgtgtcggctaccagaagcaggagctgggttatgtattttactttaacgatccggcgtgcgttggctattgcatgatgagtgagcaggatttgaacaaccgctggatcgatatggatactgagggaaatgtttacgaccactacggcattgaaatcactgcggacggaacgagttataaccccgatggggtgttttatctggaataggaagtattttcaatatgaaaccatcatctaaagcagtcatgattggatgtatcagcttttttgttttcttatatggaaatcttctattcggtggacttgttgggtcactgattcctagtggagatgactttataaactcttatttttacccactttatacagcagtcacactgttaatctctctcattatttcctgcacatacttgattctcaaaaaaatcaatctgcttttagacaaaatggaagaaaaataaacttgtgtttcgaaaatcggaagttgtgaggaaaaggtgaatgaaaaggcgaatggagcaaaaaaagtaaaaatccgattttgattaaaagttctttgccccgttttctttcaagaaagcgggaagaaaggaggtcccgtatggcgatgatcgacagttctatccaatatttaaagggcgtcggcccggcgtttgccaaaaagtttgaaaagctcggcgttaccaccatccgggatctgcttttgtgctacccccgcaaatacattgactacaccaagccctacaccgtagtcagcgcaccttacgacgtggacagctgtgtccgcgccaccgtgctgcaaaaagaaccggtccgccgcatcaagggcgggcgggcgctggtgcgggtgctggccgcggatgactccggcgtactggggctgtcctggttcaacacgccctacgtggccgataaactcatcatcggccagacctactacttcgagggccgcatcggcggcaccatgacccgccgtgaactgctgcacccgctggtgcgcaccgaggcgcaagtggctgccagcccttttgtggccgtctaccccggcaccgagggcctgcccgccgcacggcaagccgcctgcgcctacgcggcgctgcaatacgtggacgagctggccgacccgctgccgccggagttgctgacccgctaccgcatgcccaccaaggcccaggccgtgcgcagtatccacgccccgcaaagcgccgaggacctggccggggcgcgacgccgtctgatctttgaagagctgtacatgctccagatcggcatctttttgctgcgcagccacggtcggcgcaagaccagcgcaccaatgcacgagatggaccttgccccgttctggggcagtctgccctatgcgcccaccggcgcacaaaagcgctctgccgaggaaattgtgcacgacctgtgcggtgaggtgccgatgaaccgcctgctgcagggtgatgtcggcagcggcaaaacgctggtggctgcggcggccatctggtttgccgcgcaaaacggctggcagagcgccatgctggcccccaccgaaatcttggcccggcagcatgccgctacactggccgaccggctggaacccttcggcgtcaacgtcacgctgctggtgggcggcatgaaagccaaagagaaaaaggtcgcgctggaagccattgccgacggccgcgccgggctggtggtaggcacccacgcggtgctgaccgattcggtcgagttcaaaaacctgggcctggccatcgtggacgagcagcaccgcttcggcgtgcggcagcgcggcctgctggcaggcaaggcgcaaagcccccacctgctggtgatgagcgccacgcccatcccgcgcacgctgggcctgctgatgtacggcgatttggacatctcggtgctggacgaactgccgcccggccgcaagcccatcaagacctggttcatcaccggcaaaaagcggcgggacatgtacggctttattgaaaagcagcttgccgcggggcatcaggcctacgtggtctgcccggccatcgaggaaaacgagatggccgcagatatgcaggccgtcaaaaaatattacaccgagaccgtctgcccgctgctgcccaaccggcgcatcggcctgctgcacggcaagatgaagcccaaagaaaaagacgaagtgatgctgaaatttaaggcaggggaactggacgtgctggtctccaccactgttatcgaggtcggcgtcgatgtgcccaacgctacagttatggttatcgaaaacgccgagcggttcggtctgtcggcgctgcatcagctccgcggacgtgtcgggcgcggagcggcggattcctgctgcatcctgatttccgacaacgagaacgacgccgttaaagagcggctgcgcttcctgtgccacacgtcagacggttttgccgtggcaaaatatgatcttgaaaaccgcggccccggtgatttcttcggctcggcccagcacggtctgcccacgctgcgggtggcggacctggtgcaggatacccgcacgctgaaagtggcccaggaggaagccaaggccctgctggctgttgacccaaatctcgccatgccgcagcaccgcgccctgtccgatgaggtggaccgcctgtttgccaccgccggtgcgatgaactgattgtaaaaatcccggttcacacccttttattttccctttcaatttgctatactaataccgtatatcaaccaaaaggaaaccatgcctatgaaaagattctgcgcggtgctgtgcgcctttgtgctggtgatcgtgctggggctgccggtggcggctgaggggatcaacggctcggcggcggatattgcgcccgacatcatggcccctgcggcctacgtggtcaacctggataccaatatcgtggtctacgagaaaaacagcgagaccccgctgcaggccgccagcctgaccaagatgatgaccaccctgctgctgctggagaactatcaggaccagctggacaccatcagcgtgacggcccccagttatatctacgacctgatttgggagaagacgaccaacgcctccacggcggacatccgtaagggtgagacccagaccctgcgcaacctgctgtacgccatgatgctgcccagcgccaacgaggctgcctacattgtggccgactatatgggcggcggcagcattgataactttgtggcgatgatgaacgaggaagccgcccgcatcggctgcaccggcactacctttgccgacccctgcggtctggataccaacaacgtcaccactgcccgcgatgcctacctgatcctgcgggcactgacatcctacgacatcttcgccacggtcgtgtccacccccagctacgatatgggcaccaacgaccgctacactacccccgggacctatgtgatccagaacacggacaaaatgctgaacgaaggcagcgcctactaccgcagctatgtgcgcggcggaaagaccggcagcctgggcgagtggcagaacttcgcgggctggcacacccaggacggcatcagctacatcagcgtggtgctcaacgtgccctatgaggccgaccccgatcaggcccgcccggctctgtacgagaccgcccagctgatggacgtcatcttcgattccttcaccatcgcggcggcgctggaccccacccagcccatcaccgagatcccggtggattacgccacccagtccgatacggtcatgctttaccccacggacaatatgatgaccctgctgcccaaggagggcggcgctgccctgaccgagcagaccttcaacctgcccaaaagcatcgcggcccccgtcaggcagggggatgtggtcggcaccgttacgctgaccattgagggcgaagtcatcggtacgacggacctgatcgccggcagcgatgtggcccgcaaccaggtgctgtacaccatcgcccgcgtgggcgagttcttctccagcacctattttaaagttgttgttatgcttacgatgatcgtcgtggctgtgtacgccttcctgttcgttctggcagcattgggcgtgctgaagccaattgaaaaatcatcgaaaaagcgtacaaataagtaaaaacctcaggaggggttatccatgttagacgtaaagcgcaaccttacgaccatgacagatttctacgagctgaccatgtcggccggctacctggatgaggggtatgtggacaagatcgccgtctttgatatgttcttccgccgcgtgcccgatggcggcggctacgccattatggctggtctgcagcagttcatcgacgccgtggaccacctggaattcacccaggaggacatcgactatctgcgcaccaccggcgcattcaatgagaaattcctgaactacctggccaacttcaagctgcactgcaacatctgggccatcgaggaaggcatgcccatcttcccgcaggagcctatcgttaccgtggaaggcccggctattgagtgccagctgctggagaccctgctgctggtcaccttcaaccaccagtgcctgatcgccaccaaagccaaccgcatcgtgcgttctgccgccggccgcccggtcatggagttcggcgcccgccgtgcccagggctatgacgccgcctacttcggcgcccgcgcctcctacatcggtggctgcggctccacctcctgcgtgatggccgcccgcgacttcggcatcccggcctccggcaccatggcccacagctgggtgcagatgttccccaccgagtacgatgccttcaagaaatacgccgaaatgtaccccgatgcctgcgtgctgctggtggatacctacaacgtgctgcgccacggtgtgcccgatgccatcaaggtgttcgacgaggtcctcaagcccatgggcaagcgccccaagggcatccgcatcgacagcggcgatattgcctacctgtccaaaaaggcccgcaagatgctggatgaggccggttaccccgactgcaccatttgtgcctccaacagcctggatgagtacattgtccgcgatctgatcctgcagggtgcccgcgtggacagcttcggcatcggcgagaacatgatcaccgccaagagcgaccctgtctttggcggcgtgtacaagctggccgctgtgaaagaggacgacggcagctacacccccaagatgaagctgtctgaatctgctgagaagatgaccattccctgcctgaagaaagtctggcgtatctacgaccaggacggcaaggccatggctgacctcatcacgacggctgacgagcaggtcgagacccagcacggcatcaccctgtttgaccccatcgagacctggaaagagtgcacctacgtcaactgcactgcccgctgcctgtccaccccgatttatgagaacggcaagcgcgtctaccagtccccgagtctgaacgacatcaagaagttctgcaaggcccaggtcaacaccctgtgggacgaggtcaagcgcttcgagaatccgcaccgctactacgttgacctcagccaaaagctgtgggatacccgcagcgccctgctgaagaaactgtccaagtaaaacattacaaattggttacaacgcaccccttccgcacatactatggcgggaggggtgtttttatgttagagccgatcatattgtttgccctgggcggggccgggtatcaggccatcgagcttgcctggcggggcaccacccattggacaatgtttgccgcaggcggggcatgcctttgccttttgcagcaattggcccggcggcgcagcctgccgttgggggcagcggcgttatgcggcgctgcagccgccagcggggtagagctgggcgtgggcctggcctgccgctaccttttgcacctggccgtgtgggactacagcgccctgtggggcaacgtagccgggttggtctgtccgctgtacagcttttactggtttttgctttgcttttgggtgctgctggtgctgcgcggggccgaaaatttgactgaaagaccgctttatcgtatcacaaaatgggctgccgagccttaaagtccaaattatggtacttgccatcctgtataatggaagcataacaaagctcaaccaaacaggaaaggcggtacacatcatgacgcagcagtttcgttacgtagcaggccacatcgaggtctattctgagtacggcgagttccttttctcggccgataccatgcaggaagcatgggaggaactgtccgcgtaatgcgtacagatgcaacccaaaaatatacaacatgccgaaatggtttaaaatatacaaataacttttgtaagtttgtacaaaatgcaacttgcaaaagacggacgtatcgcatataataaagacagaaaaagaaaagcgataccgccaaggcgaacagccagcagcggcatcgccccccaaaaagacccgccaatatcggaaaggagatgggttgtatgttgaagctgcacacgttagccgagtggatgtatggttttctggagcctgccccgccgtacggcctgccggaggaaatgtataacgacgtgatgccgtctggcgttcaccgttataaccgctataatgacggattgtaaggcagcctcttaaaacacggtcacccccaaggccgcggtgtaagaaaagaccttccagcaagcagccgcccggtgccgacatgcaaatgttcggcaccgggcgctttttgtcgttccgcttgcattttgggcctaaagagcgtatgatatatactgtccttttatgacctggcgcggcagtttgccgcagcggtgcacaaaagcctgcactgcccccaggcaaaccacacaaggggagactatttatgaaacttatcacctttaccgtgccgtgctacaattcggccgcttatatggaccactgcatcgagacactgctgcccgccggcgaggaagccgaaatcatcctggtggatgacggctccaaggatgacaccggcaagatcgccgatgcctacgcagaaaagtaccccaccatcgtccgcgtgatccatcaggagaacggcggccacggcgagggtgtcaaccagggtatccgcaacgccaccggcatgtactttaaggtggtcgattctgacgactggctggacgatgacgccctggccaaggttatggacgtgctgcgcgcccaggctgccgccgaaaagccggtcgatctggtcatggccaactatgtgtacgagcatgtggctgataacacacgaaatatcgtggattataccggcatcctgcccgagggccgcgtctttaagtggagcgagatcggtcactttccgccgaacaagaacatcctgatgcacagcgtcatctaccgcaccgaggtgctgcgtaagtccggcatggtgctgcccaagcacaccttctatgtggataacatcttcgtctatcagcctctgcccgaggtcgagaccatctactacctcaacctggacctctaccgctacttcatcggccgcgatgaccagagtgtcaacgagaagaacatgatcaagcgcgtcgaccagcagctgcgcgtcacccgcattatgatggaggccgtggatgtctacgccctgcctgtcacccaggacaaactgcgggcctatatgctcaactatttctcgatgatgatggccatctccagcatcttcctgacactggacggcagccccgaagccatggaaaagcgcaagcagctgtgggccgacctgaaagcccatgatccgcgcctttgccgccgctgccgcctctcggtagccgaagcctgcaacctgcccggctggctgggcagcaagctcagcatcggcggctaccgcattgcccagaagctgttcaagttcaactaaggggtgcccatgcagtacaaaaccattctatttgatctcgacggcaccctgactgattccgccccaggcatcctcaactcggtgcggtacggctgccgcaggatcggcatccccgtgcccgacgaagccaccctgcgccgcttcctcggcccgccgctgatcgattcgttccacaatctctgcggcttgaacgatgccgacaccgaccgcgccgtggcggccttccgggagtatttcccagacaagggcctgtttgagaatgaggtctaccccggcatccccgcgctgctggccgacctgcacgcccgcggctgccagctggtgctggccaccagcaagcccgaggagtacgcccgccgcatcatggagcattttgatctggcgcagtactttaccgccatctgtggtgcgactttggacgagacccgcaccgacaaggccgaggtcatcgcctacgcgctggacaccatcggcctgaccgataagaccggcgttgtcatggtcggtgaccgtgagcacgatgtcatcggcgcgaagaaaaacgccctgccctgcatcggcgccctctacggctacggcacccgcgaggaactgcgatccgccggtgccgctgccatcgcggacaccgtggaagacctgcataaactgctgctgggataaatcaaatgggagacagccagcgctgtctcccattttttattggtcccgatcgttgtagtagagataccacccgcggaagccgtacccgatgccaagagcgcccagcaccagcagcatagccgccttgtcgggccaaagcggcatattccgggtgcagacccagaccaccgccaatgcaaggcatacaagcaccggcagaccgtagtgcagaaatctctgcacccgcagccgcttcgggtcgccctctaccgccagcgccgatggatcgcacacctcacaccgcacccgcagtatcgggatattgcgcacatggctcgaataccgcacggccctgtactcaatgccgtcaagcataaaatgcggggtcatgctctcccgggtcatcttcacatccacgccgttttcgtctgcccaagccagcagtgccgccgtaaattcctgcggggttgcaatggcggtgtccggcgtaaaggtaaactgccgcttatgctcggcagccgccattttccggtagtcctgcacccagccggtaaaccagccgcccgcctgggcaggggagtccatccgagccaggcagtcgtccacatccagctctgccgccgttcggtcgccggcggccagctccgtgcagaaggctgcggccgctgccagcttttgctgctcggcctccagttgtcggcgctggcgttcagcagcctcggtcagcggcagtgtaccgctcagtaccgcgcggatatcctccactggcatatccagtgtgcgcagcacgcgaatcagtttcagcgtccgcacatcggcatccgtatagatacggtagtcgttctctgggttgcgtgccggggtcagcaaccccgcctgctcatagtagcgaatgttccgcgccgatacgcccgacgcatccgctgtctgcgtgatgttcataacatcacgctcctttcccggttatcgtacaccctgcacccactggaaggtcaaggcttttcctgaaaataagcgacaacttataatattttgatttctacagttcgcccgcccaggttctcataaattctgtgggacactgacagtaccgtgcgaccctcggacgcccgccgcagggcctccagcacgcgggcttcggtttcggcgtccaggttggcggtgatctcgtccagcagcagcacggcggggtccgccgcggcggctcgggcgatggacaacagctgccactcgccctgagaaaacatcccttcactgcacggggtgtcgtagccgtcgggcagcgcttcgatggccccgtcaatgcccgccagctgggccgcatgtttggccatctcggcggtgatctgtggatcgcccagcgtgatctggtccagcacggtgccgggcacgcgggcaaaatgctgctccacacagctgatgcaggtgcgacgctcccggtcggtgatgtccgccaccggtacgccgccaatggtgacggtgccgctttcggccgggtacagccccagcagcagcttgaacacggtactcttgcccgcgccggtgcggccgatcagcgtgacctgctcgccctgtttcacggtcatcgagaagtcattcagcacatgtttctcgccgtagccaaaggtgacgtgggaaagttccacatcgccccgggccgccctggtacgctgtgcggaaatttcccgttccggctgggccaaaaacgcatcaatgcgtttcacgcccgccatggcagattgaatggtctgaacctccatgcccaggctttcaatgggggcgaaaatgcgcgatatgtagttgataacggctaccgaggtgccgacggacatgccgaacagctccagcaccaccgcgttgccggaggccgacagcagcataacggtgcccaccaccacggcgttcagcagcagcacaacgggggagtagacggcatcgtaaaagttagtgcgctccatggcggcgtagcccgcgccgatgcaccggtcatagcggcgctccatgtactgctccatgcccaacgcacggatggtgcggatgttgtgcagcgtctcgggcacctggccggagacggcagccacagcccggcggttgtccagctgagcggccagcatgcggcgctgtacacggcgggtaaacaccgcgaacagcggcagtaccagcagtaaaatcagcgccagaccgggattcttcgcggcgatgaccgccataatggaaaggatgcggcaggcgtccgccaccatgctgatgatgccggaggtgaacagcgcctccaccgtgtccacatcgccggagaaccgcgcggccacctcgccggggttctggtccaccagcgtgcgtgcaggcagctgcgtcaatttgtgggacatctcggaccgcagcgcgtgggtcatcttttgcccaaacagcaccagcagactttcctgcgccgaggacagcaccccctccagcgccaggctggcaaagtagacaagcaccgcccagatcgtcagcggcaggcccgccgccagcccatcaatgatgcgtgccagcagcagcggcggcagcagcgaggcgataactgacgacgccacgcataaaagtgtgccaacagtcagcgggtagtgtgcccgggccgccatgcggagggctgcaaacacgccgcttttatggttcgttttcatgctgctgccctcctgtctggctttcgtacagctggcggtaggccggtaccgccgccagcaattcctcgtgggtgcccacggtggtcttgccatcctccataaaaattacacgctgcatctggggaaaatggtacagccggtgggagatgagaaagacgaccttatccttggcgtactcctgcaggttagcaaacacggtatcctcggtgctgcggtccagcgccgagaacgggtcgtccagcaccagcaccggccggggatgcgccagcgtgcgggccagcgccagccgctgggcctgcccgccggaaagccgcgtgccgctggggccgatcacggtgtccacaccgttctccatggcctgcacttcgtctttcagcgccacagcagccaaccagggcatcgggtcctgcttgctgccgcacagcacgttgttctgcacggtgtcggcgctcagctccgggtcatgccccaggtagccgacggtggatgcaatttcccgcggcgtcagcgcagagaattctttgccgccgaaccgggccgagccgccataggaagcttcacacaaaaatacacgcccaaaagtggattttccgcaggccaccggccccgtaatgccgatgatctcccccgggtgggctgtcagatccagccctgcaaaaatcggctcttcggtatacccaaaggacagatcctctagcgttacatcggcgggggcgggcacagccagctcgtccggctcctccggcagtttcatcagcggtttgatgcgcttccaggagacttcggctttctgcactgcgttgaacagcttcgctgctttcgacgactttgctgtcagcttggtaaagcaggagaggaacgtagtaaacgccgcaatgtcccaggcctgccacccggtgcccagcacgtttttggcaccgaaccacaaaatgaacagcacgcccgcttcggacaccgccagatacagcggcggcagagccgattgccacacgttgctgcgcacggcggtcttttcgtaggtggtcagcacgtcctcgtaccgggcctcgcgggcggtctcgcagccgtaaatgcggtaggtggcggcgttctgggcacggtccagcgtggcggtgcttaacgcaccggcggcctttttgcaggcggcgccttcgcgctgcaccggctttttcatccacgccgcgcatatgtaggagaccggtgtaaacagcaagctcaacagcgccagccgccaatcatacaccagcagcatcacgatgtaacctaccagcgctacgccggtatcaaaaatttcggtggtgaatttccgcatgccctccacgcagtcgtccacgtcagagatggccttggtcatcagctcgcccgcaccctctttttccagcgcggcgcggctctggcgcaccaggttggcgtacaggatgcccttcatccggcggttgatgttattggcaaagcggcgcacgtaaaagcgcttgatgaaccgcgccgcctgcaccaccagcgtaaccagcacataggtcagcaccagtatggccatggccgcggcggtggcgctgccgtccaaaatatcggtcaggcattgggccagccgcccctcaaaccagggcgtggccagcagaccgatgttgtagatcaggcccgaaacggtgaccagcgccagcggcagccattcgatgtggaagtaggcgccgatgcggtccgggcggaagttcttgtcattctgcatgttccgcttcaccctctgtggcttgtttaaagtgcgggaaccccgcgcggctctcggtcttggaggccgtgtacagcttgtgcagcgtagccgcaaaggcggcggcctcgtcggcgggcagggcactggtcaggtactcgtaaaattcggcctcgatctccgccttggaagatttcaggctttcggctttctcggtggggtacaaaagctggctgcggcggtcattggggctggccttgcgcaccaaatagcctttcgcttccaggtttttggtgcgccgggcgatggccgccttgtcggcgtgcagcagctcggccagcgccgcctgggtgcagccggggtgatggcgcagcgcgtggatcaggtcgatctccgccgtgccaacgcccttttcccgcagggtaagcagtaccagcttctctgcctcgcgggcaattttggtaattttgcgttcggtaatatccatagccgcctccgtatccgggcaaactggttgtacctacatcgttgtacatacaacaattatagcctgctttccgcctttgtcaacaaaagcagaaaatttatccccgccgcgcagtacaaaaaacaaaataggcatacccaaccgtcccattttgtgctatacttattttatattatggtttaaggaagggttcctgttatgtatcagatgggtgacagtaaattggaagtacgcgaactgctggtcaaggcgttcgccagtgcgtgggaggccggagataaaacggtcgaccgcgatacgtatatcaatagcagcatcaacgtgatcgactctctgcaggtcggccccgagatgatctatggcgaggaaggccagggcctgctggagggcgagctggaccacctgcccgacctgctgcgcgccgacggcgcctgggtctactacgaggtcccggctgagaacttcttcatcctgacctggatgatcgacgccgacaaggccgccgagaaggtcgcttcgctgaaagatgaggaaggcagcctggcctgcatcgttgatctttcgcaggagtggcaccgcgcctaatacaccaccaaaccagggaaagggggacagcaccatgaaccgggacagcatctatctgccgcgggatgtcatcggcctgctgcaaacgctgcaaagcgccgggcacactgcctatgtggtgggcggctgcgtgcgtgacagcctgctgggccgcacccccggggactgggacatctgtacctcggcccggccggaggagatgcgccgcctgtttgccgaccatcagctgattttgaccggcgaaaagcacggcacggtggcggtggtgctccacggcaaaccctacgagatgaccacttaccgcctggatggcaactaccatgaccaccgccatcccgacgcggtgcagttcgtggacgacctgcccagggacctggcccggcgggattttaccatcaacgccatggcctacgccccgggcaggggcattattgatctgtacggcgggcgggatgacctggcggcgggtatgatccgctgtgtgggcgacccggcccagcgctttgccgaggatgctctgcgcatcctgcgggcgctgcgcttctcggcccggctgggctttgctttggacgaagccaccgctgccgcagccctgcaggcgcgggatacgctgcaaagcgtgagcgccgagcgtatttataccgagatcgacggtctgctcggcgcccccaacgcggggccgacactggccaagtacggcgagatcctggccggtgcggtgcccgaagtgcaggcctgcatctgctgcacccagcccggccgctggcattgctacgatgtgtggcagcactcggccgtggcggtggaaaagctggacctgcgcggccaggatacccgcggcgcgcgggtgctgtgctgggcagcgtttctgcacgatattgctaaaccccagtgccgcagcgtgggtgcggacggtgcggcccactttaagggccacaaccagcggggcgcggcgatggcccgcacgattttgcgccgcctgaaagcccccggctatctgatcgaggggactaccgggctgatcgccatccatgatgccccggtcccggcgggggacaccgccattttaaaaagtctcaaccgctacggcgcggtgtttttgcaccggctctgcgcgctgaaatatgccgacctggacgcccacgccgacacgccggaggtcaaagcccggcggaacgaggtggccgcctttgaggcccggatgaccgagctttccaagaccgcctgctacaccatgcgccagctggccgtaaacggcggcgacctgatggaagccggcctgcccgccggccccgccgtgggtgctaccctgcagcgactgctgaccgccgttatggagggccgcgtgctgaacgaaagagccgcactgttggagtttgcgttgagttgaaacgaaaaggatgaaagtatgatcttcggcatcggcaccgacctttgcgcggcagaccgcatggcggcaaagctgcaaaagcccgcctttgtgcagcgtgttttttccccgacggaacaggccctgctgaacgagcggggcggcacccaccgtgccgagaccgccgccgccaactttgccgccaaggaggcttttttaaaggccgcaggcaccggcttgggcggctttgcactgacagatttaacggtattgcgtaaagaaagcggcgcaccttattttgccctgaccggccccgctgccgaatggaccgccgccaacgccctgaccccgcacctgagcctgacccacgaaaacggcctggcctgcgcgtttgtaattctggaacaaaacaaataactgccttttacgggcggccatgggccgccttattttgtaacaatcggaaaggaggtccgccgtgccgacaaaagccacccgcgccagcaatctggaactgctgcgcatcctttgcatgctgctcatcatcggcgaccacctcaccggccagggcggcattgcggattattccacgctgccgtcctccttcgtgttctgcctcatcggctgcggctcccgcattgcctgcaccgtgtttgtgctggtgggcagctggtttatgtgtgaacagccgttcaaaacccgccgcccgttgtcgctgtggctgtcgctgtggctgtacaccgtgccggtcacgctgctgtgcaggctggccgggctggatgtctccctcggcgcactgcgctgggcggcgtttcccgccggtacgcgccagctgtggttcatctcggactatctggtgctgctgctctgcgtgccgctgctcaaccggctgctgcacgggctgccccgccgcgcccacaaaggcgtgctgctggtgctggctgtgccgctggtcgtttaccccacggtgtttggccaggacggaattttgggcgatacggcgtggatgttcctctacgattacctgctggctgcctacctgcgccgctggccggataaccgcctgtcccgcctgctgaactgccccgctgcggcgcttgtcctcggcctgggcctgccgctggccaacaccgccatccgcgcggtgctggaataccggggcgcgaccgacagcaaggcgttccagtacattgcctactaccgcacggcgctgggcgcactgcccggcctgctggcggcgctggcgctgttccacttcttcaaaaatctggacctcggcagcaaccggttcatcaacgggctggcgggcacgacgctgggcgtttacatcctgcaccaggtccccgtgctgcgggactttttgtggaacggcatcttccacgcccaggcgcaccacggctcggcggcgtacacgctgctggtcatcgtgctgactttcgcgggctgcgcggccatcgacacgctgcgtaccaggtttatcatacagcccttgcagcgcagccgtgcgtttacggctctttgcgccaaaggcgacgcgctggccgcagaaatcgaaaaacagagtgattaaaaaaacctcctctcgcttatactctaggtaagcaaacgagaggaggctttttctatggaagtgcacagaggcgaggttttttacgccgacctaagccccgtcgtgggcagcgagcagggcgggatacggccggtacttatcatccagaatgagatcggcaaccggcacagccccacggtgatcgcagcggccatcaccagccggcaggataaaaaccgcctgcctacgcatatcagcgtgcgggccgaccgctgcggcctggccaaggacagcattattttgaccgagcagatccgtaccctggataagcgccgcctgcgggagcgcgcgggccgcatccccgaggatgacatgcgccgcgtggatgaagccctgggcgtatccatggggctggaaagccagaacacccaccaggacggcggttatttctgaggatcggcggcatcttcctccacactgacgggcacgccgcggtgctccacgggcgtggagaacacgatttgcgtgcgggtgcggccaaactgctgcaaatggttgatgaactggtccagctcctgcgtggtggcaaacagcacctcgatcagcatgctgtaatcgccggtcacgcagttgcactccaccacatgggggcagctttcaatgtaggggtaaaattccggcttgcgctgggggtccatgtccaggttgatgaacgccttgaccatgtaccccagcatcggcgcggccacctgggcctgatagctcatgatcgcgccggagctttccagccgggccatgcgggccgacaccgcagggctggataaaaatacacgatcagcaatttctttcagcggtgcgcgggcgtccttttgcaggatgtccaagatttttcgatcgatacggtccatagcttccccctaaaaataccctctaaaaaacagacacgacccccaccaacggcgcgtcattgcaccgcaagtaggggtcgctttactatgtaaagtattctagcacacaaaaccaaaaaagtaaagtgccggctgaaaaaaataaaatgggtgagaggatgcgccacctccctcccagagggaggcttttagcggttccactctggcatatccgggaacacatcccttgcactgaacaaccgctcgttataatacatctcaaaatggcagtggttcccgaaggagttgccggtattgcccacatagcctatgacctgcccctgctccaccacgtcgcctacgtgcaccgcctgggccgacatgtgggcgtacagcgtttggtacccgttgccgtggtcgatcttcacgtagttgccccagctccaatggcgggtacattccaccacggttccggcgtcggaggcgtaaatttcggtgccgtagggtgcggcaatgtccgcgccacggtgatagttgattccgggagtaaagttcgcccagcgggaaatgtgccggtaggcgggcacgggccagatgaaactgccggtgcccagcttgccgatcatcccgctttgcaaccgggtgccccggcggatgacctccggcaccggctcggcagtgcgggctacatccaacacgcggctgtccacctcggcgccgttttcgtacactacctcgtaggtcacggtctcgcggcccggcacgccggtctgcacggtctcgcttttgccaaaatccagcgtgtcatcttccacaatttgggtatcgtaggcaagctcctgctcgtaccgctcccggcggcggatctgtacccgcagcagctcgccgtcattggcctgcagggcggatacaacctcggtataggggctgaccgatccggtcaggtaaatgccgtctgccagcgtcaactcgtgggcaaacaccacgcggctgtcggcgtcggcggggtccatgtagggacggcgcaccgcggccagcagggtgcgtaggtggtcgccctcggtggtcacaaagcgcagggcgccgtccacgtagacggcggtgcccgcagtaatttcactgccgctggcctgcaaaatggcgttggccacctcaccgggggtcatcgtgtcggcgctgacggccagcgtaaaggccgggtccaggtcccagttgggcacgtcggcccctgccgcttccagaagggcgcgggcggtgttcacgcgggcctgcacatcggcgcgggcagtatcaaagtcctgctcgctggccacatagcccaccacggtgccatttacttccacccgcagggcaaagggctggccaagccaggtgcgcaccagccacgcaaaggccagcactcccgccaccgggaccaccagccccagccatgctttggggcggcgcaaggcctgccgcagctggatgcaccccagcgcgacggggcgcagcaccgccgtcagcagcgcacccagtacccggacaaaccagcgggtaaaggcggccagcccgcgtgcaaggcagagcagccgatactctacataaaagccaaaccaatacaaaaagtcgttactcattgcggtacgtaagccagcgggttcacgcgggcgcggttgacccgcagttccaggtgcaggtgatagccgccgcccccggtgctgtacacgttgccggtgttgcccacgtagccgatgacctgccccttggtcacagcgctgccctggctgacggcaatgctgctcaggtgggcatacaggctgtcgtaggtgttgccgtcgtcggccgtgccgtggctgatctgcacacagttgccgtagctgtacacggcggcggccgcgctcacgatgccatcagcaatggcgtagaccggcgtgccgcccggcgcggcaaagtcggtgccccggtgggggatgccccaggggtcggcctcgccaaactgggtggtgatgcgcccgtagctgtccagcgggcagcggaaggcaaggctggtcaggtgcaggtcggcggtggtgtacttgctgctctgggcgcgggcgtaggcgtccagatccgccgtggcctgcagataggctttgcgggcggcctcggtcaccacagcttgtgcttgttcggcggcctgctgctcggtcagggcggtgttggcggcttgtaaggcgctgcccagctcgttttgtgtagcttccagggcggtctgctgggcatccagcgccgcgcgggcggcctcggcttcgtcagcagcggcttgggcctcggcgcgggcggtgtccagggcttcggcctcggcgttcaactgcgccagggcggcgctgttgtggtcggccagctccctcagggtctcggcaaaggtcagcatctcgtacaggctgcgggcctgcatcaaaagggtaatgctgccgccgccgtccaaaagctgcatcgcgcccatctggcttttgcagcgggccaggctggcgtcgtactcggcctgcttgtccgccagcgcctgggcggcctgctcggcggccgcggtgcgctcgtccaaggtgcgctgggcctcctgcaaggctgtatatatgccgctcaactgggcggcgacttcggcgctctgcccctgcaattgatcgatctggctctgggtctcgctttgctggttttgcagttcttccagttcttgctgggcttcgttgtaggcctgctgggcttgattctgttttgccgataattcgtcctttttgctgtcggcatacgcgccaaacggcgcaaaaagggtgcaaaaaaacagccccgccgccaacagggcggggccgagggaagaatatttcatgggtatgttaccttattacatggtaagcagcagctcgcaaaccgtctgcgggtctacgcgttcgctgtttttcagcacttcccaatgcaggtgggggccggtgctggccccggtgctgccgcaggcggcgatctcctggccttgcacgacctgctgcccgacctgcaccttcacgctgcccaggtggctgtatcgcgtctgccacgaggcaccgtcgtccatgccgtggtacagcaccagatagtagccgtcgtcctcattatagtcgtactcggtcacggtgccgtcggcggcggccagtacggtggtgccctccggggccgccaggtctacgccggtgtggttttgggcgaaagtgctgctcatccgcacatcctcagaagggaagagcggcagcgaaaaggcaatggcctgcgccccttggccgcccagggcggtatccagtgcactaaaggcattatccgccttggcggcaacgcagcggtcgatcagctcctgccgctcctcgtcggtcggctcggcgtggtcgccctcgccatggtaggcagtaaaccagcgcggcgaggtcagggtgttgtccacatacacttcaaaatgacacccgttgccggtggtttggccggtgctgcctacgtagccgatcagctgcccctgcacaacgcttt

SEQ ID NO: 7946 - DNA, 1758 bp, Unknown
  gut microbiota DNA sequence
caatgaccacaaagttgccccagctgtaatgctcggcagcctgcacgacaacaccgtcagccgcagccagtacatcggtgccggggtctgcgcacagatcatcaccacgatggccgttgttcttaaagcgggagatatacttgtaatccggtacaggatcgataaacagcgggctgttgtcggggtcctccagcagcggcatctgggcggtgttgaccacagcggtgggtgcctgcgtcggtgcgggggtaggcgtggcctccggctcagcggcttcggcggtctccggcgtggcggcgggggcgttttccaaagtagggcgcaccatgcaggccgtcatgctggcagcgatgaccacggcgcagaccaccatggccccggcccccaggcggcggtaatgcagcagatgcacgatgcgggtcttagcgctgccctgaccaaaggccaagctgccgggcacgccgcgcccctgcatggcaaaccgcagaatgctctcgcagtaggcgctgcaggcggcggaagattggcctcgcacggcagcttcgtcgcaggcggcctccatgtcgcgctcaaactcgcggaaggccagccacgccagcgggttgaaccagtgcaggcaggccacggcgtaaaacagcggcttggtcagcgggtcgccccggcggatgtgggtgcgctcgtgcaagatgacggcgtcccgggcggggccagccagcccggcgggcaggtagatgcggggccgcagcaggcccagggtaaagggcgtgggcacacaggggccgctgaagcagccatccggcgttttgcaggccagcgccacctggcgggacaggcgcaggtagccccacacggcacgcacggccagcagtgtcacgcccacagcccataccgccgccagcagatgccacacggtcagtgtggtgtaccagggcgcaggcgcggcgggggcggcgggaaccatggcaggcaggtccggggcggtaagctccggctgggtcagggcctgcacagtgtcggcggcctcggccagttgggtgttttgcgggcggggcagggcaagcgggatgccaaagggcagcacgaaccgcagtcccacggccagccacagccagcacaaaaaccggctgggcgcatgggcacggcgcaacaggcggcagacgacccaggccgccagcgccgccgcgccgccccacaggctgagcagcaaaaacgaaagcacggtgctgcgcataatagtcacccctctttcgattgggccgcgtccaacagggcgcggatctcggccgcttcggcggcactgatgggcttcgagttcaaaaatgcggccacgaagcgcggcaggctgccgtcaaaggtcttgtccaccacggcggcgctctcggcgcactgcacttcctccttttttaccaggctggtcacagtgccgccctcgttttgcagaataccgcgctcgcacagctttttcagcacggtataggtggtgctttttttccaacccagctcggcggcggaaagtttgaccagctggccgctgggcaggggctcggtgtcccacaccaggcaggcaaaccggtattcagcttcggctaaatggttcatggttttctcctttggtctacatggatagactccttatatttgtagtctatcacagtagaccgaaattgtcaataaaaaatgctttcccccacctagggtgtatctgataagtcaaaagtgctggaaaattcgctgaaaagcaacagctgcaaggcgcga

SEQ ID NO: 7947 - DNA, 8628 bp, Unknown
  gut microbiota DNA sequence
atttgccgctataaaaccgtaccccaaacaaaatactccggcagatccaatccacaaacatgccaaaccatacgccggtcagccccatgtgcatctgcagcacaaagaaatagcttaaaatcacgcggaacacccacatgctggcgatactgacgagcattgtaaacttggcatcgccgccgctgcgcagggcgttgggcagggtaaagctgggggcccagaacaccacgcagaacacgctgaaccagtgcaccaccaccgtgcacatgctggccgcctcggccgacaggtggaaccaggtgataatctccggcagcagcaaaaacatggccaaattggtcagccccaggcccacgatggcaataccggtcagctgcagggagtactttttcgcctgttccttgtccccggcacccagacagcggcccaccactgggatcatggccaggttcatcgtagcgccgggcacgttggccgccgtgcaaacgctgttggccacggcattggccgcaatggcggcggtgcccagggtcgaggtcaggctgctgacgcacagcttgccgatttggaacatgccgttctccaaacccgacggaacaccgatggccagcaccttcatgattggctccttgcgggggcgcaggtcggcaaaaccggccacccgcagcgggttgtggatgttctggttctgccacaagatccacactgccgcaaacacgcggccgatcagcgtagccagcgccgcgcccacaacgcccatgccaaagccataaatcaacagcgcgttgccgccgatgttgatgacattcatcaccaaactggccagcatgctgatgcggctgttgccctgggcacggaacagcgctgcgccgccgttgtacagcccaatgaacgggtaggagatggcgctgatgatgaaatactgctgcgcgtagtgcatgacctcgtcgtcaatgctgccaaacaccccgcgcaaaatggggcgggacagcgccaggcacagcacgcccaccgcaaccgtggagatggccagcacgctgtacagctgggccgcgctgcgctgggcgctctcctggtcgcggcggcccatgtactggctggcgaccaccgcgccgccggtggccagtgccgccaggatttggataatcagaatgttcaggctgtccaccagcgacacactggacacagccgcctcgcccacaccggccaccatcagggtgtcagccatgcccatcgtcacgcttagggtctgctccaaaaacagcggccagatcagcgccaccagcgcagaccgcgtaaaaagcggcgcctttgcttgcgttgcggtacccataccgggagttcctccttcattttcctaaacccaaagggcataatatctgcacgaattatgtatcattatagcccaacatccgcggtgatgcaattgataaaaagcaagacaaacaggcaaaaattgcgcaaatttgctgtccggctgccgatggcacaaaatttgcaatcggatggatattgcccggtttggggcagcaaaaaaaccgggccccgcagcggggacccggtttttggtataaagtttagaagtcgacctcggtgtcgtagtagcagcacttcagcagcttttccatttcttcctggctgggctggcgcgggttggagcccgtgcaggcgtcggcgatggcgttcttggcaatctcaggcagtctctccaggaacacattctccggaacaaagccctgctcgcaggggtaagagtcggggccgtagtggccgatgcagtgcgggatgttcaggtcgtcgttcatgccgcgcaggtacttgataagcagggcgaccttctcgtcgtcgttggcgccgcccaggttcatcttgtcggcgatcacaccgtagcgggctttggcggtggggtctttggcgttgaaggcgatgaccttgggcaggtacatggcgttggcggcaccgtggatgatgtgggcaccgtaatccgcaaaggccgcgccggtcttgtgggccatgctgtgcacgatgcccagcagcgcgttggagaacgccataccggccaggcactgtgcgttgtgcatggcgtcgcgcttatccatatcgccgttgtagctgccaatgaggttggcctggatcatctcgatagcatgcagggccagcgggtcggtaaagtcgcagttggcagtggaaacgtaagcctcgatggcgtgggtcatggcgtccataccggtgtgggccaccagctttttgggcatggtgtgggctagctcggggtcgacgatggcgacatcgggggtgatttcaaagtcagcgataggatacttgatgcccttctcataatcggtaatgatggagaaggcagtcacctcggtagcagtgccggaggtggaggagatggcgcagaagtgtgccttgcggcgcagcggcgggatgccaaagaccttgcacatatcctcaaaggtgatgtcaggatactcgtacttgatccacatggccttggcggcatcgatgggggaaccgccgccgatggcaacgatccagtccggctggaatttctccattgcagccgcgcccttcatgacggtctcaacggacgggtcaggctcgataccctcgaacagctccacttccatgccggcttcttttaagtaagcctcggcacgatccaggaagccgaaccgcttcatggagccgccgccgacgcagatcattgcgcgcttgccgggcagggtctttaatgcctccagggctttggggccgtgatacaggtcacgagggagagtaaatcttgccataaaattgcctcctttatagcttgacaaattattgtcaaattcattacttaacattttacgctgattccgtttaaaggtcaattgacgtttgaacgaatttgcgacccaaatttcggcattttgccagattgcgtttcatagcttgaaaagaactgaactacgctgaaaagggggcttctctcatgcgtcacctttcacctttgcaaaccaaggggatgcggctgcgcatccggctgctggcaggtgtgctggctgtgggatgcctgggcgggctggtagggcggctggccgtgctgcaattggtggacgccgacggttatgccgcccgcgcctccgaccagcagctgcgcggggccacactgcccgccgcccgcggggagattacctcggctgatggcacgctgctggctgccagcgagacctgctggaccatccgtgccgccccgcgggagctggccgacgagctggtggagcctaccgccaaagcattgagcgggatcctggaactagactatgcggaaacgctggaaaaattctcgatccgcacctccaacgactgcctgctgcgccgccgcgccaaccgggagatggccgacgccgtgcgtgcctggtgtcaggagcacaatgcccagggcatccagatccggcaggatacccgccgcgtctacccgcagggggattttatgggcggcctgctgggctttaccgatgtagacaacgcgggcctgtgggggctggaactttactataataaggagttgaccggccagaacgggcagatcttaacggccaaaaacgcctggggctacgacatgcccacccactaccagaccctgcaggaggccgtgcccggcaacagcctgacgctgaccatcgacgcagaaattcagcactggctggaaagcgccctctccgctgccgtgcaggagcaccatgtggccgagcggggtgtgggcattgtgatggatgtgcagacgggggctgtgctggcgatgagctgccagccggactacgaccccaacacgccccggcggctcatcgatgacgatgcccgcgcggcggtggatgccctgaccggtgaggagcgcagcgccgccctgcaaaaggcccagcaggcccagtggcgcaacaaggccatcagcgacctgtacgagcccggcagtgtattcaagctcatcacagcggccgccgcgctggacagcggtgcctgcaagcccaccgattactttgtatgcgcgggcaagatcagcgtggcaggcacacggttccgctgcgccaacggccacgtccacggagccgagactttcgcacaagggctggccgtcagctgcaacccctgctttatccagatcggcgcacggcttgggaaagaacgattctgcgattatttttccgcctttggcttgcgggaggctactggcatcgacctgcccggcgagatcaagcgcagcgaatattatacagccgaccggatgggtccggtaaacgattttgtataagaaaaagaacgcgaatttatttgattttttggctaaaatgcagtatcatgaaagcaaaaaagatgggacatggaggcgactatgaaatcacctgaggtgcagttcacgccggaagatcggctgatattggattcctactgccagatgctggacggcctggcacaatatttgggcacaggctatgaactggtgctgcatagtttggaagacctggaacattcggcaattcgggtgatgaatagtcacacgggccgcagcgagggcgcacctatcacagaattggcccttacgatgttgggacgtatccacgcacagacccagggggatacggtctgctattccagcacaaaccgtgatggaaaaccgctgcgctcttgtacgatcgcaatccggggcagtgaacagcgaatcatcgggttactgtgtatcaatttttatatggacaccccgctttcgcagcttctggaaacgatttcccccgcacagagccagcctgtagcggaaacctatgtacagaattctacagaaatggtttctgctgccgtacagcgtgcggcagcagaaaccgatgcagaagggctggcgggaagtgtactgcgtaacagagaaattgtcagtaagttgtatgcctcgggcattttcaatatcaaggacgcagtgattcaggtggcagacagcctgaacatttcaaaaaacaccgtgtaccttcatttgcgccactgcaagggacttgaataaaaaagttaagcctttgcaataaaatacttttcattcttagctgcaatttgcacggagaatgtgtatactatagacagttcagtaaggcaaagatgccagccgggcagacaacccggctggcatctttttttgcgtaacagcataaatgtgacgatttttgctgcagaatccgtgactcgtcagactaaacaaaagaaagaagaaactttcctacaacttgccaatagactgaaaaatagtttattgatataatgaggacaacgagcaatgaaatatacttcattgcaaaaagaacgaattttttaaggaggactatcttatgaaaatcattgcaacgaacaacgcacccgcagccattggcccgtattctcagggcatcgtttctggaggtttcgcttactgctccggccagattcctgtaaatcccgccgacggtacgatccctgagggcattgaggcacaggctcaccaaagctgcaaaaatgtagcagctgtgctggcagctggcggcaccggcatcgataaagtagtaaagaccacctgcttcttggcagacatggcagattttgcaaccttcaatagtgtttatgcgcagtactttaccagcaacccggcccgcagctgctgtgctgttaaggacctgcccaagggtgtgcgctgcgaaatcgaggcagttgcagaagtataaagggggacaacatggaaaacttcaccaacaaacagatcaatttcgatattttaaaggaacgtgcccataaccttcgctgggccgaagtccccgatggtgtcattcctctcacggcagctgaccatgatttcccctgtgcacctgaagtggtagaagccctgacggattacattaaggatggttacttcccgtacatcgaaaaccgcggcatggaacgatttaaagaggatctcgcaaaaagtttccgtgagcgtaagaacgagccggtggaagctaaatatgtgttgcccattgacagtgctgcccgtggtatgcaggtgattgcggatgcgttcctgcagccgggggatgagtgccttgtgtttgaccccgtggatttcctgttccgtacctcgatgtcgaacgccggtgcaaccatcaaactgttcccctcgaatctgaaagaggaccgtatcagcctggaagggctggaaaattacatcaccccaaaaaccaaaatgatcggtttctgcaacccgcataatccgatggggatgctgtatacaaaagaggatctggattatctgttgaccctgtccgaaaagtatggattctacatcatgaacgatgagatctggtcggatatgatctacccggaagctcacttcaacagcctgctggagtttggaccggagcgcaataaacgcacccttaccgtgtatggtttctccaagactttcggtgtggccggcctgcgtattggctgcgtatatgcgaccaatcaggaaaactacgataaacttgtagaagcctctatggtggattctaccatcggcggcatcaatctgctttctcaggtggctggtattgcctgcctggaaaagggcttttatcgtgtggatcaattcgtgcagcaaatcacagaaaaccgcgattatgccctgcagcggattgccgcaatgccgggaattaagtgccacaagccgcaggcaaccttcgtgatcttcccggatatcactgaaacaggaatggacccggtggaacttgtagagcttttgaaaaccaagtataagctggcgatcgttcccggtggtgagcgcttctttggtcccggatcggaagggcatgtgcgcatctgccttgccaccagccacgaagtgctggaagaagggttgaaccgcttggaagcctgcctgaaagatcttatgtccgctaaataagaggtaagccctgcagcaataaggggcttgatataaagagaggtaaaaaatggcacgcattattattgcggtcgtttacattgctgccattcttgtaatcggtattctggcaggacgcaatgtaaagacttcggaagaatttgcaaccgcgaaccgcggtatccctttttggaccaatgtgttttccatgtccagcgcctggatcggcgctggttctactctgggctgtgccagtatgtgttatgcgtacggtgtttctggtttttatctggctatcggcgtaggcattggcgctatgttgtccagcctgctgtttgctcgtaagattcgcgatgaaaacgtcagcaccattccggaactgatccgtaaacatctgggcaacaagtgcgccgatgcgatcgcactgctcagcatcttctcggtgttctctgtggtggcatcgcagatccgttcactgggtacgatcctgaacatgtttgtgccgcagctcagcctgctgaccgccatgatcattatgacggctgttatgctggtctatacggttattggcggtatggtggctgcaaccaagacggacaaggtcaacatcatcctgatggtgttcgctgttgttatggtgttgccgctggtcgcgctgatccaggcaaatggtatggccggtgtgactgctgccttgcaggaaagccgtcccgagatgctcaaagtcggcgctacggttggttggggcacgatgatttcctctgcgctctactttggcaccagcaacatgatcaacaacgagaacttcctgcgtatatgcggtgccaagagtggcagtgaggcacggaacgcctcccttaccgcaactctgctgatctatgtaccgtatctgctgtttgccagcctgattggtttggttggcgctgcgctgatcccggaactgggcacttcggactccatcctgcccgctatgatcaataattacacgggtacattcctgggtgccatcctgctggcagcattgttggcagctgttatggggaccgcagcatcggttacgatggtttgctccatcatgctgtcccgcgatgtggtcggccgcttcaaaaagatggatgacaaacaaacgcttaccctgcagcgcatctttatgatccttgtcgcaatcgcgggcctgatcgttggctatttcggatcttcgatcgtgtcgatcatggaagatgttggtgcaccggctggtgcggcattggttccgattttctgtggtattttctactggcgtaaaaagatgaatgagaagggaaccttgatcacaatcgttgttgccatcgtatcgacgctgggctactgggcgctgggttcgcccctgggaatcagccatttcctgtttggcctgatttgtgcggcaatcacaatgttcgttgcaaacagcgcatgctatgttcccaagcaagagacagaaaaagcagactgaacgctttatagaggtgaatactatgggaattattgattacctgattattctggctggctggggtattggagcagccgtgctattcaacatgatcaaggagaccatcaaaaagtaacttactccatctatacaaggatttctcccaccagagttccgtttggccctgtgaccaagcggaactttggagtgccattttaaatctatcaaaaaagcagccctgcgccattctccaaagcgcagggctgtttttgtttag

SEQ ID NO: 7948 - DNA, 1954 bp, Unknown
  gut microbiota DNA sequence
gccggtcacggtgcagaagatcgaggtgcggcaagcgtccatcgtcaagccggggtcgatctccccggcggcctgcaggcgggccaccagcgcatcggtcagggcagtcagctggctgcgacatgcgttggtacattcgggcaaagcggcctgctggccaaagctgctggccaacagccggtatgtgctcatccgctgggcggcaacctcctgcaaatagtccaccagctcattctccaaatcgaccagcgtgcggcagcggtcaaaccgggcagcgatgcgctcgttctcctgcgcaaagcagtagcgggccacgccctgcaaaatctcttctttcgaggaaaaatattcgtacacggtgcctttgccgatgcccgcggcgtcggccagctgctggatggtcatagcggcggggctgacgccctgagacgttaaggccagcgcggcttcgtatactttggctttgcgctgtgcatggctgtcaggggtcatttcgcatcctccttcgggggcagcagggtggtctcaaaagtgggttccgcttcggcgtcggcggcaggctgggctgcaccggcgcggcgggcggcaaactctgccgcaaattcggcggcgtcatcgggcagatcgtccatgccatcgtcgcccacgtcaatgttcaccggcggcttgcggtagaacaggtcgtacatcacgggcacgatgaacagcgtcatcaacgtggcataggtcaggccgccaatgattacgatggccatacccttgctcatgtcgctgcccacatcctggctgaacagcatcgttaccatagccagcacggtggtcagggtggtcatcaaaatggggcgcatacgggtacggccggtggctaccagcgcgtcggtacgctccagcccgccaatgcgcagctgattggcgtagtccacaaagacgatgccgttgttgacgacaacgcccatcaaaaccaggaagcccatcagcgagatcagcgaaagctgttcgccggcgatcatcagccccagcatgccgccggtaaaggccagcggaatcgtaaacagcacgatgaagggcgacagcaaactctggaactgcgccaccataacaaagtagacgaagatcagcgccagggtcatcataagcaccatctgctgcagcatctcggccacctgggtggtttcaccggccagctcggcggtcacgccgtcgggcagatccagcgcggccagcttcggctccacctcgcgggagagcagggtggtgttgtagccgtccacggtctcgctggtcacgctcatcttgcgggagccattctcgcgggcgatggaaacaaagcctgcgctggtggtgcgggtggcaaactcgcccagggtatgggtctcggttacgctgctgccgtcctcatcggtggtggtcgtctcaaattccatgttgaacaggctgtccagatccggcgtttcggtcttgtccacgatggtcacggtgtagttggtgccgttggctttcagtgtggtggcggtggtatcggtggtcagtttggcggctacctgctggtagacctgcgccacggtcaggcccatccgcatggctttgtccttgtcgatggagatgttgatctcctcgtcgccgttctcctggccgtcgctggcgttggcaattccgtccacgctgttcaacaggtcgaccacctgctcggcggcagtgttcaaatcgttcaggtcgctgccgtacaggtcgacctcgataccgctgccggaaagtgcgctcatgtccatcatgccgttggcattcacggtcacttcgcagggcagggaggcggtggcatcggtgatctgttcttgaatttcgctgccccggcgggcaccctcatcggtcagcagtacataataggtaaaggttgtgttgtccacggcggcattactgcccatcatggaccccatgctgttgccgccggacatgg

SEQ ID NO: 7949 - DNA, 1970 bp, Unknown
  gut microbiota DNA sequence
cggtgtcgtcggccacgtccacggtgatggagagctggttgctgcccatatcggggatcatgacaatgcccatggtggcaatgcgccacaccgacagcaccagcaggccgatggccagccccaggggcagggccttgactttcaggcagaagcgcagggctttctcgtagccgtccagcagcttgtcaaacagcgggtgcttgacctctttttgggtgcgcagcacggtggaacccgcgcagggcaccacggtcaacgccacgatcaacgaggccagcaggctgaaggtgatagtcagtgccatatcggtgagcagttcgcgcaccatgccggtggagaagatcatcggcaaaaatacgcagatggtggtcagggtcgaggagatgatggaacccgatacctgccgggcaccctgaaccgaagcccgcggggccggtacgccgcgcccacgcagacggtagatgttctcgatgacaacgaccgagttatccaccagcatgccgatgcccagcgccagacccgacagactgaggatattgaaggtgatgccggtgaaatacatcatcacgatggcaaacagcacgctcagcggcatcgagatggcgacgaccagcgttgggcgcaggtccttcaggaacagtgccagcaccagaatggccagcacggcgccttccaccaggttggacagcacgctcttgacgatcatgcggatgtagtcgccctggtccatgatggtggtcaggtgcaggccgtccttgccgtccatcaaagtctgcatggcggcggtgctggcggaggacacggctgaggtggacgcggtggaactcttgtaaatggagagcagcaccgcgcggttgccgtccaccttggcgtagctgtcgtcggcgttgtcggtgatctctacgtccgccacgtcggacaggcgcacatcgccgatgccgtcaatgctgcacagcaccatgcttttcagtgtgtcggcgctgtcgaaggtgtcgcccacctttacaatgtagcggttgtcatcgccctcgccgccctcaatatacccggcgggcatcgagaagttctgggcggagatcagctgtttcaacgtgttcatgttcagcagttggtccaggttggcgcttttcagcgcttcttcgcgggcagaatcgtattcttcctgcgcggcgtccaactgcgctttgccggattccagctgggtacggccgctttccagctggaactcgcccagctgcagctgggcttcgctgccgcttaaaagcagctgtacggccatatcggccaggctggggtccacggggttctcttccagattctccagcatcgtctgcagcttgccgcgctggtcgttcagctgggtcagcatcgtctgggccttggtcagctggtcgttcaggctggagatggtggattgcagcgtcttgcgcagttcctcggtgctgctgttcaggctggactcggcgtccttgcgggcgttcagcagcacggtggcgttctgcaaagcggtgcgggtggtggacagggtgttcaccatgtcgctgtagccggtcagggcatcgcggttggcggtggccgtggtcagctgggcctgcagggcggtctgctggtcgcgcttggcctgcagctcctcgtcggtggcaccgctgttgatgccgttggcgatttcattgtccaactgctgaatttgcagcgtaagcgacgtgatctgaatgttcagcgcggcattggcctgctcgatggtggcatcgccggtcagcggcgcggcagcggcctggatggcggcatcggcgcggtcgatggaggcgatcatggcagccatcttgttaaggtcgctcttggcttcttccagattggcgggcagggcggcggcgttgtactcgctgtcgtactgggccagaatttgcttgcagctggcaaacagcgcgtcgtcgatgggcagggtgacctccggcaggctggacggatcg

SEQ ID NO: 7950 - DNA, 1115 bp, Unknown
  gut microbiota DNA sequence
ctgttggttggccttgtccagctggcctttcaggtcggcgatcttctgctccagcgtggggatctggtcgtccaattgggtaatggcgtcccgcagctgctgggtgatgttggatttctgggtgttcagctggcttttgccgctgtccagctgcgcttgggcgtcgtccagttgggccagaccttcgttgatcttggcgcggttctcgtccagctggtccttggcttcggccagccggtcactgactttcaccagcagcttgtcgttcacctcatcgatcttgtcctgatcgagggtgatctgcacggtctgcttcaccaggccggtggtggaaacgctggctacgccgtccacgcgctccagttggggcaagatcgtgtcgttgatgtagtcggacagctcgtagatgtccatgccctcgcagtccacagccacgtactgggtggccatcatatcggggctgatctcgatcagcgtgggagtgctggccatgtcgggcagggtgtcgcccagctggttcacggccgtgctggccttgaccatggcgctgtccatgtcggtatcttcctggtattccagaaagataaggctgtagttctcgttgctttggctggtcacgtttttcacgccgttcagcgtggaaaggctgttttccagaggctgggtcacgtcggcctccacctgttcagggctggcgccggggtaggtggtcattaccagcaggtagggcaggttcatcgagggcagcagatccgtttggatgcgcagcaggctgaccacgcccagcaccagcaccagtatgaccgccaccagaatggtgaagggctttttgacactgtatttcggcataggttgaaaagatcctttcttgggcttacaaaaaccgaccgaccggtcggtcggcaacgatgccagtatagcacaaacgttagccgtgtgcaacggaggagaaaaaaattcacattttgggtggcacttgcaggccgatggcgagcatcggcccttacaatacagcagcagctcttgccataggggcggatgcttgcatccgcccgcttttatgctataataccttaggcaataccgcacaattctaagtgccgatacggcgagcg

SEQ ID NO: 7951 - DNA, 534 bp, Unknown
  gut microbiota DNA sequence
ggcgggaattgtgcggtgttgcccttatataatagacaaaggagaaccccatggtacgcgaactgatgaaagatacggtattcctggcccaaaaagcccagcccgccacggctgatgacatccccacggcggacgacctgctggacaccctgcgtgcccacgccgatggctgcgtaggcatggctgccaacatgatcggcgtcaacaaagctatcatcgtgtttgatgacgagggcaccctgcgggagatgttcaaccccgagatcgtctaccgcaagggcctctatcttaccgaggaaggctgcctctccctgcagggccagcgcaagaccaagcgccacaaaaccatcaaggtgcagtggcaggaccgcgaaatgcacactcacatcaaaaacttcaccggctggaccgcccagatcatccagcacgaagtcgaccattgtaacggtatcatcatctaaactacacctacccagaaagccgagcgccccgccgtgcccggctttttgcatgccgcgaatatccctttcgata

SEQ ID NO: 7952 - DNA, 2489 bp, Unknown
  gut microbiota DNA sequence
caggcagagcagaatagcggcaaaaatccttggctttttctgtttcatgggcgctttctatcaaaggtaacttacggtctcagtgagcgctttgcgggaactgtggttcggcaggggcttgccatcctcagcggcatgacccaggtccagcagcatcagtacttcctcattctccggcaggcccagcgttttggcggcagcttcggggtcgaagaagttgatccagcagctatctaccgcggcattggtggcggccagcatcaggtgggtggccacgatggcggcatcctcagcaccggaactatgcttgccgccggggtaggtgaacacgctgtccttgttaaaggccactaccagcactgtgggcgcgccatagcggcagggagtgagcttgtcaattttagccagcccctcggcggactggacaacataaatatgctgctcctgcaggttcttggcggtgggggccaggcggccagcctccagaatgctgctcagctgctctgctgtgacaggcttgccatcgtacttcttgcaggaatagcggtctttgatcacctgtgcaaaatccatggtagaattcccccttacatttttgcggacattccataccgtaagtatatactttttgccgcaaaatttccagccctctatgggctaagcccgctgtgtatgcagaaacctgttcttcactccggttttataaaagatcaaacagcgaaagctgattctccacccagctttcctgctgcgcctggtggatgacatcgcccggcaggctgtgccctattaaaaaaggggactgcgggtcatgctgccgcatattctgcgtcaccagctccttgctgtagttggcgtagcagtagcggcacaggtggccacaggtgttgtatgcgccgatgtcggcggtcataaagcaggcgcactctttgcgggagtttttacccggcggcaggtgcaggcgacgatgcagcgcggtttcaaaaatctgctgggtcatgcagccgttgcaatccgcgccataaggggccagttcgtctccctcggcacagggacgtattgtaaggccgtactgccgcccaatctccacaaaagccttgcccagcgtgagccggtcggcacgggagacaccctgcacctgcggaaaattgcgccgcactttctcgtacagatcaataaagctgataacgcaggtgtgggtgtgcccggccagcactgctgccatgcgggtgaactcctgaatgtggcgttcaaccgtataggtgtcggaaagaaaaatcgggtcataccgccagccgatgctgtccgggccgacaatctcggataaggcaacaaaatcacacagtacggtctctttcggcggcacatgcggctcaatctcaggcccatagggcgtgatggtgacgaaccagtactgcccataggaacgcagcagatccatcttcggcagcatcggcgcgggatttttggtgcagaagccgatcaaatccaccatgtccgggttcagctcgtaccgcgtcacagcctgggggttgtagggattgcgtaccagcacatacccggcccgcagccggttggcaaaccactcactgtaaaatgccgggatatccgtgcgaaaccctgtctgcaaaatcatcccaacaccccccctgtggttctccgaaccccagtatacacccccggaggggcaaaaggcaaatttaaaagaataacgatttggacatacaagaaacggaaaacgcagaaatccgctgtggtatacttttaaaaaccaaattatgcccctatacattttttacgagaaaaaacaaagaccgccgcagcctgctgggggagcaggacgcggcggcctttgcgatatagaacgtatggagagaatggcgaaaattacttctcggcctcaccgctgaggatgaagtcaaagatgcggaccttgtcctcgtctttctcaacgcgcaggcgtaggctgcggatgtaaccatcggagaaagcaccggccacagtcatgtactgggccaggcgggacttcaggttgatgcagtcgccctcgtcagagatcagttccacgttgccggtgcactgattgatgacggcgaacagcccgtcgatgttggagatgttttccagagtcatagcgtataaacctcctgaatcagcaatcaaaagttcgagggcacacccaggtagttgcacagttcttcaatgcaggcctgcttgtccgcgccagtgacggtctggttgaacaggaacttgaagatcacatccatctgggccaccagcatccgcatgccgggcacggtgttcaacccggccgcgcgggcggcggtgatcgtctcggacaggggcgggttgatgatgcagtcaaaaaccgtggccgtcttgggcaggcggtcgatgaagccgaggtagtcgtgctttttatcgaagcctttcatgcccagcggggtcaggttggcgaacagttcgcagctttcggcagctttgtcaag

SEQ ID NO: 7953 - DNA, 14128 bp, Unknown
  gut microbiota DNA sequence
agcatcacagcgcaaaccagcggcaggcgcttccctgctttgccaagctggcggatggcaggcgtcagacagacgccgcggatacgctccagccagccaaagagcagaaactcggtaacggccaagccgaggatgaaggtcatccagaccacattcagcagccgcccggcaccgatgccgcccatcgtgtaggatggcaggaaaatcatggcccacattaaaataaaggtgacggccgcacccgccagcggatggcggaacacccggtccgacaggctgctgctttgggcaaggtaacgcagcggtaacgccagcagcaccagcaggcagagcagcggtacatccagccagcggacccattccagcgcggccagcacaaagcttttcagcacggcttcaacaaagcctgcccccgcaaacccggcagcgcgtacccgcgtgccgggggctgttacgttgataagcaaccccgccacggcagcaagaaatgccggcagatggtaaaacctgcgctgccgtgcgcacagcacaacggccaacagcagaaccagcacattcaaaagcccggccacctggtgcccaccgccgatgataaagccaatcacgaccccggcggcgcagtacaaagtgcgctgcttatgggtcaattgcggcgcaaagcacagcccgaacgtcaacccggcattgagcacggccaacgagaaatacggcaggtagttcattgcgccgttgaaccagtacagcccttccaccggggcgggcatgccctcgataaaggcaaagcagaccagcagcgccagcgcccagggcagcagtttttgcgcttggtccaaacggcgcaccacacaacggcaggccccgtacaggcagaaaaacaacggtacaagaacgcaaagcagcgtgaccccataccaggcgttgccgaaaatggcgggctgccaggccagcagaaagccggaaacatacagcccctgccaattctcaaagtaatagacattggtgtcccaggcagctttcagcaggcgcggcaggtcaaagccatactgctgcatcaccgcgtgggtgcgggccgcgtaaatgtaatcgtctgccgagggccgcgcaaacacggccagcacaaaaaccgggaccagcagcagcccaatgaacagggtcagccgaagcagccagcgtttttgcaccgcagaatcatgccaaaaatccatacacgcgcaccccgttacgggttgcccagcgtcatctgcaggaagtaggtccactgcttctcccaccagacccaatcatgggcgacatcatagccccaaatgtccacgatggggtgaatgcccttgctttccaggatgccctgcagttccagcgtggaggccagcaggtcaccctcccaggcaccctggccgcagcacataatgaacttatcggctttattgaacagctccatgtagggatggtctgccgggaagttgcgcatgtaatcgcagggagagttgcggtagacgaggtcatccatgtaatcgccgaagaacatacgggaagaatacaggccgctcaaggcaatggtaccattatacaggtcgggacggcgcaggaagaagttgacggcatggccgccgcccatgctggcaccgcccaccaggatcttgccggtgtggtcctcgccgccctgttcgcggttgatctccagcaggcgcggggtcagctcctcgcagatatagttgtaccagcgctcctgcatctcgatgcgcggacgttcagggccgtggttgtcccagctttcgggatcgatgctgtcagccgtgaagatctgcagcttgccgctgtcgatccagggcgcggccaggttgcacatgtttcggtcttcccaatcataaaagcggccgctctggcacgggaaaatgataatggggcgtccggcgtgaccgtagactttgaactccataaagcggtcaagataccggctgtattccttataataacggatctgcatggcagttccctcctgattttatttgtaaaaaaatctcttgttcagatccagcagcccaaccatagcgtgcatggggccggatgtggaagttttaaatacccagtagtacgccagggccagggcctcgcgcaggtaacagggcagcacgctgcgccacggcgtgtgggcgggcagtgcagcgaccgtggtaaacccggcccgcgccgcataccgcccggcgcggtagcagtggaatgcgttggaaacgtaaacgatgggggtatcggcgctgtagccgcgctcttttaaaatatccagcgagaaagcaaagttttcctcggtggaggtggacttgctttcggccaaaacgcggtcagcgggcaggcctttttcaatcaggtaatcccgcatagcctggccttcgggaatccattcgtccctgccctgcccgccgctggtgacgatgagcaggtcggggtgttccgccgcgtactcataggctttatccagccggtagcgaagcagcatgctgggcttatccttgcgcaggcccgcgcccagcacgatcatgacctgctcctgcccggtgggcgggttggcgtaaccgctgacggccacaaagccaattaaggccagatatacaaccagcaaaacgcccagcacgatgcctacaacgcgcccggccccggtgcggagccaacccgccagtggtttatgccagatggcgcagaccgtgatgacagccgtcagcacccagaccatcaggttgcccatgttgaagttgcttaaaaacaccagcatgagcgaataggcgaccagcgctgcggccagaatccataagagaaggatgcccatcttacttgcagatctcatcgtacacgccgcagccggctgcgcagtagtcaacatccagcgccttgcagacggtatcggcgatggtggcaaagctgtagcgggtgtgcaggttcacgcctggcttgatctcactgccatacaccaggaacggcacatactcgcgggtgtggtcggtggtcttagtgtagctggggtcgcagccgtgatctgccgtgaccatcaggatgtcctcagggcgcatcttggccataaattggggcagccaatcgttgaactcggcggcagcggcagcataaccggctacatcgcggcggtggccgtacagcatgtcgaagtcgacgaggttgacgaaggccaggccctcaaagtcgcggtcggccagatccagcgtgacctgcaggccctcagtgtttccgctggtgcggatggtctcgccgatgcccttcccggcaaaaatgtcgtggatcttgcccacaccaatggtggacttgccggcagcctggatagcgtccagcatcgtatcacgcggcggcaccaggctgtagtcgtggcggcgcggggtgcgggtgaagttggcggagcaatcgcccacaaacgggcgggcgatgacgcggcctacgccgtatttgcccaccagcagctcacgggcctgggcacaaatttcatagagcttttcaacggggacgatggcctcgttggcggcaatctggaacacgctgtcggcggaggtgtagacgatcagcgcaccggttttcatgtgctcctcgccgtaatcgcggatgacctcagtgccggaataaggcttgttgcacagcacctgaaagccggtcttggcagtgaaagcgtccagcaggtctttcgggaagccgttcgggaaggtgggcagcgggtcggcactcagcagaccggcaatctcccagtggccgatggtggtatccttgccggcgctggcctcacggaggcgggcaaagctgccgataggctcggccacgggggtgccgcaggtcacaccgtccaggttgaacatgcccagcttggccagattgtcgcccttaaaattggggtggccggcaatggcgcccagggtgttggtgcctgcatcgccaaactgtggggcgtccggctcggcgccgacgccgaagctatcgagaacgatcaaaaaaacacgttttgccataggtttgtctcctgtctgtatcataaacattgtgtgcgttgaatacgtagaatatacctatttaagattataccctattttgggaggattgtaaacagaaagcccgtcctgtgcagcggaaacgtgagcaatatttgcacagtaaaacatgtgtaaagtggatttgcgtacttgtacaaaagcggaaatgtgtagtataatagcttcgattaatgttcagatttcttcaatggaggtcatgatatatgcgtaaaacaaaaattgtctgtacgatgggcccttctaccgaaaagccgggtattctgcgccagctgatggagaacggcatgaacgttgcccgtttcaacttttcccacggtgattacgaggagcacaaggggcgttttgacgccctgcgcgccctgagcaaagagctggacctgccagttgctgccatgctggataccaaaggccctgagatccgcctgggcactttcaagaacggtgtggagaagctggtcaccggccagaagttcaccctgacttcccgggaggtcgagggcaccaacgagatctgctctgtctcctacaaagagctgccccgcgacgttgccgctggcggccgtatcatgctggacgacggtctgatcgagctgggtatcgacgaagtgagcgacaccgacatcgtctgcaccgtcaagaacgatggcaccatcaagactaagaagggtgtcaacgtccccggtgtgcacctgtccatgccctacatgagcaaccgcgaccgcaacgatattctgttcggtatcgagcagggcttcgatctgatttctgccagcttcgtgcgcaacgcccaggacatcatggaaattcgccacctgctggacgagcacaacagcaacatccgcatcatcgccaagattgagaaccaggagggcatcgataacatcgacgagatcctgactgtggctgacggcatcatggttgcccgcggagatatgggcgttgagatcgactttgccgagatcccctccatccagaagaacctgatcgaccgtgccatgagcgccggtaagatctgcattaccgctacccagatgctggattccatgatcgtgaacccgcgccccacccgtgccgagatcaccgacgttgccaatgctatttatgacggcaccggcgcggtcatgctgtctggcgagaccgctgcaggcaagtatcccgtcgaggccctgaaggctatggccaccatcgccgaggctaccgagtccgactccaactttgattccctggttcaccacacccgcggtgagaacagccgcctgtccgtcagcgctgctgtaggccacgctgcctgcaccactgccaacgatattggggctaccgctattatcaccgcctccaagagcggcgagaccgcccgcctgctgagccgcttccgcccggatgctcagatcatcgcctgcgtgctggatgagaccactcgccgccagctgaacgtctaccgcggcgtgacccccttgctgatggactatgcccactctaccgacgagctgatcagcatgtcggttgaaaatgccaagggcgctggtttgatccaggacggcgatctggtcgttgtcaccgccggtgttccggttggtgtttccggtactaccaacatgattaaggtccacatggtcggtgacagcctgctggctggtgtcggtatcggcagccgcaacgctaagggcgaagtctgcgtctgccgcagcgcagccgaggctgccaagaagttcaagcccggtcagatcctggtcgtgcctttcaccaccaacgatgagctgccgttcatccgcgaggccgccggtgtcatcaccgaggaagccggttccaacagccactctgctatcgttggcctgaccttgaacaaggccgttatcgtgggcgctaccaacgctacccgcaccctgaaagacggtatggtcatctcgatggactgcatccgcggcactgtccagctgatggctaactaaggagcagatgatggaacgcattgcgagtttctgcgtggatcacaccaaattgcagccgggtatgtatctttcccgtcaggacggcgcaaacggtgagattttgacctgggatatccgcatgaagcagcccaataagggcagttatctttcccccgctgccgcccacacgctggaacacctgtttgcgacttatgcccgcaacagcaagtacagcagcggcgtggtctatgtcggcccgatgggctgcctgaccggcttttacctgctgacgaccggcctgaccccggccgaggccctggacctgacccgcagcgcttttgcctggatggctgagtacgagggcgagatccccggtgcttcggcagtggaatgtggcaactatctgatgatggaccccattgccgccaaagccgaggccgccgctatgctgccggtgctggaaaaactggacgctgaccagctgcattattgataactgagacataaaaaatcccgccgcacgatagctaggtgctcgtaaaatagttttcgagaaatgacacggcaactgcctgtcagggttggttacgagtacccggttgagttgggagagcatcaagccccatgcccgcaccgtcaaggtgttggcatggggctttttgtcaaagtcgtgagccaaggagtactccgaaagggaaacggctgtataggtgcatttcgggcaaatcgctgcgtatgtagggaggttggtacgtacgcagcaaaacggtcaagtttttccatattaggggtattctttcattagcgaatatggtatacttggcgtagcccggtaaatcggaagttgaggaggaagtaggtatgctaaacaacaaagggttcgacctttgggctgatggctatgacaaaactgtcggcatttctgatgaggaaaacacatacccttttgccggttataaaaaggtacttgggttcatttttcagaccataatgagagatgaaaatgccgttgtgttggatattggattcggaacaggcacattaacgacaaaactatacgagcgaggctgttccatttatgggcaggacttttcatcaagaatgattgcgttggcatctgagaaaatgccaaatgcgcagttatatcagggggacttttcaaaagggcttgccgaaccattgcggagctttcgttatgactatattgttgcgacatactctctgcatcatttagcggatgcgcaaaagcgcgactttctgttagacttgcgtaactacttaaaagaaaacggtaaaattataatcggcgatgttgcctttgaaacacgaaaggacttagaactgtgtaaattgagggcaggaaacacatgggataatgatgaaatctactttgtcgttgaggaactgagaaaagattttccggctctttcatttacgcaaatgtccgattgcgcgggagtcctgattttggactgacaaattcaaatttaccgtactcgttcccggcaggatttggggcaggcatgccccaacaagaagctgccccacaggggcagaaaattttaaagaattgaaaatttgtggccacgggacgagtcttgcccttatgaacaacagaaaacccagaactgcgcagctgattcagccaacagttctgggttttctgttatcaggtcaaaaaactgttttacggagcccctgcaatttcgtgcggcgggactttttgctttatgtaagggaaaatcaaatcagagcagcagtgatcaaagccatcttgtagacttcctcggcattgcagccacgggacaggtcattgatgggcgcgttcagaccttgcaggatggggccgtaagcctcaaagccgcccagacgctgggcaatcttgtagccgatgttgccggcgttgatgttggggaagatgaaggtattggcgtaaccggcaaccttggagccgggagccttcagctggccgacctcgggtgcaacggcggcgtcgaactgcagctcgccgtcgaccttcagctcgggatgtgcctcctggacgcgggcggtagcattgcgcatcttgtcgacggtctcgcccttgccggaacccttggtggagtaggacagcagagcaacgcggggatcaatgccgaagacctcagcggtgtgtgcggtctcaacagtggactcaacgatctcgtcctcagaaggatcgatgttgatggcgcagtcgcccatggcaatgctctcgtcgccgcgcatcaggatgaagcaggagctgacggacttgatgccgggcttgcacttgatcagctgcagagcgggacggacggtgtcagcggtggagtaagtagcgccgcccagcaggcagtcggccttgcccatcttgaccagcatggtgccgaagtagttgcccttggacagagcggcacggcactgctcgtcggtcatcttgcccttgcgcagctcgaccatcttggcgaccatagcgtcaaattcaggataagcggtaggatcgatgatctcggcaccagtgatgtcaaaattgtcttcagcggcggcctttttaacagcctcaggctcacccagcaggatgactttcagggtcttgcctgccagcagacggctggcggcggaaaggatgcgagcgtcggtgccctcggtaaagacgatggacttcggctcggcctgcagtttcttttcaaaattctcaaaaatggacatacaaacttcctccatattttagcgcagaacaaccactgcgcaacacttacacaataattatagcacccaaaacaggctttgcaaaggaaatgcgcgattactgcggcaagtgggcaaaatacgttcgccgttggataaaatgacaaaatacttcacaaagttaattatatatcaagccgcattgacgaaaaaatatcaaattcgacccgccaacagccagtaccctgccgccagctgtgccaccaaaatcagcggcatgccgaccacaaagtaccaatggtgggtcttatgatggaacaggtacatgcttaaaagcgcacccacactgccgccaacgagggctgccgcaaacagggtacgctccgggatgcgccacaggtgccgtctggcacggcgcttatcctctgccatcagaaacaatgacagtagattgatgatgaccagatacacaaacaaaattttcatgacaccattatatcataaatctcaaaaatatggtagaatacaaaataaaagtataaaagtggggacgcaacgatgaaacgtatttttgttaccggtgcaggcggctttgtgggcgcgcgtgcctgccgttttttgcagggaaactatgaggtgctgaccctgcccaagggctggatggccagctgcaccgaactgcagctgatgcagagtattgctgaggcgcagccggacgtgatcctgcacacagcggccatctctgataccggctacacggagcagcacccggaggaagcctaccgtgccaatgtggagctgccgctttggctggcgcgcgccgccgcgcagtgtggggcaaggctggtgggcttcagctctgaccaagtctacgccggcgtgcagcagcccggctcactgccggaaacgatggaactctcccctgccaacgtctatggccgtcagaaactggaaatggagcaacgcatgttggatgcctgcccggacacagtattgctgcgtgcaacctggatgtacgacctgcccagctatggactacccatccggggcaacctgccgctgaacctgataaaaacgacgatgtatggagaaaaactgcgcttctctaaccgtgactgccgtggcatcacctacgtgcggcaggcggtagaaaacctggtgcctgccgccgacctgcccggcggcgtatacaattacggcagcgaaaacagagaggatatggtgacgaccgctttagcctttgctgaggctttgcggctgccggatgtagataacctgatagaagcagtggactggcagcggaatctagcgatggattgcggaaaactgcgcggatatgggataaggtttgataccacgcaggagggcatttaccattgcttgaatgactacggcgttgcggatttataacctagtataaaagaatcgggtaaagtgtctgtcccccgcaggctgagcgacagcccgtaggactgtcgctcccggcactgcggcatcgccgccctgttcggctcttcatcagacttagccataaacgaaggccctcttgccgggacacggcaagggggcctttgtttatggagctgatgggagtcgaacccatgtccgaaaagaaattggttagagtatctccgggcgcagtatgtttattggatttcccttggtgcgggcgagcatacacgcactacaccttggtagcttcgttaatacctgacgggcggccaagctcaagcccgttcatgttcagtacctaatcgacgccctgaccctgcacggtactgatgcaggcaggacggtcgcgcctaattaggcagcgacggcaacagaataatcgttgtcagttaatttaagtttggcgcttttatcgtggtgcaccgccacggcccgctgctcacgcctctctccccccgtcgaaacctttacagccccgcatattcggtagggcaacgccccaccgggaaggttagcttgaaacagactttttgctgcctttaccgggatttcagcgcgcgctcaatatcacgcttggcatcgcgtgcggcagcagtggcacgcttgtcatacaattttttacccttgcacaagcccagctccagcttgacacgcccctttttaaagtagagcgaaagcggaaccagcgtgtaaccttgcagcttgatctgctgccccaggcggcggatctcgcttttatgggccagcaaacggcggggacggcgcggatctttgttaaagatgttgccgtggtcgtaggggctgatgtgcatgccctttacgatcaactcgccgtcgtcaatgtcggcccaggagtctttcaggttggctccgccggcacgcaggcttttgacctcggtgccgacaagctcgatgcctgtttccagggcttccaccacaaagtactcgtggcgggcctcacggttcagggcaatcacctttttgccggatttttcctcagccatgaagctcacctcttttctctctggcgggatttaaagtatagcgcgtctatgcaaaaaagtcaagcgcatcctgtcacaactcaccacggccctgcatagcgcggtacagggtggtctcgtcggcatattccaggctggaacctaccggcagaccgtaagccaggcgggtggtcttgatgcccatcggcttgatgagcttggccagatacatggcggtggcttcgccctccaccgtcgggctggtggccatgatgacttcctttacggtgtcattcaggcgggccaacagctctttgatacaaagctgctcggcaccgatgccgtccatgggcgagatcaggccgtgcagtacgtgatacaggccgttgtactcgtgggtgcgctcaatggatttgatgtcgcgcgggctttccaccacgcagatcacgctgcggtcgcgcttttgggaaaggcagatcttgcagatttcgcctgcggtatagtcctggcagatgcggcagcggtgcagatcctttttggcatgttcaatggcttgggccagttccatggcctgttcgttagacatgcccatgatctcgtaggccatgcgggtggcgcctttgcggccgatgccgggaaaccgggcaaactgatccaccagattttccagcggctctaaattctgcggcatagatacggcctcttagcccagaccgggaatgttcagcccgccggtcatcttggccatttcctcctcggactccttgtcaacggccgcaacagcgctgttgacggcggcggcaatgaggtcttccagcatttcgatatcctcggggtcaacggcctcgggcttgatcttgacagcggtgatctcgtgcttgccggtcatggtaacggtgaccatctcgccgctggcggtaccggtgtactctttggcctccagctcctcctgcttggcgcggatctcgtcctgcattttctggacctggcgcatcatggcgttgggatcggggcggccgtagcctttgggcagtcttgctttcatggatatatcctccaaatcttatttgtcttcaattttaatatcaacaccgagggcctgcatgcttttcagcgtttggtcgatggaaacagcaggcgtatcggaagcgttgtctttgagctcctcataggggccgatgttgcagcggatgtgggaaacacggtagatggattctttcagctttttgctgacctcgcggttgctgcggatgtaatcgcggaaagcatcgctgcactcaaacagcacgcggcggccatcgtagtaagcacgggtgttgcgcagaaaagagatcagcattgcgtcggtctcttccagatcagccagtacattgggccaatatatgaacggctccagcgggcccgcctctttgggcggctcccgtttgcgggctgcaggctgtgtagcagcaggtgcggcgggggcaggcgtaggctgcggaatcggcggcagctccggctgcaaaaattccgggtccggcggcagcggcgggtcgtccgtctggatgggtgggacggcaggctgctgtaccggcggggcaacagcggatgcaggtgccgacacgggagctgaagtgaacggctgcggcgctgcggctgccaccggctggctggcagccggtgcttgcatagtggcagttgccatgggctgcgtcaaagagaaaacagccagttccagctcaatgcgctggtcagtgccgcggctcattttttccagcgcggaaccaaaggcgttgatagcgcggatggcatctgcctgcgggaaatccttgcgctgcagataggcggcctcttcttcgggtgaggtgcctgtcagcagcgaggtgccgcccggcagggcacagagcatcaggttgcggtaatggcccgccagctccatgcaaaggcggcgcatgtccacgctttgctggcgcagggcggaaatcttttccagcgcggaaacggaatcccgggcggcgatggcatcgctgatctcgaacagatacccgcggtcggtcacaccggccatgcggcggaccaaagcctcgtcgaccttattgtccacgccggcgcaggtgtccagaatagatagcgcgtcacgcatggcaccatcggccaggcggccaatcagctgggcagcgttggggtcgaggtcgatcttctcctgttcggccacatagcgcagacgcccggcaatgtcgtcggccgtgatgcgcgcaaaatcataccgctggcagcggcttaagatcgtgaccgggactttctgtacctcggtggtggccaggatgaagatgacgtgctcgggcggctcctccatggttttcagcagggcgttgaaggcctgcgtggaaagcatgtggacctcgtcgatgatatacactttatagcggcagaccgagggcagataggcaacctcgtcgcgcagatcgcggatgtcatcaacaccgttgttggaggctgcgtccatctcgataatatccatgatggcaccggagtcgatgcccttacagacttcgcactggcagcatgggtccgggctggaatggtccagacagttgaccgctttggcaaaaatttttgcgcaggtagttttgcccgtgccgcgggtgccggtaaaaaggtaggcgtggccgatgcgcccggcggcgatctggttttgcaaagctgttacgatcggagcctggccgacgacatccgcaaaacgctgcggacgccacttgcggtacagtgcgcggtacatcaaagccacctccctgcaaaaacagtaaaaaggcgggcagagcacgcggctgcgctgcttggcgtacagatgcaggcttgccgcggcactgtgcaaacgctgcttaatgctgctcggttccccgcctgacatggttcacaggctgcccacgcacggggcctgcatctgtacgcgaaacagcgcaattcagccctgtccgcttttagtattgtacaatattttcaggataaatgcaaggggtattttattgtcccaaggccttagcccaaaagctgcttggca

SEQ ID NO: 7954 - DNA, 15033 bp, Unknown
  gut microbiota DNA sequence
ttggcgtccttgcagtagtaatcggcaccaatgtccttggcgtagctgggagtcagcaccgcgccgcctaccatgactttgcaatccagcttggcagcgtgcagggcctcgatggtggcctgcatgttgggcacggtggtggtcatcagggccgaaaggccgaccagcttggcaccggtctggcgcacggcttccaccacgcgctccggcggcacatcacgacccagatccagcacatcgtaaccgtagttttcgaggatgacgcgcacgatgtttttgccgatgtcgtgtacatcgcctttgacggtggcaatgacgatcttacccttgctgccctgggcctggccggaggcggcaatcttggccttgatagcctcgaatgcggcctgggcagccgtggcggcctgcagcagctgcggcagaaagacggtgcccttctcaaagccatcgcctacagcgtccagcgccggaatcagcgaggtgttgacgacatccagcggctcgcgcatcgtcagggcagcatcggcggcggcacgggcctctgtctttaagccgcggcgcacagcctcaaacagggcgtccccgcctgcggtattgatttgtgcatcggcagcggcgggcgcagacttactgacctggctcgtttggatctgtacatccgcgtaggcagccacgtagtcggtgctctgcgggtcctgggaggtcagcacgcggtaggcgcggacggcggccatcatctcgggggtgttggggttcatgatggcaaggtccagcccggccaccatggccatagtcaaaaacgtggtgttcaggtagccgcggcagggcaagccaaagctgatgttggaaacgcccagcacggtgcgcacgcccagctcctttttgcagcgggtcagggcttccagcgtctggacggctccctcctgctgggcgctggcggtaagggtcaggcagtcaatgtaaatatcctcgttggggatgccaacggcgttggcggccttgacgatgcgctgggcaatggcaaagcggccatcagctgtggcagggatgccgtgctcgtccagcgccagaccgacgacggcggcaccgtactttttgcacagcggcaggatcatatccagcgtgctctgctcgccgttgaccgagttgacgatgggtttgccgttatagatacgcagggcatgggagagggcgtccgggttggaggagtccaactgcaggggcagatcggtgacggcctgcaggtcgcggaccagctgctccagcgtggcaggctcatcgatgccgggcagaccggcgttgacgtccagcacctcggcaccggcctcggcctgggccactgcctgggcgcaggggtaggaactgtccccttcccgcatggcctgctgcagccgctttttgccggtggggttgatgcgctcacctaccacagtgatgccggtcacgtccacaaagcgcaccggcgtacacaggcagctgcggcgaatgggaatcttctgcgccggggtaagcgggttgaaggtctcttttaatttggcaatgtattccggcgtggtgccgcagcagccgcccaccattgagatgccggtggcggcgtattcacgcatttgttcggcaaagccgttggcgtccagattgtagctgccgtccgggttgggcaggcccgcattgggcttgacgaaaaccggcagcccggcaggaacactgcggcaaaggcgctgggcaaagggcagaatctcggcagggcctaacgagcagttgatgccgatggcatccgcccccagaccggcggcggtaacggcgtagctttccaccgtgcagccggtaaaagtgcggccgcggctctcaaaactcatggaagtgaacaccggcaggttacagttttctttagcggccaggatggcggctttcagctcgtacaggtcggtcatcgtctccagaaagacgaggtcggctccggcagcagcaccagcgcggatgacctgggcaaattcttcgtaggcatcctcaaaagcgagggtaccggcgggggccagcagttcgcccagggggccgatgtccagcgctaccagtgcgctggtctcctgcccggcacggcgggcacaagcgatggaagccgagacgacttcctcgacactatggccgcagccagccagctttttggcgttggcgccaaaggtgttggccagcaggatgtccgccccggcggccgtataatcgcggtggatggctgttaagacatccggcatttccagcgctgccagttccggcttttgaccgggctgcaggccgcgctgctgcagctgggtgcccatgccgccatccagaaagacaaagcggcggcggtcgaaaacttcttgaatctgcaaagatactcccccaaaacgtcttatttagcaaagcaggtggtgccctgtttgcggaagctgcaagtctcccgcaggtggcaggtggtgcagcctgccagggtgccggtcacggggtgatcggcaatgcctaaaatggcggtggtgcttttgcgcggcgccagtaagtgctggggcgtgatggccaggccgcagccgcgcacggtatctaccgccaggcaaagctcatcgttcagttccagtgggcaatccccgtagccgggggcgtagcggccggttaagtagagatgctcggcggcaaatttggcacgccattcagcttccagctcatcgcagatctgctccagcaaaaccgaggacagggcatccgcagcggcggccatggcaatgtcggtcagctccagccgccgcaacagcgaatccacctgggaacccagcgtggcggccatcagcagtacggcatcacagccttgcaggtggcgcgttaaatcggtgccgcagtccagttccggcggtggaaacaccgcccgcggcagccgccgcacagcggcccgcggcgtggcagccgccaggatcttttcctcggcacggtccagcagtgcggtggtggcatcatccggctgccagccggatgcacccatgtagcgcagcgccgtagcacgttttatggaagaaggcttggcccgctccattacagcaggtccttgatgccctcgtagaccttggcggccacattggcatcgttcatggcgtaaaggtgcacgccgtcggcaccgccctcgatcaggtcgcgcagttggttgacggcgtactcaatgccggcctcatagagagaatccgggtcatcctgaaaacgggagaccatgcgggtgaactccgagggcaggctggcggaggaaagagcgacggtgcgctcgatctggctgcgcttgacgatgggcataacaccagcagagaccggcagtgttaccccggcgcggcgggccaaattgaggaaacggtagaaatgcatgttatcaaagaacagctgggtcagcagatgctcggcaccgttggcctgcttgatgcgcaggttttccacgtcctgctgcagggtggcagcttctgggtgggcctcagggtagcaggcaccgtggaccgagaaaccgggcttcttccatttaataaaggcggtcaggtcgctggcgtgcttgaagtccgggctttcgggtcgggtcggggtgcggtcgccgcgcagggccagcacatcgcgcacaccggcctgctccagctcgtccaggatgcgggcggcactggtctggtcattgcccatgcagatcaggtgggccagggcgggcacgccgacctcgtgctggatataatcggccacttctacggtggaaacgccgccggcggaaccgcctgcgccaaaggtgacgctgataaaatccgggttcagggcgcgcatggcctgcagggtggctttcatcttgtccatctgggtggtctgcttcggcgggaagcactcgatggaaaagacgcagcgcttgttctggaatttttccgtgatcgtcatggtaggctcctttatattgtacatcttaggcggcggcatccagcgtgtcggcagatgccgcgctgagggtatcgttttgccaggtgaaagtgatggtacccatggtatcggtgcggtagatctcggccccggcgtcgatcaggcgctgcaaagcacgggcgtggggatggccgtagtcattgttcagcccgcagctgatagccacggcctgaggctgcacgacctgcaagagggcttcggtgctggaggtggacgacccatggtgtccggccttaaacaaagtggcatgcagggctttgccgtagcggtctacaagacgctgctcggcggcgctttcggcatcaccagtggagagataacgaaaattacccgcttcaaacagcgtgcacagcgaggcgttgttgacatgagcggaggaatcgtcggtgtcgtacagttcggactcgccgccctgcaaaactgtcagggtgccgctgcccagcgggtagacagtgccgtcttcggcggtgataacgtcggtcccctgctcagcggccaaatcaaacaatccgcgcggccaatcggcagtctcgccgctggcttgggcatcccagggtggtacaagtaattgcccgacggcaaaattgcgtaacacttcccgcgcaccgccggtatggtcggcgtggggatgagttaaaaccagataatccagcttggagatgccagccagctgcaaatcgcggacaaggtcgcctttggcatcggacggcccggtgtcgatcagacagtaggcaccgtcctggccaatcaaaacagcgtccccctgccccacatccaacacggtaacggtggtggacgtctgggccagcaggtcagcgtccggtgcatcaagggagaccccggcggcacggtatagatctgaccagccgctgcgggattcgataaaataagcggcaaccgccagcagcagaacggccggcagaagcaggatcctgcgccagggcggacggcgcttacgggcagctttctcaggcttcatcgtactgtccattcagcttgcgttcttcccactgggctttgctgaccagtacggtgcggggcttggcaccctcgtaggggccgatgatcttctcctgctccatctggtccatgatgcgggcggcgcgagcatagcctagcttgcagcggcgctgcagcaggctggtgctggcctgcccggcatcgatgacacattcaacggcctgctcaaacatcgggtcgagcgcaccgccggtatcgccgtcatcgtcgctgcccttcttgctgcctttctcggcaacggcgcggcgctccatctcggcaatcatttcctcgtcatactgggtggaggaagtggacttgataaagctcaataccgcgccgatctcctcgtcggtgacgaaggtgccctgcacacgcacgggcttggaagcaccgaccggcaggaacagcatgtcgccgttgcccagcagcttttcggcgcccgacgcatccagaatggtgcgggagtcgatctggctggaaaccgcaaaggcgatacggctggggatgttggccttgatcaggccggtaatgacgtccacgctgggacgctgagtagcaacgatcaggtggataccggcggcacgggctttctgcgcgatgcggcagatgtaatcttcgacctctttgccggcgaccatcatcaaatcggccaactcgtcgataacgatggcaatgtagggcagatgctccagcccggtctgggcggccagcttgttgtaggctttgatctcgcggacgttgttctcggcaaacagcttgtagcggcgttccatctcggcaacgctggcgccaagagccccggcggctttacggggctcggtgacgacgggcatcagcaaatgcgggatgccgttgtactcggccaattcaacgaccttggggtcgatgaggatgagcttgacatcctcggggctggaacggaacagaaagctgatgatgatggagttgacgcagacggacttaccactgccggtagaacctgcaatcagcagatggggcatcttgcacaggtcggcgacctgtgccgcaccggcaatatccttacccagggccatggtcagcgggctgcgcatgttgatgtaattctgggattcaaacaccgcgcggatgttgacggtagagcggattttattgggcacctcgatgccgacggcgggtttgccggggatgggggcctcaatacgcacaccggcggtggccaggttcaaggcaatgtcatcggccaaactggtgatgcggctgaccttaatgcccgcctggggctgcagttcataccgggtaacagacgggccgcggcagatgtccagcatggtggtcttgacgccgaagctgtccagcgtgttgaccaggatgtcggcattcttcttcatctcgcgggcggcaccggcttcgtcgtcggggcgggtcgcgttgaaaaggttcagggacggatagcagtacggctccacaggctcggcctgcatggcagctaggttcatggtgttggggtctgccttggcggcggacggcggtgagctgatgggggcagaagccgagttgccgacgctggtgctgacctgcagatgagcagcttcgccgcgctgaggcactacgaaagaactctcggtgccggtgggctgctggggctgcgctgagaccgcagcagcaacagatgaggcgggcacaacgggggcggcttgcggcacaggcgtggcgggctgggcattcagcacatccgagatgggacggccgctgttccaggcgttgctgacagcctcattgacggagaagctgccgccgatggtcgggatagccggggcagcgctggcggcgggggcgctatgcggttctttcgctggcgtgttgccagtgaaggcaccctcttccccatctacggggatgccaaaggaggcgtcatcttctaccggcaccagcggggtatcaaaggtcggctccggggtgagcggcacggaaaattccgattcctgcgccagatccagcgtggtctcggagctgacatcctgctcgccgtaatagggcgcgtggccgctgacagcgcggctgatgaggttatccagttcgtccccggcggcttcttcgggggcagcctcggcagggtcatccagcttcagctcaaactcgtctgcagcaggctggacagcgggctgcggatcggccgtggcagcgtgatagtgcgaagtatcagaaagatgggacagcgggtccatgccgaaggtgccgccggggccgatgttgacaggctccagcggatcgtgctcaatggcggctttggcggcagaagcggttgcctcggggccaaggtccacgtcaaaggaagcacggggctgcgactcggcagcaggcgtaccatagctggccggggtgtacccggctgcggcggcataggcagcgtaagtaggtgccggggtgtaattggggatgaccggcgcactggcggcaggctgcgaaggaacggcagactgtacgggctgagccggctggtttacaggcgcggcctgctgcaccaacggttgtacaggctgggcgggctgtaccgggatgcgcccggtgtcggcgatgacatcgtaggccgggtggtgcgggcgattatcctgcgcgggagcggtcaggttctcaatgggttcttcctcctgctcctgggcaaacagttgggtgtcgtaggcagtctcttcctcggcacggtcctggcgggcctgctgcaacttctggtactggttgttgacaaacaacaccacatcggcgggtgtgatggcaaagaagaacatcagccccagcaggaacaccagcagcatgatgacgttggatgccgggcggccaaacagtgccagcagcgtgccgccgaccggggcgccccagacgccgccttcccaaaagttggtctgcccgcgggcgaacaacattttaataatctgccaagggttggcatcgttcagcgatacgttggagaagatgaccggtacaccggcgcacagcacgctcatcagcgcgactttgcccgcaaacagggtgacgcggtagccggaggccagcaggtaggccaggtacagcaaaaacggcccgaccagataggtcatcacgccgaaaatgccaaacagtccaccgcgcagggtcttccacatgttttgaccgggcaccagcaccatggcaacacacagcaaacctaacccggccagcaggatgctgcgtgccaggttgggtgtttcagcgcggcgctgcgcacggcgggatgcctgcgctttgctgcgggacgaagaggactggcccgatttgccggacgaagcccgataagttgtagaagaccggcttgacgaggaacggcttttgcttttggaagaggatgaggaacggtttttgttgccggagcttttcccggaacgagactgcgccatgtttcttactaccccactattctacataggaattctatcttaaaccgggctgaaagtcagcccatgtgaacattctctattattctatcacgaatcgcgaggcttgtaaacgaaaaatccgcaggtgggttatcccctgcccttttggcagatagcacaaaaagctgtgttacctgccggattcgatttccttatataaatagcgcagtgcgtcgcccaggccgcccagttcatcgatcaggccttcctccacggcctggcggccgtccagcacggtgcccatgtccatcacaagctcaccggtgttgtgcatcagggctgtaaagcggcgggcagtgattttggaatggctggctacaaagccaacgatgcgctcctgcatctgctcaaagtagcgcagggtctggggtacgcccagcaccataccggaatggcgcacagggtgtaccgtcatggtggcggtgggtacgataaagctgcgccgggccgacaccgccaacgggataccgatggagtggccgccgcccagcaccagtgtggcactgggcttattcaccccggcgataagctcggccagggcgaggccagcttccacatcaccgcccacggtgtttaaaatgaccagcaggccttcgatctccgggtcctcctcaatatccaccagctgcgggatgacgtgctcatacttggtggttttctgggcatccggggccagggtgtggccctcgatggtaccgatgacggtcaggcagtggatggcgtggcggcccttggtggcgggtacggtgccgctgtcggtaataagatcatgctccagcctttggagcgcggcgctctcggttgggttgagttttggacgtgacttggtctttttcgaggtcggttccatagcgagtagccccctttctggtttagtatgcacggaacgcagggcggatatgcgaaagaaaaaagcgcaagatacatatgaatcagcgtaaaagcctgcaaaagacgataaaaacgaaaatattttgctctttcctgcacacgatggttagaaattacgaaaaaacttagataaaaaattgacaatttgaagcgcgcaatttataataagttataaatttagcaaaagggattctttccgggcgttcgcatcccggcattgtgaggtaagtatcatggcaattcaaagcaaggtatctcttcccgttatcaagcgtcttcccaagtattaccgctacctgacgaccctgtcggccgacggcaaggagaaaatctcctccagcgagctggcccacatgatgggcaccactgccagccaggtgcgccaggacttcaactgtttcggcggttttggccagcagggcatcggttataaggtggatgtgctgcgggcagagatcggcaaactgctgtttggcgacggcgaaaagctgcccaccatcctgatcggcgctggccgcctgggttctgcggtgtccagcttcatcagccgcgataccaacggatataagctgatcggcgtgttcgacatcaaccccgaactgtgcggcaaggagatgggcggagcaaccatctacccgctgagcgagctggaggccttctgcgccgagcatcaccccaccgtggcggtactttgcgtcccgcgccagagtgcgatggaactttccggtgagctggtggcccatggcatccagggcttctggaacttcagccactatgacctgtcagtcgagtatcccggcgttacggtggaaaacgtccatttgggcgacagcctgatgagcctgggctaccgcctgcgcaataaagactaagataaaggagcgggtaatggcaaagttatatttccgctacggtgccatgaacagcggcaagaccaccgccctgatgcaggtggcctacaactataaagagcgtggcatgcgggtgctgatcttgaaacctgctgtcgataccaagggccaggattccatcgtttcccgactgggcatcagttgtaaagtggataaacttgtcacgcctgagatggatgtggtggagcttgtcaagcaggactcggccgaacatggtgcccccgcctgcgtactgtgcgatgagagccagttctttacgccggaacaggctgagcagctgttcctggtcacggtggatcttggcatcccggtcatctgctacggcttgcgtgctgactttatgatgcgcggcttccctggctctacccgcctgctggaactggcccataccattgaggaactgaaaaccatctgtgcctgcggccgtaaggccatctgcaacggacgcaaggttaacggcgagtatgtgttcgagggtgcccaggtggccattgacacggtggatgatgtggagtatcagagtttgtgccctcagtgctggtaccgtgagtatcgcgcgtttttaaagcgccacaaaaaagactaatagaaaagcaagatgccgttccggcagctgaaaagcaccggaacggcaatttttgtgcggtatagtgctaaaaggctgtgattctgccttgaaatagagaaaaaatatttgaaatgtagcaagaattgtgctattctaaagaaaaccgtacaaaaaatatccgtaaagatgaggtgccggtatggcttccgaatatacctattccccacgcatggacttttttattgagcgcgtcgaccgcgctaccggctttgaaatgccctgcttccatatccaccacaaatacgagatctactatgagatcgagggcacgcgccgctattttatcgaggacgccgcttatatcgtcaatgccggcagcgtggtgctgatcggtgacaaccaaatccataagacggcctctgtgggcgacacgccgtccagccgtattgtgctgaatttcagcgccgagtatctgggcaagattgccgaaatcttcccggaggtggacttcttctcctttttgagcgaggagcataaccacctgctgtccaacatcacggtcaagcagcagaatcacatctactcgatgctgcagcaattgctggaactgcaggagcagaccagcgccgagggcgaggcggtgcgtaagatgctgctggctaccctgctgttggaactgaaggacctgtgcaaacagcagcaggcccagggcggcgaaagcggccgcgtcagcaaccatatcgtggagcagattcagacctatatcgccgagcattacgcggaaaaactgaccctgaccggcattgccagccagttttacatcagcccgtactacctgagccggctgtttaaaaagtccatcaacctgagcctgatcgagtatatcaacggcgtgcggatcaaggctgcgcaaaacctgattgaaaagaccaacgagagcatctcggacatctccgaaaagacaggctttttgacaacagcacacttccgccgtgtatttaaggacgccacgggactttcaccgcagcagtaccggcagtattataagcggttgagtaagtgatgattgagaacctaaactaaaaagacgcagtgcataccatggtttatttgcggtatgcactgtatttttatgtatggacttaaaatgataaaaaataaaaacctcgaacctgagttcgaggtttttattggtgcggatgaagggatttgaacccacactcttttaagggaactagaacctgaatctagcgcgtctgccagttccgccacatccgcatattctgttgtgcccgttgcctgggcgacgcatattattatagcggacacataccaaattgtcaagcgttttctgcaaaaaagtataactttctgtggactttttaaaaatatacgttgtatcaacaaataggactttgaagttttcatgcttgtccgtcattcgtgcacatcgatattctctacaaaaacattttttcaacattttttgtcgttcgttcggcaaaaaaagcacaaaaacaacgtagccacatcaaagctcctcttgttttccggtttttatccttgtataatgggtacattcgcggttctgctgtgcggcaggctgccgcgggcatggcacctgctgccatgaaaaaacaaaagagggaagaggatttcatgaattcattcacttcggcagttaaatcgattgccaaaaagtacaacgataccagcttgatcctgcgtatcgccatcggccttgtcatcggcgctgtgctggcgctgctctgcccgggtgccacctggctggaggaactcggcaatctgttcgtcggtgccttgaaaggcgttgcccctgtactggtcttcgtcattgtcaccagtgcactggcccaggggtcgtccaagctggaccgccgtttcggcacagtcgtgtggctttacatgctgaccacctttatcgccgccaccctgtcggtcatcactagcatgctgttcccacagaatctcgttctggccgaggccgccacagctgacgttatcccccagggtctgggtgacgtcctacacaccctgctggccaacatcgtgtccaacccgctcagtgccattatgaacggcaactacattggcatcctgatgtgggcctgcctgtttggtttggccatgaagagcatcgccacggacggcaccaaaaagttcttgtcagatacttcggacgccgtttcgcaaatcgtgcgctgggtcatcaacctggcaccgttcggcatcatgggcctggttttcaccaatgtggccagcaacggcctgtccatctttacgcagtatggccgcctattgctgttgctggtgggtaccatgctgctgatggctctggtcatcaacccgctgatcattttcatttatctgcactgcaacccgtatccactggttttccgctgcctgcgcgagtccggcctgacggctttcttcactcgcagctcagctgccaacatccccgtcaacatggccctgtgcgagaagctgggcctggataaggacgtctactccgtttctatcccgctgggcgctaccattaacatggacggcgccgccatcaccattaccattatgacgctggccgccgccaacacgctgggcatgcaggtttccgtgcctgccgctgtcctgctttccatcatgtctgctctgggcgcctgcggtgcttctggtgtggccggtggttcgctgttgttgattcctatggcttgctcgctgttcggcatctccaatgatattgccatgcaggtcgttggcgttggcttcatcatcggcgtcattcaggattccgtcgagacggccctgaactctgccggtgacgttgagtttgctgccactgctgagtattatcagtggcgcaagactggccgtccgctgccagattttctggttggtaaaaagtaagattcgctgaaaaccgcagggaaaagcccctgcggttttggtttgcagctttttttggaaaaaatcggatttttttctaaaaaagcgcttgacattccgatatgtgtccgctataataatatgcgtcgcccgggcaacgggcacaacagaatatgcggatgtggcggaactggcagacgcgctagattcaggttctagttcccttaaaagagtgtgggttcaaatcccttcatccgcaccaacaagaaagccccgaacttaagttcggggctttcttgttggctttgcggtgaagaggacttgaacagcacggccgtccacaggcagcaaacaaagccccagtggggctttgcttagtgcgcgggaaaatcccatatccgcatcaaagcttcatgcttcggcttagagccttttgtttttgttttccttgcttttaccgtgatatttgctataatgaaaggtaaatacatggaggtacaaaacttatgtggacatgttctttattaaagacaaacgctaagcaggcgctacgaggccgctactggcgatgtttctggatctgcctggtgctggggctcgtcggtgttggcggaagcagcgcctcaacgggcggttcccgctatacgatggacaccgtcacgggcagcgatacggcctatgaccgtgtggcaaactacctggacagcctttcgtatcagatgcttatgacgattctggtcgtcgctgtgctggccgcggtgatctccctgctgtggtcgatttttgtgactgctccgctggaggtcggccgtgaccgttactttatggagagccgccaggcactttcccctgctgctacggtgacaagcgtattccgcacgccgtacatgaacgtggtcaaggtacagttcttgaagaatctgaaaatttttgtaggcacgcttctttttgtggttcccggtatttattgggattattgctacgcgctggtcccctatctactggcagaaaacccctacatgacgaccacccgcgccatgcagttgagcaaagacattatggacggtgaaaagttccactactttgtgcttggcctttcgtttgccggctggattctgctttgtatgttcacgttgggcattggctatttcttcctggagccgtacaggcaggccaccgacgccgagttttacgccgctatgcgcagcaaggcattggcgcagggccttaccaccaccgaggaactgggcggctttgtacgccacgaatcctattgatgaaaaaaacagccgttccctgctgtgaactgcaccccatttgttagacagtatggtatactatctaataagtggggtgtttttctatgcca

SEQ ID NO: 7955 - DNA, 1612 bp, Unknown
  gut microbiota DNA sequence
gttaggaacgatgttctgagcaccagcacgagcgcggcgcaggtcgcccttacgctgcgggccgtccaggatcatctggtcgccggtgtaagcatgaacggtggtcatgatgccggagacgatggggaaggtcttgttcagggtgtcggccataggagccaggcagttggtggtgcaggaagcagcggagatgacctgatcctcagtggtcagggtcttctcattgacggagtagacgatggtcttcagatccttgccagcgggggcagagataacgaccttcttagcgccagcctggacgtgagccatagccttgtccttgctggtgtagaaaccggtgcactccagaacgacatcgatgcccagctcgccccaggggcaatccttagcatctttaatggcgtagatggtgatcttcttgccgtcgacgacgatgtagtcctcgccagcctcgacggtgtgcttgtgctcaccgatcttgcccaggaaagagccctgggcggtgtcatacttcagcaggtgggccagcatagcggggctggtcagatcgttgatagcgacaacttcgtagccgtcagcctcaaacatctgacggaaagccagacggccgatacggccaaaaccattgatagcaactttaacagccattgttaaatcctcccaagatttttgttgtacccggcagcccggtcacccgctctgccgtatgctactattgtaccctattcttgcgaaatctgcaagggggctgttattcatttaacaggattttttcaaaaaaatcatgattttttttgtctggaaccatttcccactcctccgccgggccgttttgcacagactaacagggacttggcaccacgagagggggagtgacaatgcagattttcgacgatccgcgccgcctgcgcctgtcgggcatggccgcagccggggcggatgtgcggccccagctgcggctgctgatgctggcggaggcccttgctgcaccgcccacgcaccgtgcgctggacctgagcgccgagacagccgtcctgtgtaccgccgccagcgaggccgtgcggcggcggccgggctggctgtacgtgatgccctcccctgccccgctatccgtggcactgccccgcaatttgtggcaggcggcggtgctgtgcgtgctgcggtgcgtgctgcccgccgggcgggccgtggtcacgctgcagccaggcgcaggggcggcggtggcggtgttccgcgcggtttccgcctccgggatgcccgccgacaccctgcccttgctgcgccgcgcagccgcgcttacaggcggtctctgcttggccactggttcccccgtgcacgggcgcagcgcggacgcagcccatcccccacattttgccgccgccctgcgcctgccgctggccccccacgctctcctgcgtgagccgcccactgccgaagatttactgtatgaccggtacagccctgtgcaggtattgttggatgggtttacggtatagcgaggatggatgtacgcacaacattttgcagattttataccgtacagaacaaaattgaccaaaagttgccattggcaatcacgaacgccgaattataaaacaaaaggcgggagagc

SEQ ID NO: 7956 - DNA, 2258 bp, Unknown
  gut microbiota DNA sequence
cagaaagtattgcgtcagcttttttgcaatctgttccatcggcatctccttgtcatctttcgcccttatcctaccgcaaaccaggctaaagtgccaagaatcctgcgcaagtgacagaaactcatgcgtgaacgcaagaattgcaggccacatcgggccattcaaagcagaattggaacgcaccgtcatgataatccatcgtgtaaaaggcgttgttgcggcgcagcagctctttggcacagggcagaccaaagccgtgcagatgcggttccaatttcgttgtggcaatacagtccttttcgatgtggaccggcaggctggtgttgataatcgagacatacagcttcgcatcgccgtccgcgtaggcttcgtcccgcaaaacgctgacctcaatgcggcgctttgcttcctccagctttaggcaggcttcgatggcgttgtccagcaggttgcccagcacgactgtgcagtcaatcagttcgatttgcaagggcgacaggtcgttgacttcaaactgaatatcgatatgctgcttctgagcggcatagcccttttggttcagcacggcgtcgatgaccgagttgtgggtgttgaccatcagggcacgctcagtctgctgctcctgcaaagcggcaagatagtcctgtgcctgttgcgtctcgcctccctgcagcatcccggaaagggccgcgatgtgatgccgaaaatcgtgcgtcattttgcgctgtgtggcgtaggcgctgctcaaggcatcaatgttggcacgctgggagcgcagctgctcgttaagcgttttttgctgttcctgcgcgaggttgtttttttctgtcaaatctatcaaaatcagaatcacagcattggttgccagcagaattccacttgaaaaaagtacaaatgcggctgctattttgccgttcatggataagtaatagcaaattgatataccaaccagagaaataagtggaaatccaatcgtcaggggtgcccatttgatgttggcggaacttgccaccatcggcttgtgaatctttttgattccagaagaaagtaagaatttgagactatatgttatagctgcgcttgcaagatagaacttcatattcgccacatattcatcataacgaatatgaagcaatgccagcagagaataaagaacgcaaaattccagcaaggtgaaaattgcatacgccaaaagaaccaccagtaggcgcatccagaactttcctaaataaaacagtgatgcaaaaacaaagtaaaccgtaataagtgcggcaaattttaaaagtgttatcggcgattcttccgaaatatgcgaaacgaaaatcgtagcgatataagacaatactccgcagagcagcgcccccactacaaagcgtaagcctcttgtttttctttcaagaaacgcatcgcaaaaaacggccacgcacagcacgtccaggcagctgaaagtgatccctaaccaataacccatttcttcgcgctcctccactgcgtatagattttccgcacggcgctggctgtgtgcgagctgaccggcagctcggttccgtcgcgcagatacagccgcgtgctttgcagatcgcggatgtgctccatattgaccaaaatacttttgtgtgtgcgcacaaagccgtggttttccaacaggtcggccaaatcggccatggtagcggtcgtgtacagcaggtcgcgttcggccccctgcaggtgcaggcataccttgcgggccgacatctcggcgtacaagatctgctgcggctgcagctccacatcctcaccatcgcaaaatatgcgaaccgtatcgcgggtcttgcggtatgcggtaagggcctgctgcacataacgctccagtttttgcggcatctcggctttcagcagatagcgaaacgcctgcacctcgtacccctgcaggctgtattcgatgtagttcgtcacaaaaatcagcagcatatcggggcgcagctcatgcaggcgacgggccagatcaacgccgttcagcgggcccatatcaatatccaaaaaagccagatcgtattttgccagcggcaaagcacgcaactgcgctgcatctgtggcgcaatccaccgtggagcgcggcatttgcggctttacgatggcctctatcttttccgccaactgaccggcaaaggctgcgtcgtcatcgcaaaccagtatgcgcatggaaaaattctccttttcggcatttttgcccggcgtgtgcttgcgggcatctgctgcaaacataatcttttgccccc

SEQ ID NO: 7957 - DNA, 1127 bp, Unknown
  gut microbiota DNA sequence
gtttggtatgtttgatatgggcaagcgcatctgtaaattgcgtagggacgcacacctgtcgcaaaagcagttgggcgagaaaattggcaaatcagcctcgaccatcggttcgtatgaaaacgatactgccgtgccgacgctggaaaacgcggcagcactggcggaagcgcttcatgtttcgttggattatctgctgtacggtgaaaagagccgcacccttccgctgcaaaagatgagcgagaaccgcgtgcagctgttgaccgatctggcgcaggagtttgcagcacctactagccacggtgcagctttcagtgaccgaaagctggatattctgcggcggctgtatcaggaattttatcgttaaaagcattggctgctcggcgtgtctgcctccggtgggggcagacacgcttttgcgttcacgcacgattttctgtcacttgcgcaggttttgtagatttcggggaaacactgtggtattttgggggcacagcaaaggttcccagcatcggcgcgcagatgctgaacatatccgccccgcagccaacccaatacaactcggataccacaaaccactacagttaaggaggatttccatgaaaaccaaaaagcgttttttcaccctgatgctggcgcttgcgttggccgtctgcatggcggttcctgcgtttgctagtaatgaggattcgaactttatgattccattgcaagcaactatacatggggcgccaatgaggtcagcgttcgcaaaaaggacaattcgaccagtgcctatgtcaactacaatatcccgaccagccccaatcggattgttgtccgtattgacggcgcatccggcagcgctggtccttggtatgactgtaccagcgtgatttatggtacctcaacatctcggcgcgttgcggcggtaacctttgggcagaagggttatgtccgtcaggatgtgtatgaacggttcggctctaatgcctgggcccgtatcatggcgcgtagtgcggatgggagttctggcagggccaacggcaggtggagccccgacagtgtttgggaaagtggttgcatcgaatttaataactaatcactttttctatgtcccctgccgagaagccatataacggcaccactcg

SEQ ID NO: 7958 - DNA, 986 bp, Unknown
  gut microbiota DNA sequence
caagcaacagaaaacgaggggctgttgcacttttcctctgtgcaacagctccttttgttttcgttatccgttagaggcagtcggctcttccagaatgcgccagccgtccatcaaattcgcattatccataataaaagtgtgagccgtatcctgcccccaggaattgtcgtatttcagcatcaggtaatcgctcaactcagttcgatttttgaattttaataaacgatatggctcctgaaaagcgaccttttccacgaaatatacggcatctgatgtgggaagcataacgccgacatggccaatcataagggaattgtctgtttcagaaaactgatcgtgtagaacaacggagataagacgaattttatcatcgtctacaaaggatagaccgcgccttttccattcctgctgaattgtttttagatgagtgggaatgtcggtcgtgttggtagttttaacgggagcaaacagcacatcgaatttctgccttttgtcaccgcaaagggcctcagggtcagtatccagcgtttcatagtccataaataaggtgtcctcggctgcatcgaagtctgcctcgccagtgacggtgatgaaatcaccgaaaagtccacaggcggtgattcgacagttccagccggggaaggtgccatatttttccgcccatacatcctgcatagaatacggatcatatttcaaatctagaggctttgcggtttcaaatcctgtggtgagccatgctggatctacagcgctattgaatttttgaacatgttcaaagaaggtttgtatccgaaggtcagatacgccggcgttttgcaaaagatcggaaagaagattctgcgtatccgcatctgctaagttggaatattcaatcggctgaaggactggaagagaagggaggttactgcatcctgccagaaatgcaccgcaaaaaagtgcagcggtgcagacaaaaaaggtttggaatttcaaaaataatcacctcg

SEQ ID NO: 7959 - DNA, 13797 bp, Unknown
  gut microbiota DNA sequence
gaactgaacctcgttgacaccctcgtacttgttggggcggaacagcaggtagatcgtgaaggcgataatagcgacagcaacgatggtgaagaagttgaagccaacctcaccggtgatcaggccgccgatctggtagacaaccagagaagcgcagtaggcaaacaggcacatatagccgatggcgatggccgtccacttgccgttgttcatctcgcgcttgatggcgcccatagcggcaaagcagggggcgcacagcaggttgaagatcatgaagctgtaagcggagatcgcggtgaagctggcagcaacctcaggccagatctcatcgccgttgtcagacagctcgtcagcatagtgatacagaacaccgaaggtaccgacaacattctccttggcaatcaggccggagatggacgcgacagttgcacgccagttgccgaagccctgcgggataaagatccaagagatcgtgctggccacgatagccaaaatggagttgtcctgatcctcgaccatcgtgaaggcaccattctcgaagccgaagccctgcaggaaccacaggatgatggtggcagccagaatgacggtgccggcacgcttgatgaaggaccagccgcgctcccaggtggcgcgcaggacgttgccccaggcgggcacatggtaagaaggcagctccataacgaagggagcgggatcaccggcgaacaacttggtctttttcaggatgatgccggagatgatgatggctgcaaagccgatgaagtaagcagaggtggcgacccagctgttgccgccgaacagagcacctgcgatcaggccgatgatgggcatcttggcaccgcagggaatgaagcaggtggtcatgatggtcatacggcggtcacgctcgttctcgatggtacgggaagccataacaccgggaacgccgcagccggtaccaaccagcatggggatgaagctcttgccggacaggccgaagcggcggaagatacggtccatgatgaacgcaacacgggccatgtaaccgacatcctcgaggatggacagcaggaagaacaggaccagcatttggggaacgaagcccagaaccgcgccgacaccggcaacgatgccgtccatgatcaggccgtacagccagccagcaacaccgatgccctccaggaagccgcccagagcgttggggacgatctcgccgaacagaacatcgttggtccaatcggtagcgaaggtgccgataccgatgccgccgtcagcaacagaggtacccatggcgatggcgtacatcagccacatgatggctgcgaagatgggcagggccaggatacggttggtaacgagctggtcgatcttatcggaaacggtcaggtgctcggcgcgggccttcttcttgacggccttgtcgacaacaccgttgatgtaagcgtaacgctggttggtgatgatgctctcggcatcgtcatccatctcgttttcgcagtcggtgacatgctggccgatgtggtccagcacatccttgccaaggttcagctcagcctcaaccttgtcgtcgcgctcgaacagcttaacggcgtaccaacgcaggaagcggtcatcgaccttgccctggatggattcctcgatatgagcgatggcatgctcaacgctgccggtaaagacatggggcagctcaacacccttggcctctttggcggcggcgatggcagcctcggcagcctgctggcaaccctcgcccttcagggcagaaatctcaacagccttacagcccagttccttggagagcttgttcaggtcgatcttgtcgccgttcttgcgaaccaggtcgatcatgttgactgccatgacaacggggatgcccagctcgatcagctgggtggtcaggtagaggttacgctcgatgttggtaccatcgatgatgttcaggatggcatcgggcttctcgttgacgaggtagccgcgggcgacaacttcctccagcgtgtagggagacagagagtagataccgggcaagtcctgaatcacgacatcatcgtggcccttgagtttaccctctttcttttccaccgtaacgccgggccagttaccgacgtactggttagagccggtcaggttattgaacagggtggttttaccgcagttcgggttgccggccaatgcaattttaattgccattcatatacccctttctatgttttcccgcttttgggcggggaaagcagccattttactcgacctcgaccatctcggcgtcagccttacgaacgctcagctcgtagttgcggacggtcagctccatggggtcgcccagaggtgcgaccttacggacgtagacctggacacccttggtcaggcccatgtccatgatgcggcgcttgacagggccttcgccgtgcaggcgcttgaccgtagcagtctcgccgaccttaacgtctttaagagttttcatatacgattcctcctcaatactgtaaatctagcctccgtttgcgcggggacggatttccgaattttaggcgaccatgatgcgcatggccatggtcttatccagcgcgatgcgggcttccttgacctggaggatcaggttgccgctgatctcgttgacgaccgtaatggtctcgccaacaacaaagcccaactctgccaggtgcagacgaacttcatccttaccggtgatcttctggatggtgacggtctcacctgcttttgccattgtcaaaggcatagcataaacacccctttatatgctgtttggcccgcccattagcatatgctaacaggtcaagcaaaagtgggcggttagaacgttctaaccgcttgcgatagcagtttagcataactaacacctaaaagtcaagcagttagagaaaattaacttattttcgtgcaggacgctagttttatacaactaaccttgtgcaattttataaaagtttacaacatgttcataagattggccggatttgacaaaacaggataaacttgaggatgtgtatatagattaaggataaggcatacggtagcagagatggccccccttgaggggagcctttaaagtagtacttgccaaattggtcgttatcctgtataattaaaaagttatcgtttatagaaagcaacactacaacgaggtttattatgctgactaaatatctgactgtatttttcgtctcgatggtgccgctgatcgagctgcgcggcgcgatccccatcggcgtggggctgggcctgccgctgtggcaggtgtacatcatctccatcatcggcaacatgctcccggtgccgttcatcttctttctggcccgcagggtgctggagtggggcgcggataagccggtcatcggcaagttcttcaccttctgcctggagaagggccacaagggcggcgagaagctgaaggccaaggccggccgcggcctgccctgggcgctgctgctgttcgtgggtatccccctgccgggcaccggtgcctggaccggcacactggccgccagcctgctggacatggatttcaaatccagcgtgcgtgcctgcatgggcggcgtgctgctggccgggtgcatcatgggtgtggtcagtttgctgggcttctcggcctttggtgcgattgccgggtaattttcaaaataaaaggatgcaaggagtaagttccttgcatcctttttttatcgttattgcgggcccctaaagcctcccttgtgtaaagggtgactccccacagtgtggggagatgtcgcgaagcgacagaggggcccgacgcgtaagcgggtggcacggcggtagccgtgacggagggattgtgattttacgggggtaggtcgatgtatgggtaagttcacaatcccccaccgcttcgcggagccccctttacacaagggggccttttaaggggtacttattctaatcccatcacttcatctaccggcagggcggctgttacaccgtgggcgggggtgttcaggccgcaggcggctgtgactgcctgcatgacggcggatttctgctcctgcgggacgacgatcataacaaaatcctgctcctcccgaatggaaatgcccaaaaagctgctggcctcctcggtactgcagcggctgcctttcagcactgtgccgccgcgggcccctgctttgcgggcagcggccacagcttcgtcgccgtggcccgccttgacggaaacccacagcagggcgtagggatggtccttcatggtgtgttcctccttttcagcagtggggccggcacagtccgccggggcggtcaactgcaaaatgctgttctgtacgccggtcagcggcagggtcacggcgatgcctgcgccgcgcttgtggtaagaaagcgccttgttgatggccccgaacaccgccgggacgttggcgcggggcagcaggcccgccgtcagcacgcgggtggtgccgcccaggccgatggcatccagcagctcagacggggctgtgcccttggcgcgggcttcaaaacaaagggggattccgtttttttgcagcacttccaccacgcggtgctcatcctcggcctgcgtgaccgaaaggagcagccgcaggcagggggtgcgtttttgcgttgcagccatatcagtattcctccagttccaccacggtgtcgtccaaaatgttgggggcggtctgcgcctgggtgcggcgggcatacagcaggcccatgatttggatggcgatgagcggagccagggcgaccagcgccacgataccgaaggcatcggtgacgacgttgccgcccaccgcgccgcatgcgcccatggccagcggcagcaggaaagtggatgtcatcgggccgctggcgacgccgccggagtcaaacgcgatgcccacaaacaccggcgggacaaagcggctcatgataagcgccgccgcgtagccggggatgagcacccagtagatgctaagtccggtcagcacgcgcagcatggccagcgccaccgccacggccacaccggcctgcagggcgcggttcatggcatggcgggagatggtgccacctgtgatctcctcgacctgttcgttgagcacctgcaccgctggctcggccttgacgatgtagtagccgatgagcatgccgataggaagcagcgccccgcgcagggggccgctgcccaggccgctgcccagcagattgcctacgggcgcgaacccgacgttgacaccggtaaggaacaaaatcagcccgataatggtatacacaaaacccagcaccatacgcaccaactggcgcggctggaagctgcgggtcagcgcctggaacagcacaaacacgcccacgatgggcagcgtgctttgcagcacctcggccgtataatggggcaggtcctgcaaaaaggccagtgccacatcctgggtagtgatgaccggggccagctgcacggcgtcataaatcgtctccgtggggtggtagaagatgcccagcagcatgaccatcaggattgggccaacactgcacagagcgatgaggccgaagctgtcgttggcgctgtccttatcgctgcgggcagctgagaagccgatgcccagcgccatgataaagggcaccgtcatggggccggtggtgacgccgccggcatcaaaggcgacggccaaaaattcattggggacaaaaagggacaccacgaacagcagcaaatacagccccagcagcattttggacagcggcacgcggtacaaaatgcgcagcaccgccacggcggtgaacacgccgacgcccgccgccaccgtccagatgagcacggcgttggggatggccgccacctggttggccagcacctgcagatcgggttctgagatcgtgatgatagcgcccatggcaaagcagatgacaacggccagccatgtttttttctggcgcacgatgctgccgcctatcccctggcccagcggggtcatggagatctcggcacccagctggaagaagcccatgcccacgatgagcagcaccgcccccgttaaaaacagggccagcgtacccacctccatgggcaccagcgtgacgctgagcatcagcacgatgaccgtgatgggcagcacgctggtcagggcttcgcgggtcttttctttgagtttttcgttcattcggcctccttttgcatgtaagggggtcaggcgggcatcagcggttttccagcggcacgtagtcccgcggggtcatgatgctctggtaggcggggcggatgatcttatccacgttgaccagctcctccatgcggtgggcggaccagcccacgatgcgcgccacggcgaagatgggggtgtacagctccacggggatacccagcatgtcatagacgaagccggagtagaagtcgacgttggtagacacgcctttataaatatggcgtttttctgcgatgactttgggggccagccgctcgatggtgttgtaatattcaaaatcgcgggcgcggcccttggcatcggccagctggtgcacaaagtttttgaacaccacggcgcgggggtcgctgagggagtagaccgcgtggcccatgccgtagatcaggcccttctggtcgaaggcctggcggtcgacgatgcgggacaggtagtcgtgcatggcggcttcgtcggtggggtcggtgacgtgggcgcggatgtcgtccatcatctgcatgaccttgatgttggcaccgccgtgcttgggacctttcaggctggaaagcgccgccgcaatgaccgagtaggtatccgacccggaggagctgaccacgcgggtggtgaaggtggagttgttgccgccgccatgctccatatgcagcagcagggcgatgtccagcacgtgggcttccagctcggtgtatttctggtcggggcggagcatctgcagcaggttttcggcggtggaaagctccggtttggggcggtggatgtacatgctgccgccacactcataataatggtaggcgtggtagccatagacggccagcatggggaagacgctgatgagcttgatgcactgctccagctgggtctgcaggtcggtcttgccgatgtcgtcatcgtagctggcgagggtgagcacactgcgggtcagcgagttcatcaggtcgtggctgggggctttcatgatgacgtcccgcacaaagttggtgggcaggtcgcggcatttgaccaggctgtccttgaaagcatccagctgggcctcgttgggcaggtcaccgataaggagcaggtaggcggcttcctcaaaggcatagcgcttgccgcgcaggccccggatgaggtcatacacgttgtagccgcggtaccagagttttccgtcgcagggcacttttttaccgtccttctcctcaaaggcatcaatgcgggagatgttggtaatgcctgccagcacgcctttgccgtcctggtcgcgcaggccgcgcttgatgttgtattggtcaaaaagggacgggtcgatgcggttgttggtgacacattcctcggtaaaaacggcagcttcttttgcaatagcagcgtaatcgctcatgggtatgacctccttttcttctgttcccctgtttcgcggacggttcggcatcttgtgcgcgtttcgcccagattctttcccggatatgaactttttttatacgttgcgtacattttaaattatacagtacggctgtatggcctgtcaaacaaagtttttatgaacaagctgtataaaacagcaaaaatgtcccacaatgcaagatttgcattgcaggacatttttgcaagattagaagattatatggaaagaaaaaagaaggaggaaatgtttatagaaaacgcggggtagggagagcctccctttgcacaagggggcctttggggttgcggcacttttactgcgcactattccccaaagtgacgttgagggtcaggaccttgccgtcgcgctcgacctgcagggtgacggtgtcgcccacctgcttgtcggccaggtagctcttgacggtggaggtgctgctgacagccgtgtcatcgatggcgatgatgcggtcgccgcgttgcacaccggcagcctcggcgccgccgcccttggtgacatcagccacgtagacgcccaaagcggacacaccgtactgctgtgcggtggaggaatcctgaacatccaggatgctgacgcccagcaccgggcgggccacagcgccgttttcgatcaactgctgggcaatgtccatagcggtgttgatggggatggcaaagccgatgccctcggcctcgctgtagctgctcttggcgttgaccacgccgatcagctcaccgtttgcgttgaacagaccgccgccggagttgcccgggctgatggatgtatcggtctggatcaaggtcatattgttatcttccacggtgacctgacggttcagggcgctgacgatgccctgggtaacggtgttggacaaggtgcccagcgggttgcccacagccacggtggtctcaccgacagccagcttatcgctgtcgccgatgactgccggggtcaggccggtggcatcgatcttcagcacggcaatatcggaagtagagtcgacgccgacaacggtggcgtcatagctctggtcgctgccgttgagctggaccttcacgctggtagcgccgctgaccacatgggcgcaggtgaggatgtagccatcctggctgacgatgatgccggaaccggcaccgctctgcacatagtagccgccaaaccaggtctggctgctgctcatctgctcggtggtgatggccaccacactgggggaggccacagcagcgatctgctgcatggtcatagaggtgccatcggtgctgccggtgttagaggcatcggtgctggtgtcacgctggacttcctgcacgaccacctggttgccggtcaggccggcacggctggccaccacggcaccgccgatgccgccgccgaagcccagggccaccacgccgacaccggcgaggacgcgcagcaggaccttgttatgctttttttctttcttggggggctgctgcggggcactggcgtagctgtagccattgtagccgccgttgctgccgccattgccgccgctgaaactgctggtgtagccgttgttctggccgtaggcgttgttcggctggttgtaggtgttggcaccggtgttattggtgctgctgcctgccgagtaatcggtgcgggcggtgttggcggtgttcatgccgctgctgcccacgttggggtagccgccctgctcgggctggctgggctgatcgggccgggttgcagaagtctggttggcttcgttccggggctggtcgttgttctggccctgattggggtcgggcgtactgccgccctggccgttattgtaaagaccggagtaatcgtattcgttgctcatactggtccatcctttcgcgtgagatttgggaagcgtcggggcaatgcccctggggctttcgttccctatttgctttctatgcctatagtataccggccaattgtgaaataggtttctcggccgggtgaaaagaatgtgaaaatgctcccatttcggcgcttgacaggcggtgccggggcctgtatgctggatgtagtttgtaaaaggaagtgcctgctatgaaaatcacccacgaagccgggaaatatgtattatacaaagaaaagaccgtcatcggcacggctgcgctggaggatgggcgactgtgggtggagatcgacccggcctggcggcagcgggggtacggcagctatctggtcaaggagatcttgcagcaaaacggcgggtatgacgtcaaacgcgagacccgctttaccgccggccctgccgctgacgaagccgccggggccttattgaaaaagttcggctttctgccccagggcggcgagatggtccgccgccgggtgccggatctttcggcggtgcagctttgccatgaatttttgacagcccacctccagccgggcggactgtatgtggacgccacctgcggcaacggccacgacaccgagtttttgtgccgtctggcaggacccacgggcagggtgctggcgctggatattcagcctgccgccgtggaaaacaccaacacacggctgggcgccgccgggctgggggccatcgggcaggcattggtacacgaccatgcacgtttggccgaactggtcgcccccggcacggcggattgcgtgctgttcaattttggctggctgcccggcgccgaccacgaggtgcactccaccgccgatggcagccttcccgccctgcaggccgcgctggatgccctgaaaccgcgcggtgtgctggcggcggtgctgtacagcggacaggtcatcggtgacagtgaaaagcaggcggcgctgggatttttccgcgccctgccgctgacaaaatacaccgtgctggtctgtgagtttgccaactgggccagcaccgctcccctgccctgcttcgtgataaaaaagtaacgcttgcccccgccgcggcggcatggtatgcttgtagtatcgaacttttccgcctatgggcggggcatagaaagaggctgccttttgcagaaagagacctttatcaagcaatatgcggcgggactgaacccccaacagctggccgccgtgcaggccgtgcatgggccggtgctgctgctggccgtgccgggcagcggcaaaaccaccgtgctggtgacccgtttgggctacatggtgctgtgttgcgatgtgcccccggcgcagatcttaacgatgacctacacggtggccgccacccacgagatgcgcggccgctttgccgcccgttttggggcggagctggccgggcagatgaccttccgcaccattaacgggctttcggcggtgattttgcagtattacagccgggtctacggccgccgccagcctgaactgctgaccaacgagggcgacatcacccggatgctgaccgacatctggcagcaggtgaaccgggagtttcccaccgaaagcacgctgaaagagctgcgcacggccatcacctacattaaaaatatggcgctggccgatgaggaaattgaagggttggaaacggatttagccaacctgccggagctgtaccgccgctaccaggccgcgctgaaacgggccgggcagatggactacgacgaccagatggtgtttgcgctgcaaattctgcgggccgcgccgccggtgctggcgtatttccagcagcggtataaatatttttgcgtggatgaatcgcaggacacctccaaaattcagcacgaaattatacggctgctggccgggcgcagtctgaacctgtttatggtaggcgacgaggatcagagcatctacggcttccgcgccgcctacccccaggcgctgatggactttgagcaggtctaccccggcgcgcaggtgctgctgatggaggaaaactaccgctccagtgaggagatcgtggccgccgccaacgcctttgtggcccgcagccgctaccgccgccccaaaaccctgcgggcgacccagggggcgcagtgccccattgagatacggcacatcacccggcgcgaggagcagatcgactggctgtttgaggaagcccggcgcggcggcggggagacggcggtgctgttccgcaacaacgagagtgcgctgccgctggtggacctgtgcgagcggcggggtgtgccctaccgttttaaaaaggccgacctgacgttttttacccacaaaattgtgctggatgccgtggattttttgcgctttgcctacgagccggccaacggtgagcggtttttgcggctgtactacaagtttgggctggcgctctcccgccagagggcgctggcagcctgcggggccagtgcccgcaccggacggccgattttggaggagctgatccgtgaccccgagacaaagactcggatgcgggaatcgctgggggatatttacgcggcgtttaagcgcatcccgcagctgaacgccgccgatgcgctggacgccgtgcgccacagctgcggttacggcgcgtacctgaaccagaagggcatggacaccggcaaactggctattttagaaatgctggccgagcaggagcccaacgccctgcgcctgttggaccggctggaagagctgcggatgctgattgccgcgaaggccgatgtaaacagcgatgttccgtttgttttatcgacgatccattccagcaagggtctggagtatgaccgggtggtgctgctggatgcctttgacggcgtgctgcctgccaagccggagatctgctgccgcacccccgaggatacccgccaatacgaggaggaccgccgcctgttttacgtggcaatgacccgtgcgcggcacaagctggtgttgttcgattgcaagacgatgccctcggtttttgtgcaggaagtaatttttaatttgcccgagagccgtgccgaacgggagctggccaaggccgaaaccaaccgggtgttagggcggaataagcctgcggctgccgggcctgcgttgccgccggtgaatgcagcggctgtgacccgcgtaggggccgccgtgcagcatgcggtgttcgggcgaggggtcgtaaccgaatttgacggacggtttgttactgtggagttctcggggatgcgggtcaagaaattagatgctgcgttggtggcgcaaaagcatttgttgtgggatttgtgattgcggctgatggttgtcacccccatgcggtgacaaccgtatataacagcatcctgctgtaaggttcttctttttttgtgaccaaaagggaagcgaaaaagtctcgctgctgcgaggcagcacgaaaggtaaaaacacatatgaaaaagatattactcctcgccactggcggcaccatcgccagcaaacccaccgccgccggcggcctggcgccagccattacatcggaagaactcctttctttcgtgccggagctggccaaactctgcgagatcgacgcggtgcagctgttcagtttggactctaccaacgtaggcccggaacaatggcagcagctggtccatgccatccgccaaaactacgatgcctacgatggtttcgtcattgcccacggcaccgacacgatggcctacaccgccgccgcgctgagctacatgatccagaacagcgccaagccggtggtgctgaccggcagccaaaaatccatctacaaccgcgatacggacgcccgcaacaacctgtatcgcacctttttgtatgccagcagcgatttttcctggggcgtgcagctggtatttgacaacaaggtcatcctgggcacccgcgcccgcaagacccgcaccaaaagcttcaacgccttttccagcatcgactaccccgagaccgccgtgttccgggatatgcggctcatcccctttctgcgccgccccgacccgatgccgcccgtgcagttttacgagcagctggaccccgccgtcttcgtactgcggctggtgcccggcatgcgggcggacatcatcccgctgctggcacctcactaccgggcactggtggtggaaagcttcggcgtaggcggtctgcccggcggcgagcatggcgaaatgtacgcccgcctgcaggattggtgcaccagcggccgcctggctgtgtttaccacccaggtcccccacgaggggtgcgacctggcggtgtatgaggtgggccgctcggtgaaagagctgcccggcgtgctggaagccaaggacatgacccccgaggccgtggccgtaaaactgatgtgggcgctgggccagaccaccgaccgcgccgaggccatgcggctgtttaccacgccggtcgagtgggacattgtataaaacaactaaggcaacaccgcacaattcccgcctgacggcttaagcaccgctccggcgg

SEQ ID NO: 7960 - DNA, 258 bp, Unknown
  gut microbiota DNA sequence
cgctcgttgcgggacttaacccaacatctcacgacacgagctgacgacaaccatgcaccacctgtctctgcgtcccgaaggaaacacatatttctatgtgcgtcgcaggatgtcaagacttggtaaggttcttcgcgttgcgtcgaattaaaccacatactccactgcttgtgcgggcccccgtcaattcctttgagtttcaaccttgcggtcgtactccccaggtggattacttattgtgttaactgcggcactgaa

SEQ ID NO: 7961 - DNA, 8290 bp, Unknown
  gut microbiota DNA sequence
tttcagccagatggttgatgggctgcaccaggcggcgggtcagccaccaggccagcaccgccgtggccagcaggatgaccaccaccgcgccgcagagcagcggcagggtgtcggcgctcagaccccagatattggccacgtcctcgcccacacgcagcacttgggtgccttccggggtgacgatgcggcgggcgtagtagtgggtctccttctgcatggtctggctttcgcgggtcgcgctggcgctgccgtcggccatagcagcgatgaactccgggcggtcggcatggctgggaaggtcgggggcatccacggcgtagaccttgccgtccttgtcatagaccacgcccgcggcggcctcgctgtcatacagcacagtgccgccgccatcaattaagctaaagcgcagggaggtgtcgctctcgggcagcaggttggccagggtcacggcatcatgggtgggctgggctttgtatccggcggccacgctgtcgcagatctggctcaggtacttatccacccgcacggtgtagctgcgctggaacagcacggtggcgattgccagcgtaaccatcatgcacagcaggcccacgatgaccagcccgcggcggtagcggcgggtcatgctcagggggcgcttttctttttgctgttcgtcactcatcggtgccctccgtgctcagcttgtagcccaccttgcgcacggtgcggatggcctcgcccgcagcgcccagcttttggcgcagggtgcgcacgtgcatatcgatggtgcgggattccagcaggtcatcggtgtcccagacttctttcatgatgcgctcgcgggccaacacctgatcgggatgctccaaaaacagatgcagcagcgcgtattccttaaaggtgagctccacaggcacgccgtcggccttgacggtgcgggctacatcgtcgatgacgatgccgccgaactgcagcgtcttgggcgcaggggccggggcggctgccgcggagcggcgcagcacggccttgacccgggaaataaactccataatgccgaagggcttgcagaggtaatcgtccgcgccgtggtccagccccttgacgacgtcgatctcgctggttttggcggtgaccatgatgaccggcagtgtctgggtggcagggtcgtcccgcagcttggacaagatctggtagccgtcctcatcgggcagcatcacgtccaggatgaccagttccggccgggcctggtgcatggcggcccaaaagctggcggcgtcctcacagccggcggcctcgtagccgttggtgtgcagggcatactgttccagttcgcggatgctggcgtcatcctccacaatgtagatcatataagttcccctctcttacaaaaacaggggccgggccatgcgcccagcccctttcggttatgcgtcttcttccgcgttgcagggggccgaaacaggctgcatctcggcgtaagtctccggcgggaaggtatagcggccgcggtatttctcgtaccgctgctcaaatttcacgctgccgccatgcttgacggaagccaggtactcgtgggtatcgaacttatcggcggcgacctcgatcattgcaacagcgatgttggaacagtggtcagcgatacgctcgtagttggtcagcagatcatccagcacaaagccgtactcgatggtgcatacaccagcctgcaggcgggcaatatggcgggtcttgacctcgcgcaccagaccgtccacgacctgctccagcggctcgatcttgccggcggcgtagacgtcgcccttctggaaggcatcgacggtgcggttgacgatgtcctgcacggcggcttccagcacgcccaggtcgcccagggcttcctcgctgaactggatggatttatcgcggatctcctcggccgtcttgatcaggttgacggcatggtccgagacgcgctcgaaatcgccgatggtgtgcagcagggtgttgatcgtgcggttatcttcggtggaaagatgcttggcactgagcttgaccaggtaggtgcccagcacgtcctcgtaatggtcgacggcgtcctctttgcgctcgacctcgtcggcgatggcatcgttccacttatgagtggtggacatggcctgcagcagcgaggtgcggcagatctcggccatatcgccgccggtgagcatggcgcgggcgacagccacagacggagttgccagcagacgatcgtccagcagggagttctcctgctttttgtcggcgggggagtcgggcacggtcatgatggccagcttttccagcaggcggttgaagggcagcaggatggcggtggtgactatgttaaaaacggtatgcaccatggcgatgccgaaggtattggccgtcgcattaaagaagctgaaacagatcagcgcatgcaggccgtagaagccgcacaggaagataatggtgccgatgacgttgaaatagagatggacgaaggcagtgcgtttggcgtttttgttcgcaccggccgaggagatcagcgctgtaacggtggtgccgatgttctggcccatgatgatgggcacggcggcggagtaggtgacagcacccgtgctggtcagcgcctgcaggatgcccaccgccgccgaggacgactgcagcacggcagtcagcacagcgccggcaatgacgcccagcaccgggttgctgaagctaaggaagagattcatgaaccagggctcatcggccaggggagacatggcgctggacatagtgttcatgccggccatcagaatggcgaaacccagcaggatcttgcctacgccgcgcttgcggtccttaccgaccatatacagccagatgccgatgaagcccaggatcgggctccaggcattggggttgagcattttggtgataaagctctcgccctcgaggcccgacaaagacagcagccagccggtaacagtggtaccaatgttggcacccatgataacgccgatggcctggtgcagttccatcagaccggagttgacgaagccgaccgccataacggtggtagcgccgctggactgaataacggcggtgaccgccacgccaagcagcagcgcccggatggggctggaagtcatggtggagaggatgccctgcaatttgctgccggcggtctgttccagcgccttgcccatcaggtccatgccatacaggaacatagcgatgccgcccatcagggtgaacacattaaaaatggtcatcggattacacgtccattctctttttaggcagcgccgtcgttccccgcgcccaaaacgcaggcctatgcggtgctgcttttatttctctataccgttgtatattatagctggtttcgggggcatttcaccagcagagatgcgtaaaggttttgtaaagtttgtgtaaaatgccgtttctgcgtacattttgtcgtctgttgcgttatataaactgtacagccgctgggatatgacccaaaattttaccaattttacagcttttttgcaaaacagctgcctgcttttcacaagctttacggggattgtacctgactatggtcgaaaccgccccggcggcgcagtacaatagccttgtacccgggaaaacccagtaccggcctgtgtgccgcaatgcaatgcccctttgggcaaaggagaagtacatctatgaaacgcaaatctgttgctgctgttgttaccgccgctgctatgatgatgagccttgccgcctgcggcagctccgccgccgattccacccccgctgcttctgagagcaccgcctcttccgagactgcttccggcgaggccgccccggccgagagcgaagccgctgctgacttcgacaccgaccaggacatcaccgtcatctcccgtgaggacggttccggcacccgcggtgcttttatcgagctgaccggcgtggaggaaaagaacgccgacggccagaaggtcgacaacaccaccgaggccgctgccatccagtccagcaccaacggcgtcatgactgccgtcgccaacgatgagaccgccatcggctatatcagccttggctccctgaacgattccgtcaaggccgtcaaggtcggcggcatcgaggcttctgccgagaccgtcaaggacggcagctacaccctggcccgtcccttcaacatcgtgaccaacggcgaagccaccgaccccgtggccgttgacttcatcgcctactgcctgagcaaggacggccaggctctggccaccgaggaaggctacgttggcagcgagggcgaggattacacctccgtccagccggaaggcaagatcaccgttggcggttcctcctccgtctctccgctgatggaaaagctgatcgaagcttacaagaccgtgaaccccaacgccgagctggaactgctgacctctgattccaccaccggtgtttccggcgcgctggatggcagctacaccatcggcatggccagccgcgagctgaaagattccgagacagagggcggcgccgtttccaccgtcctggcccaggatggcatcgccgtcgtcgtcaaccccgccaattctgttgaggatctgaccgttgaccagatcaagggcatctacaccggcgagctgaccgtctggagcgatttacagtaatttgaataggctccccttttgagggtgttgctcaggctttcaaaacgtgctctgcaggggtgaacagtgttcgcccgtggccgtttgccttgtgagcggtctttcccggaacgggttgcaacgccaagttggcgggcgaacaatgttcgccccaacaacctctatccggcaacggtaccgatcttcggcaagccagctcccctcaaggggagcctttatgtgataaaaggagtgtatagggaaatgaagaccgctcatctgcgggaaggcattatgcaggccgtttttactgcctgcgcctgcatctcgatcttagccgtcgtgctgatctgcgtgttcctgtttgctaacggcctgcccaccatcggcaagatcggcccgttgaagttcctgctgggcaccacctggaagcccggcaacgacatctacggcatcctgcccatgatcttaggctcgctgtacgtcaccgccggggccatcattgtgggtgtgcccgtcggtctgctcactgccatctacctgtcccggttttccacgcccgccatcaagcgggtgatgctgcctgccgtgcagctgctggccggcattccctcggtcgtgtacggcttcttcggcatgatcgtgctggtgcccgccgtgcaggccatggtcaagagcgactttttcaaaacagtgctgcacgtcaagggcggcaagggtatgagcctgttcaccgccagcgtgctgctgggcatcatgattttgcccaccatcatcaccgtcagcaagaccagcttggacgccgtgcccgaaagctactacgagggcagcctggccctgggcgctacccatgagcgcagcgtgttctacgccgtgctgcccgccgccaagtccggcgtgctgtccgccgtcatcctgggcatcggccgcgccatcggagagacgatggccgtcgtgatggtcgcgggcaaccagacctggatgcccaagggactgttccagggcctgcgcacgatgacctccaacattgtcatcgagatgggctactccaccgacctgcaccgcgaagcactgatcgccaccggcgttgtgctgttcgtcttcattctcctgatcaacctctgcttcagcgttttgaaaggagacaaggaccatgcctgataccattgccaacaacggcactgctgtgccggacatgagccgtgccgccgccaaagccatctaccccaacgggggccgcaaccgtaccgccgcccgcgtgcaggccgccctgctgcgcggcctggtggggctggctgctgccctgaccgccgctgtgctgctgttcctcatcggatacatcctggtcaacggcatccccaacctcaaaccctccctcttcgcctgggaatataacagcgagaacgtttcgctgatgcccgccctcatcaatacgctgctgatgaccgccttctcgctggtcattgccacgccgctgggcatctttgccgccatctggctggtggagtacgcccaccgcggcagcaagctggtgcgtctggtccgcctgaccaccgagaccctgcagggcatcccatccatcgtgtacggcctgttcggcatgctgttcttcgtcacccagctgcactggggctactcgctgatctccggtgccttcacgctggccattatggtgctgcccgtcatcatgcgcaccaccgaggaagcgctcatcgccgtgccggactcctaccgcgagggcagcttcggcctgggtgcgggcaagctgcgcactgtgtttaccatcgtactgcccagcgccatgcccggcatcctgtccggcgttatcctggccacgggccgcatcgtgggcgagaccgctgcgctgatctacaccgccagctcgatgccccagatccccaagagcatcttcagctctacccgcacgttggccgtgcatatgtacctgctctccaacgagggcctgtacatcaacgagacctacggcaccgccgtggtgctgctggtactggtgctggccatcaactgcctgtccggctttatcgccggcaagctggcgaagaagtaacactgcgctgcttgtaggggtgcacagtgtgcgcccgcgggccgatgcgagcatcggcccctacacaacggcatcgcggtcatcacaaggaggatacctgtgaataaatttgaagtctccaacatggacttatactacggcagctttcatgcgctgaaaaatatcaacatcaatatcccggagcgggagatcaccgccttcatcggcccttccggctgcggcaagtctacctttttaaaaagcctgaaccgtatgaacgacctggtcgagggctgccgcatctccggcgacatcaaactggacggcgtggacatctacaaagataagatggacgtcaacgtcctgcgtaagcgggtgggcatggtgttccagaagcccaaccccttccccatgtccatctacgataacatcgcctacggcccccgcacccatggtgtgcgcagcaaggcccggctggatgagattgtggaaaaatccctgcgggacgccgccatctgggacgaagtcaaggaccgcctgaacaagagcgccctgggcatgtccggcggccagcagcagcgcctttgcatcgcccgcgccctggctgtggagccggaagtgctgctgatggatgaacccaccagcgccctggaccctatctccacctccaaggtcgaggaactggcgacggagctgaaagaaaagtacaccatcgtcatggtcacccacaacatgcagcaggccgcgcgtatcagcgataagacggcgtttttcctgctgggtgagctggtcgagatgggccccaccgagcgcgtattcgccacgcccgtggacaagcgcaccgaggattacatctcgggccgtttcggttgatacagggaggatgagccaaatgggaaccagtttacgcaaaatgtatgatgccgaactgatggcattggatacgatgctggcccgcatgggccacgccgcgggcggcgccattgaaagtgccatgacagccctgcgcaccggcgatgccgagatggcccgcagcgttattgcccgggacagcgagatcgacgccgccgagcatgagatcgagcaccgctgcttaacgcttttcctgcggcagcagccggtggcgggcgacctgcgcaaagtttctaccgcattaaaaatggtcaccgacattgagcgcattgccgaccaggccagcgacattgccgagatcaccctgcatctccacgccgagggcgctgccgccgtgggcgtaatggatgatttgtataaaatgggcgatgtggcgctgaacatggtcaagaccgccattggcgcctacgtgcaggtggatctatccaccgccgcccaggtcattgcccgggacgatgactgcgacgcgatgttttccaagatcagccgcgagatcgcccagtacatcgccgcccaccccgacgacgccgagaccgcgttggacctgttcatgatcgccaagtatctggagcgcctgggagaccatgccgtcaacgtggccgagtgggtcgagttcctgaagaccggtgtccacaagtcccgcaagatcgtctgacgcgggcctatcttaccattcccttaggcaacaccgcacaattcccgcctaacggcttaagcaccgctccggcggctgcggcacggcaactgc

SEQ ID NO: 7962 - DNA, 8712 bp, Unknown
  gut microbiota DNA sequence
cggtcaaattacagttcttttccgtccaatattgctttggtcagggtatccccctcataatgcagctccagatggaaaaacggagcatccttctccagcaggtcgaagaaaatcttatcgccctgccagatgggaagagcctgtacggcctgcttgggcacccattccagcgtgccctcgctgcaatcggtcatggtgccggcaaactgggtgcaggtgtacaggtgcatccgctcggctggccagggggtacaataaaaatccactatgccgcggtaggccggggcctgcatcgtcaggccggtctcctcggtcacttcccgcattacgcaggcaagggcatcctcgcccggttcaaactttccgccgacgccgacccacttatcgtggttggcgtcgtttttcttttttacacggtgcagcatcaaatagcagccgtctttttccaggtaacacagggtcgtctgcaaaaaatccatggggagaactcctttcggcaataccgcataatccagcggttttagcaaatactaccacaaatcgcaacaaaaccgcaacggagggacgttttatgaaagcaaccggaattgtgcgccgcatcgatgaattgggccgcatcgtcattccaaaagagatcaggcggacgcagaggatacgccagggtgattcccttgagatctttacggcagcggacggcgaggtcgtttttaaaaagtattcgccgctgtcggggctggggtcgctctccaaggtgtatgccgaggtgctggccaaaagcctggggcggccggtggtggtgtgcgacacccaccagatcgtagcggctgccgggccgggccggggagagctgctgggccgcgccatctcgccggagctggaacaactgctggcggcgcgcagcgtctacacagcccccgccgaccgcacccgccgcctgccgatgctggaacgcagcgagcggccgattttatgcgccgcaccgatcttagcacatggcgacatcgagggcggcgtgctactgcccggcaccgggcgggacgccctgccggaggaagaagccgtacacgctgtggccacggcggccgcctttttggccaagtggatggaagaataacgccgcccccgccctggcagtacccactgcacagggcggattttttacgctttccttatttatataggacgtcccggttaaacccagtgtagtgcccgggccgggaaaagtcaagaagctgcgcggtttgtgacgaaactgttaaacttgaaaaaagtttgccgaaaccccttgacagtttgtaaaactggcatataataaatttagcactcagagataaagagtgctaaacgaaattgaaacttcgcagcaaaggagatgagcagcatggccatggatgcccgcaagcagcgtatcctggaagctattgttgccctgtatgccaacgatggcgagcctgtcggctccggcctgctggcaaactactttgacatggcactgtccagtgccaccctgcgcaatgagatggccgccctgacaaagctgggcctgctggagcagccccacaccagtgccgggcgggtgcccagcgcacagggttaccgttactacctcgatcacctgatcgatgccccttccgccaccacgctgagcgatgaagaccgccggcacatcgatgacctcttcgcctgcatggatgccgagcctgaaaagctggtgcccgcagccgcccgcagtctggctgatctgaccggctgtgccgccgccgccaccacgccccaggcgccggatctctgcatcgcccactttgaggtcgtgcaggtgggccgctactccgccgcggtgctggccgttaccagcgcaggcggtgtgcgtacccgcgtggcgcgggtggacaccggcctgacccgggacgacgccgccaatctggcgcagctgctcaaccgcgggctgacctttgtggccccgcaggacttgaacccgatgctgaccgccagcatggtactggcagcaggggagcggctggcgcccgttgtgatggccgcctgtgcgctggtaaccaccggcccgcaagcctgcctggaaggcgcgcagtatctggcaaagatgccggatgtccgccaaaacctgggtacgctgttggagatcttctccgacaacgaggccgccgctgagctgatccgccccgagggcggcaagatcaccgcaacgcttggcagcgaccttgatcccgcgatgccgggtgcctgcatcgtaagcaagcggtacttagcgggcggcgggttgaccgggtcggttgcactgatcggttccacgcggatggaataccaccgcctgctgccgatcctgaactactttgccaccaagttagggcagagcatggccgggcagggccaataaacaaatttgtaaggaggacccgcaatgagccacgaagcagaaaataaaaaagaagctgcggccgcatccgaagcggaaaagaccgtgacccctgagaccgaacctaaggccgagggcaagcatgaagagaagcacgaaagcaaacacgaacaccaccacgaaaaggctgcgctggaagccaaactggaagccagcgaaaagaagaacgaggagctgaagaaccagttgctccgcaccgctgccgagtacgataactaccgcaagcgcagccaacgcgaggctgaccagaagttcaatgatggcgtttcccacgctgtcacccagattttgggcattctggacacgctggacatggccgccaacgccgtgtgcgccgatgagaactacaagaaaggcgtcatgatgacgctggacaaagccgccaaagcgctggagaacctgaacatcagcgagatcgaagcgctgaacaagccctttgaccccaactttatgaacgccgtgcagcaggtcccgcccgccgaagggcaggagagcggcgacgtcgtgcaggtcttccagaaaggctacaagatcggcgataagatcatccgccacgcaacggtcgtcgttgcagaataagcctgattgggccgcaaggcccgttcacataaatttagacattcaccacattcaaagcaaatttgaagggagttttatagtatgagtaaaattattggtattgaccttggcaccaccaacagctgcgtagctgttatggagggcggcgagcccgttgttatcgcgaacgctgaaggcgcccgcaccaccccgtctgttgtcggcttcaccaagaccggtgagcgtctggttggccaggttgcaaagcgccaggctatcaccaaccccgagaacaccatctcctccatcaagcgtaagatgggcactgccgagaaggtccacgccggcggcaaggactacacccccgaagagatcagcgctatgatcctgagcaagctgaaggctgacgccgaagcttacctgggcgagcctgtcaccgaggccgtcatcaccgttcctgcttacttcaatgacagccagcgtcaggccaccaagaacgccggtaccattgccggcctgaacgtcaagcgcatcatcaacgagcctactgctgcttctctggcctacggcatcgataaggaagccgaccagaagatcatggtctacgacctgggcggcggtaccttcgatgtctccatcatcgagatgggcgacggcgttaccgaagttctgtccaccaacggtgatacccacctgggcggcgatgacttcgacgagcgcatcatcaactggatggctgaggacttccagcgcgagaacaacatcgacctgcgcaaggacaagatggctgctcagcgcttgaaggaggctgccgagaaggccaagatcgagctgtccagcgctaccaccaccaacatcaacctgccgttcatcacggccgatgccaacggccccaagcatctggatatgaccctgacccgcgccaagttcaacgaactgaccgccgatctggtcgagcgcaccatgacccctgtccgcaaggctctggccgatgccggtctgaaggcttccgatctggccaaggtcctgatggtcggcggttccacccgtatccccgctgtctatgatgcagtcaagaaagaactgggctgcgagccgttcaagggcatcaaccccgatgagtgcgtcgctgtcggcgctgccattcagggcggcgttctgcagggcgatgtcaagggcctgctgctgctggatgttaccccgctgagcctgggcatcgagactctgggcggtgtctgcaccaagatcattgaccgcaacaccaccatccccaccaagaagagccagatcttctccaccgctgcggataaccagcccagcgttgaggtcaacgtcctgcagggcgagcgtgagtttgcccgcgacaacaagagcctgggcaccttccatctggacggcatcgctccggctccccgtggcgtgccgcagatcgaagtcaccttcgatatcgatgccaacggtatcgtgcacgtaagcgctaaggacctgggcaccggcaaggagcagagcatcaccatcaccgcttccaccaacatgagcaaggacgacatcgacaaggctgtcaaggacgctgagcagtatgccgccgaggacaagaagcgccgtgaagaggtcgacgtccgcaacaacgctgaccagatggtcttccagaccgagaaagctctgggcgagttcggcgacaaggtttccgcctctgagaagagcgaagtcgagaccaagctgtctgccctgaaagaagccctgaagtccggcactgtggacgacatcaaggcaaagcaggatgacctgcagaaggctttctacgccatcagcgagaaggtttaccagcaggccgcccaggcacagggccagcagcccggtgcacagcccggcaacgatgccggtgcccagcccaaggatgacggcgccgttgacgctgacttccacgaggtctgatctgtaaacaagtaaccctttaggccgccgccaggcacccccggcggcggcccttgggggttttagagaaaatcttttctgctccaatattgcaggggccgatgcttgcatcgacccgcgggcggatgacgagcatccgcccctacagtacggcagataaacattaaacccaaatagaggggatagattctatggcagaaaaacgtgattattacgaggtgctggggatcggcaaaaacgccaccgatgccgagatcaaaagcgcctaccgcaagctcgccaaaaagtaccaccccgacctgaaccccggcgacaagaccgccgaggagaagttcaaggaagtcaacgaggcgaacgatgtactttccgacccggaaaaacgcaagcgctatgaccagttcggctttgccggggtcgatcccaactatggggccggccagcccggcggcggcttcggtggcggttttggcggtggcttcggcggtgccggcggcgtagacctgggcgacatcttcggcgacctgttcggcggcggatttggcggcttcggcggttcttcccgcgcgaaccccaacgccccccgcaaaggccacgacatccaggccagcgtgattttgacctttgaggaagcagctcacggctgcaccaagaaggtcacgctgaaccggcagcagacctgccccgattgtaacggcaccggctgtgagccgggcagcaaccccgagacctgcacccagtgcaacggccgcggctatgttgtgacccagcagcgcaccccctttggtgtgatgcagagccagcagccctgcccgcactgcggcggccgcggtaccatcatcaagaacccctgcaagacctgccgcggcaccggcaagacttccgcccgcaagacgctggaggtcaagatcccggccggtatcgatgacgatcagaacattgcactgcgcggccaaggcgatgccggtagcaacggcggccctgccggtgacgtgatcgtacatgtgacggtcaagaccgacgccgtgtttgagcgcgacggctacgatgtgtacgtccgcgtgcccatcacctactcccaggctgtgctgggtgccgagatcgaggttcccaccgtggacggcaaggtcgcccagaagatccccgaaggcacccagagcggcaccaagttccgcctgcgcggccagggcatccagtatttgaacggccgcggccgcggtgaccagtacgtcatcgtggatgtggagattcccaagaagctgaaccgcacccagcgcgaagccctgaaagcctttgaggacagcctgaaagacgacaactacgaaaagcgcaaaggcttcttcaagaacttgaaggatcggtttacgtcttaaccgcttgaacaataagtatgccccctagagtctaacagctctggggggcttttttacgtacatttacaattattcttcaatttcctgaactatcgcttcataaatagcggattcttcttttgtttctttatggtttacgttggacagttttgtatctttcaagctctcttttaacctttcacagcatggcttaaacgaaacatacgttatgcctccaccaatcactccaccaactactggtattgctttcttaaagaatccagaaaatacttcctttgtcatgcgaacaccaaaccacttcgctatgctctttacaattggatatatcgttccttttgtaagtgctcgccgcatcagttgtttttctactccgttgcccagtgcctttgccattgcctttaccgcattatttgcaccggccacgccaaacattacacccattgctacaacaaggagattcattgtcgcagagtctatttgcgtttcgtcatcttctgacacaatttgcggaaatccataaaggtacatcaatttttgtgcagcgcgaagcatgtatccatagtactgaatgatatctgccggaattgtagctaccattgctgctccaccaggtgcaccaagcgctgtagagattcccgaaacaaaatatctttcatactgaataactgcatctgcaattttatcaatatcttctgctggaatttttgccgctacaggagtttttgcaattgcttttttcacagtttcttcatcgtaatgtatagttaattcttttttgagaaactgttcccggtttacttttataccgggtgttttaaggcctaatgtaataatatcaacaatgtcaacatttccgtcatggtttacatccagctgattcattactgtatcttttgcatttttcccaacagatgctatcttatcacttccatcggcaatcgcttttccagcgctttccgtagcatcgtttacagcctttccgattttaggtgcgacagtttcgttgaaacttttcgcacctctttgcaccgctgataaactcttgtccataaacttctttatgtcaggcatacaagtcgcctcatttccatattaaaaagtcattatttatacttacttttaactcaaattctcctgcatcagccgcttttttagcgggaggagggcggcgggttcggcggcgaagtggtggacgccgaggtggaggtaggcgggcatctggtctaccgaggcgaccgtgatgccgcagaggtagacccgcacgctggtgccctcggcctggcgcagtacctctttgacaaggcgctgcacagcggggctggcggcgcggcgggccgcggcggcggggtctttgacaaggcccagcgtgtagcgggccaggtcctcaatgtcgatggccaagatctgcgcgccgtgggcaatcagttccccggccagcagtgcggccgagggcatatccacaatgcagcccatcggcggcaggcgatccacctcgacaccgcggctttgcagttcatcgcggcaggcggtgacctcctgcaggcaggcgtcccagtcctcggcccccgcgatcatgggaaagaggatacgcaggtcgccgcagggcgcggcttgcagcagcgcccgtatctgcggccacagcagacggtggttttgcaggctgtccttgacggtcgcggtccagggggcctcatcgtcggcgttggaatcacaggtgcgtacggccagcatggccccattagctgcttccagatgttctttcagcaggttcaactgctcctgttcggacagctcgttcaagatcaccgattcggtgcgcagcaggccggtgcccaccgcggtcaacggcagggccttgtcctcggtgccgtacaggttcgtcatcgtcagcaggcggaacgccgtgccatccctggtcaggcagggctgggccgccacggggtcggccacgctgccgtgcagacggttcagcgcaattttgcaatccgcctgggcgatatgcgcgccgtccgggtccacaatcaggctgccggtgccgtcctccaggttggcgtccagaatggcccgtttgccggcggccagcgcggccacgccgtcacccaattgcagcacagcgggcaggcccatgctgcgggccatgatggccgcgtggctgatggtgctgtcctggttgctggccagccccaggatcatgcggcggtccaggctgaacaggtcgctggggaagaagcggtccgccaccagaatgctggggcgcttcaagtgcaggcggcggcgcgggcggccgtccagaatatccaccacgcggcggcagacatcgcagacatccacgctgcgctcccggatgtactcatcgtccacgtcccgcaggcggcgggcaaagatctgcttggcccgctcgacagcggcagcacc

SEQ ID NO: 7963 - DNA, 7340 bp, Unknown
  gut microbiota DNA sequence
gcaccgcccgcaccggcggctatgtaatcgccgatctcattggtgaaggactcatcctccagcagggcgatctggaacagcagaatgtccgcatcggggcctttggcgcgctggctcaggcggcgcagctcatctttcgccagcaccaccgctacgtcatacagtgcgcgctcccgaaacgggtcgcagacgatgcggtgcagtccggtggtgccgtggtcgatctgttccacagggccgatcacaacgccgggcgatgccgaaacaccagtaaaggtatgcatgcagacctccttgttttttccgatgccgccgcaaaaatgcgcagcatcgtcctttgttaaaacagcggcacatccgccagggtacggctaaccagcgccgttacaaattcctcgggcgcggcggccgccatggctttctcggccacaaggctgccgtccttgccgtccagcaggacggggaagcggtcagccgggtctttctcaaagctgcccattactgtagcagccagcagcttgggggtgtagggcatgtccgcgggcacgttcaggtgctcggcggccagctccagcggggccagtgcagccgcggtgggggcactggggttcggcgcaaagggggccgggtagttggccagctggcgcgcagtcttttccaccaggtcgatagccggggagcgggcggcgacctcggccaggcgcagctggtaacgttcggcgaagttcttcaaaaaggcgctgctgtccggcaggatgccgtaggctgtgccgcccatgcggtcaaacagccgcatcgtatcaaagtagcccagggcaatgttgcgggcggcgcgctcgggggcaaaatccagcgtggggcctaaattccaatggctgcggatgatgcgggtgggcaggccggtggtgttggggcgggtgatgcccacgccgttcacatccacggccagcagttccccggcgcccatggcggcggccaggtccagcggcatattgtcgcgccagccgccgtcgatgtacttcacgccgtcgatctcccgcgggcgcagcgccggaaagcaggcgctggaccccagcaggtagtctttcatctggccttcggggatcttttccaccgggcactgcacgcggcgcatggtgcccagttcggtcatcaccaggccgaagcggatgggggagcggcgcaccgcgtcctcatcaatgagccggtcgatggtctcggccagcggctccacgttcaggccgccgctgcgcaccacgtcgagaaagaagttgttcaattcctcgggcttcaggctgtcgggcacttccagcacgtcatggatctccagcctgcgccaaaggtcctcggcctccttgcttttgcccattgtaaacaggcagccgttcagtgcaccgacgctggcacccgtgataatatccggcgtccagcccagctcttgcagcgcctgccacacacccacctggtagctgcctttggcaccgccgccggccagcacaagggcccgctgcgggccgggttttcgtgtttgctgcatggtaacttcctcccattactctatggccttattatagcatcttctgccccgcactgccatagggaagcaccaaacattttgccgaagctgcccggttttgccccgggggttgcacccgccgccaaaagagtgtatcatagaagccggaatgattttgtataaaggaggtttttcccatgcgcgaaaaaccgattcttgtcattatggctgccggtatgggcagccgctacggcgggctgaagcagatcgacccggtcggtcccagcggggaggccatcatcgactacagcctgtacgatgcccgccgcgccgggttcgagaccgtcgtctttatcatcaagcacgagatcgaggagccgttcaaggccgccgtgggtgcccgcgctttgcaggccgggtttgaggtgcgctatgcctaccagcagttggactgcctaccagaaggctttaccgtgcccgatggccgcgtgaagccctggggcactgcccatgccatcctgactgccgagcaggccatcggcagcgcaccgtttgcggtcatcaacgccgacgactactacggcccgcagggctttaagctggtgtacgactacctgagcagccacgccgacggcgaccgctatgcgtggagcatggtgggctttttgctgggcaacacggtcagcgccaacggcagtgtcagccgcggcgtctgcgtgaccgatgaacacagcaacctggtcagcgtgaccgagcgcacctgcatcgagccttacgacggcggcatccactacaccgaggatggcggtgccaactggaccgacctgcccgccgacacggtcgtatcgatgaacctgtggggcttcacccccggttacgtggccgaggccaaggccgggtttgtggcgttcttgaaagagaacctgccggtgaacccgctgaaatgcgagtactacctgcccagcgtggtgaccgccgctttgcagcgcggcgatgccgacgtacatgtactgaccagccccgacaagtggcacggcatcacctaccgcgaggacaagcccgaactggtagccgccctgcgccggatgagcaaggacgggctgtaccccaaagataagctgtttgggtgattattgcctatataacgcgcaagcccccggccgatggccgggggcttgcttttatttcagcttcttttttaccatgtacatcgccgccagcagcacggcagcggcaatggccgtaaggatgccatacatcacaatggaggtataccacggtgcggaggtcagcacgtacaggccgggacgggtgtggtagtcccagcaggtatagatcgtagagccaagaaacgcgccgatcacacaccagaaaaccgctttcagaacggtgtacagctttttcttgtccatagcgttctcctttgtttcacgcgtgcggcggcagaagaatagtatggggtgccgcttattccaggttgccggtcagcagcatggcggcggtcagggcggtgaggggagcggtctcgcaccgcaggatgcgggggcctaagcccaccgtgacagccccggcggccttggcggcctcggcttcttctaccgagaagccgccctcgctgcccgtgacgatggcaattttcttggcgcagccgggccgcagcacggtacgcaggggagcgccgccgccctcatagaaaaacagcgccaggtcgtaatcttcctgcaaggcatcgcagacggcggcgaagttcagcagcggcatggacacatggggcagcatggcgcggcccgcctgcttggcggcctcggcggcgatacggttgtagcgttcgtttttggcgtcctctttttttggcgtagctacgcagtaacggctaaaaaacgggacaatttccgttacgcccagctcgacgctgtggcggatgacttcctccagcttgccctgcttggggtagcccgcaaacagcgtcacagccgcatccggctcggccttgctggtggtgccctttgtcacggtgaactccacccggccggactggatggcggtaacggtgcccaggtactccagcccgtcggggccgcaaagcaccacttcctcacccagtttggcgcgcataacatccgccaggtggtgggcgtcactgccggtcagcgcggcacggccggcagccagttcgttggtaaaataacggtggggcatggtttacgcctctttctcgtcagactttttgcagataatgcagacccagccacgcttctccttgacctcgatgggggtcaggccggcagctttcaggccggtgagcacctcgtccctgcgctcgtcaatgatgccgctggcgataaagcgggcgccaggggccatcagcacgggcacgtggggtgccagcgaaaggatcgccgcggctacgatgttcgcggtgatgatgttgtactcgccgctggcctggtcggacaggtcgcccaccagcacagtgaacttgtcggccacgccgttgcgctgggcgttctcgcccgcggtgcgcacgcacatggggtcgatgtccacgccctcggccacctcagcgcccagtttcagcgcggcaatggccagaatgccggagccggtgccgatgtccagcacgcgctcaccgcccttgaccaggctgtccagcgtttccaggcagagggaggtggtctcatgggtgccggtgccaaaggccatgccggggtccatgacgatcttgatgcggtcggtgtcgtagtcctcccagccgggcacgatggccaggcgcttgccaatatccatggcgtggtagaactttttccagccgttctgccaatcttcctgctccacaccggtggtgttaagctggtagtcgatgccgctgtttttcagacgctcctcaaacagaggcagcacttcggcggggttttcatcgggggccaggtacatgtgtacgatgaccacgtcccggggtttgtccagcagttcctgctcgatcaggtctacatgggcgatctcccacgcctgctgttccaggtcgctgtaatcctcaatataaatgccgccgttggctaccatggtggcgatagcctcggccgtatcggcgtcgcgcttggcaacggtaatgctgatgtcggtccattccataagaaagagcctcctatattctatgtttcacttctgtagggggcgatgcccgcatcgccctgcgggcggatgcaagcatccgcccctacttgcacgtatgcttgtttgtattatacaagatttcgcgttgtaattcaatcagaaaggggtacggatatgcgaattcgtctgttggatgctgccggggccaggcaattgtatgagagccgcatggcgcgggactttccgccaggggagctgaagccctttgcggcgatggaagaactgctggccgccggcctgtatgaaccgctgacctttaccgatgacaccggggccgtgctggcctacgcctggcaggtggtactgccggggcagcaggccgggctggtggattactttgccgtgcgcagcgacctgcggggcagcggcatcggcacccgggcgctgcacctgctgcaggcccactacgcaccccggctggccgcactgctgttggagtgcgagcaccccgccgaagccccggatgcggccattgcccggcggcgcatcgggttttacctgcgggccggggcacgggctacggcgctggaaagccgggtgttcggtgcgcggtacagcattttgcagctgccctgcggcgagacactgttgcctgacggcacgttaaataccgcgctgcaaaccctgtacagccgcatggtgccccagccttattaccgcggcagcgtaatattttacggcaattaagcccatactacccccgaaagggagtggaaacgggatgaaactaaaccccaaagagtatgataaaatggtacgccgtgcctcgcccccatcgcccgttgtgcaggactgcctgtgggcgttttttgtgggcggggccatctgcctgctgggtgaagcactgcgccagctatttttactttggtacgacaaaacgatggccggtacgctgacaagcattgcgctcatatttttatcggcgctggccaccctgccggggtggtaccaaaaactggcagccaaagcgggcgctggcacgctggtgcccatcaccgggttcgccaactctgtcgtcagcccggccattgagttcaaggccgagggctgggtcaccggcgtgggggccaaaatttttaccatcgctgggccggtcattgcctttggcacgctggcgtcctttgtgtggggcgtggtgtactggctggtgggaaaggtgggctgatatgccgaaacgacgcaaggatgtcatcttttttgatgcaccgccggtgatctctgcctggggcagcgcgggcggcaaaaaggagggtgaaggcccactggcctcggcctttgactacctgacccaggacgccgcctttgccgacgaaaactgcgccaactgggagcaggccgaaggcatgctgcagcaaaaagccgcgggcatctgcctgcgcaaggcgggcattgcggccaaggatgtagacctgacctttgcgggcgacctgcaggcccagtgcacagccagcaactatacgctgcgcacgctggccaccccctttgcggggctgtatggggcgtgctctaccatgaccgaggcactttgtctgggggccgcctttgcggctgccgggttggggcggcagatattggccatgaccagcagccacttttgcgcggctgagcggcagttccgcacgccgctggagtacggcgccaagcgcacccccacggcccagtggaccgccacggcggcgggggcctgcctgctgcgggggccggggcaggggggcgtgcagattttgtccgccacctttggccgggtgcaggattacggcgtgaccgacatcaacaacatgggcgccgccatgatgcccgcagccgccagcacgctgctgcgctattttgacgccaccggcgcggctccggcggattttgatgccatctttaccggcgatctgggccaggtgggcagcgatctgctatgcgagcagatggagaaagagggtgtgcccctgcccaaccactacgattgcggctgtctgctgtacgatgtggacagccagaacgtgcaggcgggcggcagcggggccgggtgcagtgccgccgtgctgtgtgcctgggtgctgccccggctgtttgacgggcggttcaagcgggtgctgttcttatccaccggcgcactgatgagccagacgacctttttgcagggcgagaccatccccggcatcgcccactgcgtggagttggggggacttgtatgaactatgtttgggcgttcgtggtgggcggcgcgatctgcgtcatcggccagctgtttattgattataccaagctgactccggcgcgcatcctgaccggctacgtggtggcgggcgtggtgttaagcgccgtgggcgtgtacaagcccctggccgagttcgccggggccggggccagtgtgccgctgctggggttcgggcatctgctggcgcaaggcgtggtgcaggccgtggatcggtgcggcctgccgggtgcctttaccggcgggctgaccgctgccgccggggggattgctgccagtttgatttttgctgtggcggcggcgctggtgggaaagagcagggaccagaattaaggcaacaccgcacaattcccgccttacggcttaagcaccgcttcggcggatctccgcgccaagagccgccgcaagcggcggttgcgctccgaagcgcctcgctgcggctcg

SEQ ID NO: 7964 - DNA, 322 bp, Unknown
  gut microbiota DNA sequence
gatatcccactgagtcaatcaggtaagaccccttgaagactacaaggttgataggcacagagtgtaagcggagtgatccgttcagctagtgtgtactaataggtcgagggcttgaccccatctttaaaagatactctatttgctagagcagttcgatattcagttttgagggtacatcctcagaaaaaagagacggtcggtgtcgatgacggtgaggttccacctgttcccattccgaacacagaagttaagctcactcgtgccgaagatagttggctggagacggcctgtgaaaataggtagatgccgacttctcttttaa

SEQ ID NO: 7965 - DNA, 3344 bp, Unknown
  gut microbiota DNA sequence
atccgcagccgcgtcaagggcgtgtacaaagagatcaacgccctgctggaatccatggccgctgaaactaccgaacctgttgaagccgacgaggccgccggaccgatcgatccggagaagctgaacgccctgaaagagaagtacgccgaggtactggagcagctgcccatcatggacgagctgtaccgcaagcgcctggtgctgcgcaagcagcgcggcggcatggagatcgagtccgacgaagccaagctcatcatcgatgaaaacggccgctgcgtggacatcgtcaagcgcggtcgcggaacttccgagtgcatgatcgaggagttcatgctgctggctaaccagtgcgccgccaacgcaggccgcaccaacaaggtgccctttgtctaccgcgtgcacgaagcccccgatgccgagaagatggaaaagctgtctgccacgctgctggcctgcggcctgaacgccaagttcaagaatcccatccccacgcagctggaactggctgccctgctggacgagacccgcggtcagcccatccaaacccccgtacacaccggcatcctgcgcagcatgcagaaggcccgttacgccccgcagcccttgggccactacggcctggtgctggcggactacgcccactttaccagccccatccgccgttatcctgatctggccatccatcgcatcctcagcgagatgctgctgggcgccaacaacgcccagatgaccaaggacttcaccgactttgccgcccgcgccagcgagcaatccagcaggcaggaagtcaccgccgtccgcatcgagcgcgacgtcgaggacctgtacaaggccgaatatatgcacaaccacctgggcgaggtctatatgggtaccgtggctggcatcacgccgcgcggcgtctttgtggagctggagaacaccgttgagggctttgtccccgccgccgagctttgcaagggtgagccgcaggtcgtggacggcgtcagcatggtcgacccgctgaccggccgcacctggatgctgggcacctcgatgaagatccgcgtggccgccgcggatgttgccctgggccgtatcgactttgagtatatggtcgagtgattttccttattataaaagcgcaataaaaaagagcctgaacagcttgtgtaaagcaatcattcaggctcttttttattgcgctttttctattttgtaccgtttctcagcgcagcatggccgtgatgctgcggtttactgcctgcgttttgtcggcatcttcaaactgcagccggtgtcctgcatccggcacgatcaggcaggggatagcccgtgccttgcagaactgctcaagctggtccgccgccaagtgggcatccttggtgcccaccaccgcgccgaacacatcagcaccctgcggcaattcctgcaaagtttcctccagcggcgtcagcagaaagaaccgcggccgcagccccagcaccttcgccgtacgcaccgcgcagagcgtccccaggctttttgcaagaaaggccacatcggtatagtctgcaaaacgaacgccggaaagccgccccagaatcgacggcagagcctgctccgctgcgcggcccatatcggccgtgccgtcaaaaggcacaccggcgaaatccaggcacagtgtctcgtacccgcgcgccgtataaaacgccaaacaatcctgcatcaactgctggtggcaggtataccgtattcccggaaacgcgataacaattccttttttcatcatgcccctcccacgacaaataaaaaacgctgacagcgtaaaaccatcagcgttctttatggcggaaagaaagggattcgaacccttgagggctttaggggccctacacgatttccagtcgtgcgccttagaccagctcagccatctttccatattcagttgcgcgtctctcaagagcgctttaatataatatcagttcaagggataaatgtcaaggcttttttacaatttttttcaaaaaagtacaaatttaaaaaatcgcaagttttgcacttgcaaaacacattcgttcgtgataaaacatattgagaataagataaaggggatgtattttttcgtgtattccatatttcgcaacttggccattattattttaagtgctaaattttgcggtctggccgcccgtaaatgtaaggcgccccaggtcgtcggtgagattctcgccggtctgctcatcggtccctgcctgctgaacctcgtgcagatcagcgacacgatctcggtctttgccgagattggcgttgtgctgttgatgttctccaccggccttggcaccaacctgaaagagctgctgcgtgcaggccccatcgctacgctggtcgcttgcatcggcgtgtttgtaccgctggtaggcggcacgctgctgtatggtgccttctttggcctgggggagatcggcagcccagagttctaccgcgcactcttcatcggcacgatcatgaccgccaccagcgtttccatcacggtggccaccctgcaggagttggggcagttgaaaggcttccttggtaccacgatcgtcagtgctgccgttatcgatgacgtcatcggtatcgtcgtgctgacctgcgtcattggcgccagctccggtaccggtacaggcctgggcactgtgctcatcaacacggtgttgttcttcctggtttctatcggtgtcggtgtggtcattcaccatgccatgaaatggctggacaaacgcaacccccacacccagcgcatcaccgttgtcagtatcgctttctgctttgccatggcctatattgccgagcagtactttggtattgccgacatcaccggtgcctacattgccggcattgtgctgtgcgccatggacgatgccgcctacgttgagcgccgcatcgacatcagcaactatgttatcttcgcccctgtgttcttcgccagcatcggcctgaaaaccgacgtcagcggcctgaccccggagattctgctgttctgcgttttcttcgtcatcgttgccctgctgacaaagattatcggctgcggctgtgctgccaaggtctgcggcttcaactggcccgactctctcaaggtcggcattggcatgatgacccgcggtgaggtcgccctgatcgtcgcccagaagggcctggcggtcggcatggtagattcggtctactttaccgccgtcatcctgctgattgttgtttcttccgtcgcaacccccattgcgctgaaactgctcttccacaagcatccgccggttccgcatccgagccagttgaaagctgaaaaagcgtaacgtctaaaaaatcagccgttcccacagtgaagtgacccccaaaagttagacaat

SEQ ID NO: 7966 - DNA, 852 bp, Unknown
  gut microbiota DNA sequence
tgcaggctggcacggctgtggtcatcctgccagttgtctaaaaaattgtagtacgccagcgcgatggtcatatcagcggcgtagtccagaaattcgttggcggcgcggggccgtgccttgatggggtgcggcgcgcaccgtccggcggaaaactgcgtctgcggctcatacagcgccgagtgcagaatggcgatgaacgctaaatcgtagcttaacgtcaactgaccgggcaggccgtatttctggcccagcgtgcggcacaggccgcagtagtaggcctggtagcggtccagctccggctttgccagccctttgtggtagatggtaacatacccgaacatggtgcgtcaactctttttaatgaactggttgtgacacttggggcaggtgatggaaattttgccgcgcccgcggggcacccgcagctgctgcccgcactgtgggcagcggaagtagcggtactgcttgcgctgcttaaagcgcaaaatgtaccggttggcccagtccacgactttgttctggacggagaggtattttaaattctcgctgtatcgcttagaacggttgcggctgagcacccgaaagtagcagtagatgagcagcaccagccccagccagtacagcaccgggctgacccaggccccgataatgacaaggataaaggaaacgatgcacaaaaatccgcccaactggtcaaacccataccgcccggacataaaccgctgaaaccagcttctcatgaaaaaaccacctttattatagtctacaggctattatcccacacaaatattggcaaatcgtgaacaggaggggaaaagagtttgaacaaatgggttaattgatgatgagatt

SEQ ID NO: 7967 - DNA, 1777 bp, Unknown
  gut microbiota DNA sequence
cgctgcacatgtccaaggcccgctcggcccggcggggctgggcaaagcggcccagaagcagggcatcgctgccaaaggcggcgcgaggagcggtcagcactctggtgccgttatccaaaatttctacaccgctcatgctttatcctgcagcagcgcgtatttcatcaggccgatctgggtcttgctgtccttgatctcgccatgcagcaccttttgcagggcttccgcaaagggcatgcgcaccacatccaggaattccccggcatccaggtgctgaccgcccttgtgcaggccggtggcggcccacagataaatcttctcgctgtcataacccacagtggggtagacgacacccaggtctgtgtagttgtcggcggacaggccgcactcctcgctcagttcccgcttggcggattcaaatggatcctcgccgggttccagcttaccggcgggcagctcccagatctcctcgcccagcgcgtagcggaactggcggaccagatagatgcagccctcgtcgtcgatgggcagcacgcaggcgccgccgtggtggtgtacgacctctcgcaggctggtgcggccgtcttccaggcggacggtgtccagcgtaacgtggatgacatggccgtcaaagatctctttgctttccagtttggtttcggtatgcggcatgggacagcactccttttattacagtttttacagcaggcgcagacagaaatcgatatactccagggtataccgctgggtacacaccaggctggaatcttttaaattggacatataatcggccagccggttggccagcatggcatcccgcagggtgtattcacggcaaaagccctcctgcggatcgtcggacaaagtgcagaataccacgctgcgaccacggaaggcggttaccgtaatgtgggggtccaggggaaaggcttcggcactgacgatgcgcagcacagcggtgttgttctcgcaggctgtgcgcatccgcagcagcagttcccggcgggcttccgggggcagcggcccggtcagggaggcatctacatccactatgcggccggtgcgcacaaaatccatcaggccgtcctcgctgaaatagaactcatacggggcggtcagccaggcctgcatgtagtcggccaggcccggcatggtttccagcgccgccaacgcctggggggcatagcggccgatcatttccatatcgataaacttggagaccggcggctgggcacgcatatagcaggcttcggtctcgttgtccagcagctggttgccaaacgccatggcctgctcaaaactgtgggcatccgatgccagagagaagaacaccggtgcttccagatactggcggctgaactccatgcgcaggcactgcaccaccgatggctcggtcaggcagatgcacttttgcaggttgagatccataaacacgaccacatcggggaacagcacatagaccggcatcagcagaccgggcagcggcccggcagaaggcgcacaggaaagccgtgcctcgtactgcattgagcgcaggaccagaaaaggcagcgcccgggacacggtgcgcacgttgccgatgaaattctcctgtgcatcgttattggtcacaaaccgcagcagatgccataccggctttggcgaagcctcggcggaaaaggcaccgatgaggatcgaactgagtgcgcgttcccccacaaacggggaaagcatcagtgggcgcttttcttcgctgcgcaggtagcgggtcagcagcagatgcagctgctgtgtcacc

SEQ ID NO: 7968 - DNA, 15539 bp, Unknown
  gut microbiota DNA sequence
cgcagatgccgtgcctcagccgccggagcggtgcttaagccgttaggcgggaattgtgcggtgttgccataaataaaaatcaagaattccgttcccaaatcaaagccaggcccttaaacagcagatctccatcatacaaaatcttccgtttgcagcagggcatgatgtaaggcgctaagccgccggtggcgactaccgtcagcggttggcccagttccgcttccacacggtcggccaggccgtccagcatggcggcagtgccaaacatcgcgccgttgttgagcgcctcgaccgtgttgcggccgaccagatgctccggcggttccggggcgatgggcggcagctgggccgtgcctgcactgatggcccgcaggctggtctgcacgccgggcacgatgaacccgcctagaaagcagccctcagccgaaagcacattgtaggtcgtggctgtgcccatgtccaccgtcatgcagggcaggggataatgcgctgcggcggctgcggcatcagccagacggtcgcggcccacgcggtccggctcgtccacggcaaaggtcaggccggtgtccagcgcgttgctcacaattaaagcgtccctgccggtcagccgcctgcaggcgtgggccagtacgggcgttaaacccggtactacgctgcacacgatgacgccctcgcaggcggtggggtcgacctttaagcgccccagcaaaaatcgcagctcggcggcgtattcatccgctgtgcagcgggggcgggtgaccatccgggtggtgaacaggatgtcgcggtgcgcttcgcccgccagcccgccgatgcagatgttgctgttgccgatgtcaactgctaaaaccatggtgtttgtctcttttcctgaaaatgtagcatcattatagcagattgacggcagtgctgtaaacgggtatactaacattatgaaggatgtgatctccatgaacctgaaaggcaaaaccatcgtcctcggcattaccgggggcattgccgcttataaaatgcccaatgtggcccacgcgctggtcaaactgggcgccgacgtccatgtgctgatgacccagaacgccaccgagttcatcaccccgctggtgtttgaaacgctgacaaatcgccgctgcatcgtggatacgtttgaccgcaacttccagtacgacgtggcacatgtcagccttgccaacgccgccgacctgatgctcatcgccccggccacggccaatgtgattgccaaaatggcccacggccaggccgacgacatgctgaccaccgtgaccctggcggcccactgccccaagttggtggccccggccatgaacacccacatgctggagaaccccattacccaggataacatcaggacactggagcattacggctttacggttatcccgtccggctccggcctgctggcctgcggcgacgtcggctccggccgtctgcccgaggagagcgtgctggtggattacgtgctgcgggagctggcctgcgagaaggacctgacgggcaaaaaggtggtggtctcggccggtgccacccaggagccgatggaccccgtgcgttacctgaccaaccactccaccggcaagatgggttacgccgtggcccgtgcctgtatgctgcgcggcgcggaggtcgtgctgctgtcctcgacgagctgcacccagccggacgtgccttttgtgaagaaggtgccgttcaccacggccaaagacctgtttgaagccgtaaaggccaacgccatggatgccgatgccctggtgatggctgccgccgtggccgactaccgcccggcggaagtggcagcggacaaggtgaaaaagcacgatggcgagatgaacatcgcgctggaacgcaccgatgacattttggcgtgggtcggcgcacacaagccggaaacgctgtttgtctgcggcttctcgatggagacgcgggatctagtcgagaactccaccgccaagctgaacaagaagaagatggacatgatcgtggccaacaacctgaaagtccccggcgccgggtttggtgtggataccaacgtggtaacgatcatcacccgcgagggggcagagcagttgccgctgcaaagtaaagatgatgtagccatggcgattgtggatcattttgcctgatttttgatattgtgctagaccggctctgcctaccttgcggcagagccttttataatggcatattgctgttaaaacgagagagccgccgcagggtgacggcgaacgaaatagataaataaaatactaaaaccacccccttcccgcatactcatgcaagagaatgagcacagcgaaaagggggactttttatgtgtgggatcgcagggcagatcgggcgggacccgcgggtgatccaagggcagtatgcggcctattgcgcgatgcagcaaactttatcccgccgtgggccggaccagcggggcatgttcatcagcgggcgggcggcgctcatccatgcgcggctggcggtggtggatattgagaacggcctgcagcctatgcagctggattggcagggcgaaagctacaccctcgtgtataatggcgagctgtacaacacgccggaactgcgcaccgcgctgcaaaacaagggccacagctttaccggccattcggataccgaggtgctgctgcacgccttcgcccagtggggggcggactgcctgaaacgctgcaacggcatttttgcctttgccgtctgggcgcagcgggcgggcaggttgtttttggcgcgggaccgctgcggggtcaagccgctgttttacgtgcagacaggggacagcctgctgtttggcagcgagatcaagaccctgctggcccacccggccgtgccgccccgggtggacgccaacggcctggccgaagtgctgctgcttggtcccggccgcacgccggggtgcggggtatttaaaaatatccgagagctgctgcccggccagtgcgccgtgtatgaggctgacaccggccgcctgaccctgaaccgctactggcagctgaccgaccacgaccaccccgacgacttcgagaccaccgcccgcaacgtgcgggatttggtcgtggatgccatccagcggcagctggtcagtgatgtgccggtggcgacgtttttgtccggcgggttggattccagcctgatctcggcggtggcggacacctattttaccgcacggggtcggcaattgcagacgttctcggtggggtacaaggacaaccggcggtatttccacgccaccaagtttcagcccggggccgacgcgccctacatccgcaagatgaacgactttttgggcgcacggcaccactgggtcacgctggacacccccgaactggtgctggcgctctacgccgcggtggaggcccgcgacctgcccggcatggcggatgtggattcctcgttgctgctgttctgccgccagatcaagccccatgccacggtggcgctttcgggcgagtgcgccgacgaaatttttggcggttacccatggtaccgtgaccccgccgtgcgggaaaagtacggtttcccctgggcgcagtccacggcctaccgggcggcatttataaaggagggcgtgctgggggacatcgacccggcagcgtttgtggatgcgcggtatcagcaaacgctggccgagacctcggtgctgccggggcgggatgcggtggagacccggatgcgccagatggtcaatttgaactttgcctggttcatgcagacgctgctggaccgcaaggaccggatgagcatgtactcgggcctggaggtgcgcgtgccgttctgcgattatcgcattgcagagtatctctacgctgtgccgtgggattttaaggattaccagggccaggagaagggccttttgcgctacgccatgcagggcgttttgcccaaagaggttttgtggcggcgcaagagcccctaccccaagacctggaacccggcgtatttagcggcagtcagtggcgagctgcggcgggtgatttctgacccggcggcgccgctgcttgccattatcaaaaaggaggcactggaagtactgctggccagcggggccgacaaccccgtgccctggtacggccagctgatgaccacgccgcagacgatcgcctggtttttgcaggtaaattattggatgaagaaatatcgagttgaactggtttgaattttgtgggatggtggcagcactgtcccacattttttcataaggctatcgcacaattttcacaaatggcggctatactttatcatgtccatgactctgcatagaaaaaggggagagcattttgattcaagtcgaacatctgacgaaacgctacggcggccataccgctgtggatgacatcagctttaccgttgaggacggctgcatctacggcctgctggggccgaacggcgcgggcaagtctacgaccatgaatatcatcaccggctacctgtcggccaccgacggcaccgtgaccatcaacggccatgatattgccgaggaacccgccgccgccaaggcctgcatcggctatctgccggagcagccgccgctgtaccaggatatgactgtgcgggaatacctgctgtttgtggccgagctgaagggcacccgcaaaaaggccgaccgcatcgcggctgtagaaaacgcctgcgcccgcaccggtctgcaggagatggaagggcggctgatccgcaacctgtccaagggctaccgccagcgcgtgggtattgccggggcgctgctgggcacccccaaggtcatcatcctggacgagcccaccgtcggcctggatcctgcgcagatgatcgaaatccgcaacctgatccatgacctgggcaagacccacacggtcattttgtccagccatattttaagcgaggtgcagaccgtctgcgaccgcgttctcatcattgcccatggtaaactggtagcccagggcacgcccgaggaactggccggcaagctggccgccaagggcaccatctcggccaccgcccagggcgaacgggacgccgtgctggctgcggccgccaccgtgcccggcctgaccgacctgcgggtgaccgccgaaaagggcggcgaggtcagctttaccgccgtaagcgagagcggcgccgacctgcgcggtgcgctgtctctggcactggccaaggcaggctgcccggtgctgaatctgagagccgagagcatgagcctggaggatgtgttcctgcagctgaccgaggcgccggaagaaaccgaaacgaccgaaacggaaaccaatgaacaggaggcagaataaatggctgccatctttaaacgggaaaccaaaagctactacaccggcatggtgggctacgtcaccgcggcggtcagcctgtttttcctggggctgtactttaccaaccgcaacctgatgtacgcttcgtcggactttgcgtccgttttgtacacaactacgctgatcatgctgttcctgctgcccgccatcagcatgcgcagctttgccgaggaccgccgcaacaagaccgaccaattgctgctgaccagcccggtcagcgtccccggcatcgtgctgggcaagttcctggccgaggtcgtggtgtttgccctgccgctgaccgtggccgttattatgccgctgatcttgacggcattcggcacggtgtcgctggtgtcggcgttcagcgcactgtttgcgtatctgctgctgggcgcggtctgcctggctgtggggacctggatctcggcgctgaccgaaaaccagatcattgcctacctggccacctttggcgcgctgctcatcgcctacctgatgaacggcatcaagaccatgttcaccagcggcaacctgctggcgctcatcgtgtttttggtggtactgctcatcgcggctgtgctggtgggtgtgctttgcaaaagcctgccggttggcctgggcgtgttcagtgcgggcgctgtggtgctggtggtgctgttccagctgcgcccggcgtggctgctctcggcctttaacgcggtgctgggagcgctggcactgttccagccgttcaacggcgtagtgggcggcatgttcagcgtgtcggccatcgtgtactatctttcggtgatcgcgctgtttttgtttttgacggggcagtcgctggaacgccgccgttggcactaagggggcgttgaccatgaaaaagtttgacttgaaaaacctgcagggcagcaagcgcaccctgcgcagcggcagctacgccaccgtgctggccgtggtggtgttggcctttgtgatcctggtcaacctggtggtgcaggcattgcccagcaagtggaccgagtttgatatttccacttcgtccctgtttacgttaagcgatacatcgaaaaatctgctgcacgagctgaacagcgatgtcaccgcctactacctggtcgagtctgggcaggaggataccaacatcacccgcctgctggaccgctatgccgacgaaagcagccacttcggctggcagcagcgcgacccggtgctgtacccgacctttgcccagcagtacgacggcgcggccaccggctcggtcgttctgagctgcggcgataactaccgtgtggtgggctacaacgatatgtaccagctggacattgagaactactacaccagcggcagccagcagtacacctttgaagccgaaaacgccctgacaagcgccctggcccaggtcagccgcaccacggcctataagctctaccagctgaccggccacggcgaactggcgctggacaccgattttaccgacacgctgaccaacgccggtgtgaccaccgaggaactgaacctgaccacggcgggcagcatccccgccgatgccgacagcctgctgctgaacgcgcccctggccgacctgaccgaggccgaagccgccctgttgagcgactacgtaacaaacggcggcaagctgctggtcgtgaccgactttaccaccgacaccccgcgcctggatgccattttggaaagctgcggcatgacccaccaagcgggcttgctcattgaaaacgacgccaaccattacccctacggctacccccagacctacctgctgccgacggtgcagagcaacgagatcaccgccggtgtgggcagcaacatgatggtgtacacccccatcgcccagggcatcgtgaagcacgaggatggtgactacacctttaccagcctgctgtccaccagttcgaccgcttactcgatggaaggctacgccaccgccgagaccgcccagaaggccgacaccgaccccgaaggcagctttgacgtggccctggccgccgagaacaccaccaccggcacccgcgtggtgtggatcaactgccccaactttttgcagggcaccatcaaccagagcgtgtccggcggcaatgcccagttgctgggcagcatcgtcaactggttcgacggcgagcagaccaccgcggtcatcagcggcaagagcctgagcgccgccagcctgaccgtgcccaacaacatgatcatcgtgctggggctgctgtttaccattgtgctgcccatcgtgtgtgtggtggccgggcttgtgatctgcgtgatccggcgcagaagataaggagaccccatgaaccgtaaaaaaatgctgccgctggtgctgctggcggcgggggctgtgctgctgggcgtgctgctggcagtgctgacctgcgagaatgaggcggaggaagataccggcatcccgctggtggactttgccgccggggatgtggacgagctggcctactccggcaacaatgtggatgtgacgctgctcaagggcagcgagggcaactggatgctggactccgacccgaccctgccgctggagcagagcgccgtgcagagtttggtggagaagttcactgacctgaccgctgcccgccaactgcaggacagtgagctgggcgagatccccgcgatgagcgacaccccggccatggtatttaccctgaaggcaggaaagacgacccgcacgctgacggtggatcagctcaacgatgtggcaggcgtgtactacgtctacgatgacgcgggcggcgtgtacaccgtggccaaaagcgatttgaacaatctatgcaaggccccccgcagcctgtacgcggcacagagtttgaccgacaagaccagcgacgatgtgaccgccctgacggtgggcgacttgcagttcgttttgaacgagggcacctggcagctggccgatgatgccgattatgcgctggaccagagcgcggtgaagcggatggtaagcaccctttgcgagatgcagaccgagtggagcatcaccatgccggaagcggacagcacctacgggctggatgcgtcggatgtgacggcggtgctggcgtttagtgacggcacgcagctgaccgtgcggtttggtgatctggtgcccgatgccgcggacgacacggataccggcagcacgaccaccacgagtttgtgctatctggccagcgatggggcacccggcattgtctacgaggtaaaggctgcccacaaggacgcctttgctgtgacgaaggagagtttgctggatacctcgacaaaggaaacggcggccgccgatgatgtggtggcggaacactgaattatgagaattggctccccttgcggggagcctttttcacacctacccccttatacccggatgtaactctcttgcccccttgctgggaatatggtacaatgaacaaaagcgacagaaagggtatctgcttatgaaaaagtggtttgtttggcctgttttgctggcgggggtgctgtgtgcctgcggggcgcagccaacggggaagagcgctgtgaccctgcctatgaataccgagcgcccggtggtggtggacctgcctgctgacgaggcaggaccaacgcccgaaccgacgcccgcagcggaaacgaccttgaccgccgccgacctgacgctggaagaaaaagtcggccagctgttcattatccggccggattccctggatctgaccctgccgcaggagcaaatcgacgacgccaaggcggacggcgtgaccgagctgaccgacgccatgcgggacgcgctgcaaaagtatcccgtgggcggcgtgtgccaattcggcaaaaacatcgtggacccggaacagatcaccgccttcaacgcggccctgcaggaggcctccgacatcccactgtttatctcggtggacgaggagggcggcgcggtggcgcggctggccaataaagataccttcgacctgccccggtatgagagcgccgccgccgtgggagccgagggtgccgacgccgcctgtgccatggggcagaccattggcggctacctgcgtacctacggcttcaatatggatttcgcccccgacgccgacgtgaacaccaacccggataaccccatcatcggcacgcgggcgttttcgtccgacgccgccgaagccgccgattgcgcggcggccatggccaggggactggcgggcgagggaatcctgcccaccttcaagcatttccccggccacggcgataccgccgaggacagccacaccggcctggcctacagctaccgcacggtggaggaactgaccgcctgcgagctgctgccttttgaggccgccgccgaggttggcccccatgccgtgatggtggggcacatcgtggtgccggagctgaccggcgacctacccgcaacgctttgtgccgatgccattgcgctggtgccggatgcggagaacacgcttatcgttacagactcgctggccatgggggccatcaccgacagctacacccccggcgaagccgctgtgcaggctttgcaggccgggtgcgacgtgctgctgatgcccgacggcctggccgatgcctacgatgctgtgctggcggccgtgcagaatggcaccctcagcgaggaccggctggacctgagcgttaacaaaattttacgtatgaaagcgcaattctgcgcataagggaggctgccatgcagcaaaccgtctgggccgtggacggctcgttttttgcccagcgcatttcgggtatccagcgctattccatcgaactgctggccgcgctggatgagatggccccggcagggctggtggaacttgtggtgccgccgcaggtaaaagccccggcgtaccaaaatataaaggtggtgcccttcggcacccggcaggggctggcctggcagcagctggactacccgtgctacctgaaacggcgcagcgccaaggggctggctacctgcaacgtcatcccgtggttcgggtttaccggcattgcggtggtgcacgatgtctgctaccgcgcccggcaggatttttatagggacacccgccgcgaccggctgagcgccgcgtggcactgcctgcagtaccgccgcattgcccaaaaggccgagcgcattattacggtatcggaattttccaaggcggagatccacaaatactacggtgtgccgccggaaaagatgaatgttgtctacaacgcctggcagcagatgcagcgcatcgcgcccgatgacggtgtgtttgccaggcacccgcagctgcaaaagggcgggtactatttcagcatggcgaacctgctgaaaaacaagaacttcccctgggtgctgcgggccgccaaggccaagcccgatgcaatgtttgctatcgcgggcggcggcagcctggccgaggaagccgggcgcctgggtctggccgacctgcccaacgtagtctacctgggctatgtcagcgatggcgaagccaaaagcctgatggccaactgccgggcgtttttgttcccgaccctgtacgaggggttcggcatcccgccgctggaggccgtggcctgcggggcaaagcagatcctggtcagcgacacgccctgcatgcgggaggtatacggcgactgtgcggggtatattgacttggataccaaccccggcaacgtggacgacaccaccccaccccaagccgatccgcagctgctgctggaaaagtacagctgggagaaaagcgcggagaaattgttggacattttaaagaaggcataagtatgaacactcatcccgaattgatcgtgatgctgacgtacaacgatgtgacggtgccgcaggcggcggaggtgtttgccaagtgcgagcatacccgcgcgcggtactggggctttaaagaggcgggcctgccttttgccgagatgcgggacctgtttgcccgcatgaaagcctgcggcaagcagacctgcctggaagtggtggcttacaccgaggccgagtgcctgcgcggggccgagatggctgcggcctgcgggtgcgattttttgctgggcaccgtcttttcggaggccgtcaacgcctactgccgggcccacgggctgcggtacatgccctttgtggggcaggtgacggggcggccctcggtgctggaaggcacggcggaagagatggttcgtgaagcaaagcgctgcctggcccaaggcgcttacggcattgacctgctgggctaccgttacaccggcgatgccccggcgctgaaccgtgcgctgacggcggcggtggggccggtgtgcattgcaggcagcgtgaacagctacgcccggcaggcggagatccgcgcggcgggggctgcctattttaccatcggcagcgccttttttgaccatgtgttcggcgacgatttcgccgcccagatcgacgctgtctgcgcgtatatggaggccgaccatgcttgagcgctggtatccctggggctgggcgcccaacgtgtttgccatcgactatgccaaactgcaggcgctggggtataagggcattctgtttgatattgacaacacgctggtccaccacggcgcggatgcgacccctaaggtggaagcgctgttccgggaactggacgccatgggaatgaaaacgctgctcctctcggacaattccgccgagcgtatccagcggtttaataaacatatcggcgcgccctatatcgccgaggccggcaaacccgaccccgccgcttaccgccgtggggccaagatgctgggcctgccggtggagcaggtcgtctgcatcggggaccaggtgttccgggatatccggggcgcgaaccgctgcgggatggccagcattctggtggatttcatccgcctgccgcaggagacccactacggcaaaaagcgggtgctggaaaagtacatcatggcctgctggcgcagaaatccgcgctggcgggaccgcttggggaatatccaaaaataagaggtgcataccatgttttgcgatatcagcccgacctgctataagatcgccctgcaaaaagaaattatcaaacgacatatcaagaatttcctgcgccatgagcgctatgcggacacgcggcagagcgagccgctgccctgtctggtggcggactgcagctcccacctcatcaagcggggcaagggcattgacccggtgctgcaggagaacaaggctgtcaacatcaaacttgccaacgcccggatgaacggcatcctcatccgcccgggggagaccttctcgttctggcatctggtaggcaagaccaccaagcgcaagggctatcgggatggccgcattttggtgcgcaaccatctgctgccgggtatcggcggcgggctgtgcaatctggccaataccatccaccgggtggtgctgcttagccccctgacggtgacggagttccataagcactccgacgcgctggcccccgatgagggcgcgcgggtgcccttcagctccggtacctcggtgttttacaacaacggcgactaccggttcaaaaacgagaccgaccaaaccttccagctgctgctctggtgcgatgcggacaatctgtacgccgccctgcggtgcgagcacccgctgccgtacacctaccgcatcgtggaggagggacactacttccagcaggagggtgacaaatactaccgtgtatcgaagatttacaaagaaacactggacggagacaccgtggtggcgaaagagctggtgctggataaccactcggaagtcatgtatgattacgggttgatcccgaaagaacagatacgataaaagggggacgccaaaatgtttgcaaaggtcacgagcctggggctgagcgggctggcggggtatgtggtgcaggtcgaggccgatctctccagcgggctgccgcagttcacgctggtgggcctgccggactcggccgtgaaggaaagcagcgagcgggtgcgcagtgccgtcaaaaacctgcactacccttggccgtccagccgcatcaccatcaacctggctccggcggatgtgcgcaagaccggccctgtgtacgacctgcctttactggtgggcctgctggccgcccagggcgttctgcccgtgcccgcgccgcatcaggcctttttgggggaactgggcctggatggcacgctgcgccctgtgaccggcgtgctgcccatggcgctggcggctgtgactctgggcgtgaccgaactgttccttccggcagagaatgccgccgaagctgccgaggccgcaggcctgaccgtctacccggcccgcatggccagtgacgtggtgcgccatctttgcggggaagaagccatcaccccggccacccccggcggctttgacgaagcgggtacctggcttggccccgatatggccgatgtgcgcggtcaggccgaagcccgccgtgcgctggagatcgccgccgcaggcgggcacaacttactgctggtcggcccgccgggcacgggcaaaagcatgctggccaagcgcctgccgggcatcctgccgccgctgacctatgaggaagcgctggagaccagcgccatctactcggtggccgggctgctgcctgcgggcagcgggcttttgaaagagcggcccttccgtagcccgcaccacagcgtaagcaccgccgccatggcgggcggcgggtcgaccccgcgccccggtgaggtgagcctggcccacaacggtgtgctgtttttggacgaactgccggaattttcccgcgacaccctggaagtgctgcgtcagcccttggaggacggcgccgtcacggtgagccgggtacacggcaccgcccgctacccctgccagttcatgctggctgccgccatgaacccctgcaagtgcggctacctgggtcaccccacgcgggagtgtacctgcacgcccagcgccattgagcagtaccgccgccgcatctccggcccgctgctggaccgcatcgacctgcatgtggaagccatgcctgtggagtacgaggccctggccgccgaggccgggggagagagcagcgccgccatccgcgcccgcgttaccgccgcccgcaaggtgcagcaggagcgctgcacagacctgcccggcgtgcggtgcaacgcccagctgccgggggccgcactgcgaaaatactgccgcatgacccccaaggctcagcaaatcttgcgtgcggcatttgagcgcctgggatacagcgcccgcgcctacgaccgcattttgcgggtggcccgcaccatcgccgacctggacggcagcgagcaggtggacaccgcgcatatttccgaagcactgcaatatcgggcgctggatagaaaagcgatgtagagcatgtctggccccctctgcgggggtgactccccgcagtgcggggagatgtcgcgaagcgacagaggggttcggctgcgtaagcagtcccgcggagcgggtgggggagaaacaaagaaatagcagtagctaaaggtgctgtctctcccttgtcgtcagcatcccctttgccgaggcggacgacgcccagcgcgccgccgtgctggccccgcacaagacgggggagaccaccgccgactttaccggcaaacgggtgctgctggccgaggacaatgccctgaacgctgagatcgccgtggagctgctgcaaagcattggtctgaaagtggactgggccgaggacgggcagaaggcagtggaaatgtttgaaaagtcggcccccggcagctattttgcggtgttcatggacatgcagatgccggtgatggacggcgtggaggccacccgccgtatccgcgccagtgaccgtcccgaccacgatgtgtccatctttgccatgacggccaacacctttgccgccgaccgcaaaaagtgctacgatgcgggcatgagcggctatatccccaagccgatcgaccttgaaaccatcacccatgtgttggaagaggagaccggcgaataaagcaaacaagcaatgcgccctgccgggatggtgggacgcatttattttgcgataggtttttgggaaaagcacctgcgccccttatacaactgaataactcaataagtggttataaaaattacatatctaagttatatttaaccacttattaaactgtaaaagtggttagaaagtggtataccacttttgcagttattgggtatataaggggcaaaaagtggtggaaatggggtgcaagaattgttctatttgctgcttgcccggccctgcctgccttgcggcagggccttttattatgggattcttccattaggcttaccttttttggtctccaaaaggaacacataaaggc

SEQ ID NO: 7969 - DNA, 2062 bp, Unknown
  gut microbiota DNA sequence
agtctcgctgttgcgaggcagcgcgctatcggaagtagcaggtaccttttcggttctttttgggtctccaaaaggaacacgtaaaggcagaaagccgttaaaacgagtgaagcgccgcaaggtggcgaggaacgaaagccaccctgcaaaaccaaagcaacaaatcggtaaaaatagccaaaattcaattgacacaccgcacagaagttggtatatttagtatagtatcaaccatagaaagtgcaggtgtatatacttatgtataaggaaatgtatgaccgctggctggcggctgacctggccgatgcagatctgaagcccgaactggaaagcgttaaggacgacgacgctgccatccaggaccgctttgctgtggccctgaagttcggcaccgcaggccttcgcggtgtcatcggcgcgggtaccaaccgcatgaacatctacgtcgtgcggcaggctacccagggcctggccaattgggtcaagacccagggcggcagccagaccgtcgccatcagctacgacagccgtatcaagagcgacgtctttgccaagaccgccgctgaggtgctggccgccaacggcatcaaggtgcgcatctacagcgccctcatgcccgtgcctgccctgagctttgctacccgctactacaactgcaatgcgggcatcatggtcacggccagccacaaccctgccaagtataacggctacaaggcctacggcccggacggctgccagatgaccgatgaagccgctgacatcgtgtatgccgaaattcagaaaaccgacatcctcaccggcgccaagctcatctcctttgaggacggcatggcccagggcctgattgagtacgtcggtgacgactgcatcaacgccctgtacgccgccatcgaggcccgctccatccgccccggcatttgcaagaccgccggcctcaagctggtctacagcccgctgaacggctccggcctggtgcccgtcacccatgtgttgaaggacatcggcatcaccgacatcaccgtcgtgcccgagcaggagaagccggacggcaatttccccacctgcccgtaccccaaccccgagatcttcgaggccctgcgcctcggcctggagctggcaaagaagtccggcgctgacctgatgctggccaccgaccccgacgccgaccgcgtgggcattgccgtcaagtgcaaggacggcagctatgagctgctctccggcaacgaggtgggcgtgctgctgctggactacatctgcgcgggccgcatcgagcaggggaccatgcccaagaacgccgtcatgtgcaagtccatcgtctccaccccgctggccgacaaggtggccgagcactacggcgtggagtgccgcaatgtgctgaccggcttcaagtggatcggtgaccagatcgccaagctggaggccgccggtgaggtggaccgcttcatcttcggcttcgaggagagctacggctacctggccggtccctacgtgcgtgacaaggacgccatcatcggctcgatgctgatctgcgagatggctgcctactaccgcgccaagggttcctccatcaaggaagaactggagcgtatctacgctgaatacggccgctacctgaacaaggtcgacagcttcgagttcccgggtctgtccggcatggacaaaatggccgacatcatgcagaacctgcgcgacaacccgccgaaggacttcgccggggacaaggtcgtcaaggtcgtggactacaagaagcccgaggagaccggcctgcccgccgccaacgtgctgatctacacgctggaaagcggcgccaccgtggtggtgcgcccctccggcaccgagccgaagatcaagacctacttcaccaccaagggcaaagacctggccgaggccgaagcccagaaagaaaagctggccgaagcctgcaagccgctgctggcgtaaaagttaaataaaaggctccccttgaggggcgctgtcagcgaagctgactgaggggtggctcccgtaaggccacacgctaaagtagccacccctcacccgcctggcggcgggagcgcccctc

SEQ ID NO: 7970 - DNA, 31472 bp, Unknown
  gut microbiota DNA sequence
ggggagcctttttatgtgtccgcgggccgatatggaatcagcccctacggcatctgcgcaaccccacccgtaggggcggattctgtatccgcccgtgcgcttgccgcatgtgtaggcccatttggaaacattttagaaatagttgtaaaatctgccgcacaccgttgacttttgccggtggtacattacaataaaagtatacctattatataaattgcatcaagaaggaggcttatctatgtctgccatttcccgccgtgccgccggtttggcggcagtgctgctttgcgccggggtgctggctgggtgcgccgcacctgcctcggaatccgccgctggacccacgccggaaccggaatccttggcagcatccaccacgctggacgccaaccgccgtgaaccgattgacccggaatacctgacgcaattggcggtagcggccgagcgcgcggccaactactggcagacggtactggacgagaacgccatccgctatatcaccacccgcgtgggcatgtccggcgtggtcgaccctgccgatgacgaggaggccgccgacctgctggacaataccgacgccggcagcggcacggactaccgcacaaaaatcgacgatggtgaggcctttttggtcaaggtcagcttttatgtcgtctactcgcccgaggctgactacggcggcacccagtaccccgacggcaccaacagcatctacgtgtttaccccggtggacgacgcccggccctgcgaggccatcagcggctggtacagtaccgacagcaccgccgccatcccggaactgagcgacgaggcccgcgagttgaacttgaacgagtggcagcacacgatgctggtgcaccagtgccgcgccctggccgcggcgggcatcaccgattttgccgcccctgccgactggaccgaggagcagacggcctattacctcgccgcccgcagccgggactacggcccaaacctgctgggctttacggcggaacaggccaaccgattgctgaccatcgactttaccgccgaggacgattggagcagtaacgcccgcttttttgccatcgattggcccggcaccaccgccaccgccgacgacctgcccgaaacgcccgcctacacctgggcgtatgccaacaacaacggcaccatcaccgccaccggcagcgtggacggcacccccgccgtgcagtacaccttttccatttataatggcagtgatttaaaatgggacgcccgcaccgtgtgcaccgggggaaagagcctgtaagtcaacacaaaaaaatacttgacatcgccccaaaaatccgctataatatttcagcaatcgttcagatggctgctccgcccgcacaggatggtgggcgctggtagccgcaattcggagattgtgatgagcacatatatcaagtatggctcccgttatcataatcgagaaagaggtgaaaataccatgaagcagggcatccatccgaactatgtggactgcaccatcacttgcgcctgcggcaacgtgattcacacccgtgacaccaagccggagatccacgtcgaagtttgcagcaagtgccatccgttctacaccggcaagcagaagctggtcgataccggtggccgcgtcgagcgtttcaagcgccgttttgccaagtccggcaagtaatttttccaaagcttttgaccccagatggcgacatctggggttttttgatgtgctgagctttgctcagctcaaagaaggggttcgtcgctgtgtggctgcgccacgctcctgcacccctcctttggattcgccccgtcgcaaaaaagcacattttcgcgcctgacgacacaaaaatgcacttttttgctctagaagtatccgcatcgtcggcgcatgtccgccgatgcggatgtttttgtataattccaaggagtgccgccatgtctgactacaagaccctgcgggggacctcgacctttacgtacgaggaaaagcgcagccgctttattgccaccgccgcctttgccgataccgaggaaaaggctctggctgtgctgaacgccgtgcgcgccgccaaccgcaccgcgcggcataacgtctatgcctacgtgctgcaaaacggccgcacccgctactccgacgacggcgaacccgccaagacggccggcaccccggtgctggagaccatcggccacgcgggcgtgtcggacgtgatcgtagtcgtcacgcggtatttcggcggtatcctgctgggcaccggcggcctggtgcgcgcctacacggcggctgccggcggcgcactgcaaaatgccgaacttgtcagcatgcggctggtggtggactgccgcctgcggatgccctacgcccagttcgagcaggcccagcgcattatcgctgcggccggggccaagccggaggagcccgtgtttgacgatgccgttaccctgctttggcggatgcctgccggggaggaaggccctctgtgtgccaagctgaccgaactgacccgcggcagcgccgaagtcaccgtttcggcagcgatgtacgcaccgttttgatttttgctgcggcttttcagggccaggattcctctacgcctttttgtaggggccgatactcgtcatcggcccgcataggcgggcggctacttgcggggcgatgcaagcatcgccccctacagcctcatgcaaggtggtattgtagggagaggggcttgccccccttccgcagaaccgactttgaattttttcaaaaaattccgcataaaaaaagagtatttcgccaagttttatcgtatttatatatagagggaaaaataaggcagaactgcccccgtgcgccgcagctgcagaacggcgcaaaagcagggctgccataagccggaaagggggctgctgaccatgaccatccgcgaagagacccaggcaatcgagcgccagaccctgagccgctacgccaccctgagccaatccacccggggccgccgccgcccggaggacgaggaccccatccgcccgtgctaccagcgggaccgcgaccgcattatccactgcaaggcgttccgccgcctgaagcagaagacccaagtctttctttcgcccgagggggaccattaccgcacccggctgacccacacgctggaggtcgcgcagatcgcccgcaccatcgcccgcgccctgcggctgaacgaggatctgaccgaggccatcgccctgggccacgacctgggccataccccctttggccacgcgggggagcgcgcgctgaaccgcctgtgccccggcggctttacccactaccgccaaagcctgcgggtggtggatttcctggaaaaagacggcagtggcctcaacctgacctgggaggtgcgcaacggcatcgttacccacaccaccggcgcttgggcccgcacgcctgagggctgcgtggtgcgccgcgcggatcacatcgcctttttgaaccacgacatcgaggatgccgtcaccgccggtgtgctggatccccgccagctcccgcccgaagccgtggccgtgctgggcaccaccaagtcccagcgtatcaccacgatgataacggatttgatcgagcacagccagaacggccgcatcaacttttcgcccgaagtggacgccgcctacgccgtgctgaaggacttcatgtactccacagtctacgtggacaaggaagccaagcgcgaggaaaaaaaggtggacaagctcgtggccgagttgtacgagcgcctgtgcgaggagccgaccctgatgcccaacttctacctgcagatcgcctacaacgagggcgtcgaccgcgccgtgaccgattacatcagcggcatgagcgatgaattcgccacccggctttttgaggatctgtttgtcccccaaaagtggacggttttatgattttgttttaagtgggcggcttttgcctggcgccgcaaggtggcggcatccgtcaactgctaacaaaaaataaagcaaaaaggaggtgccccacgcaggtatgatcccccaggaatacatccaggaagtcgttcgccgcaacgatattgaggacatcgtaggccaatacgtccagctccgccgccgcgggcgcaccctcaccggcctttgcccgttccataacgaaaaaacgccttccttcgtggtttacccggacactcagagcttttactgcttcggctgcggcgcggcaggggatgttatcagctttgtgcgcaagtacaataacctcggctatgtcgagaccgtcaaacagctggccagccgtgcaggcatgcccctgcccgaggaggacgataaggaatcccgcgccaggcagcgcctcttagagatcaatcgctgcgccgcccgctacttttacgagcagctcaacgcccgcacgcccgaagccgccctggcccgccgctactggcgggaaaagcgcggcctgtccgatgccgccatccgccgcttcggtctgggctacgcgcccgaggatttcaccggtctgctgcattacctgcgccgcctcggcttctccgaggaagagctggaatactccggcctcgtcaagcgcagcgccaagggcaatctctacgacatcttccgccaccgcgtcatggtgcctatcatcgatgtgcgcggggccatcatcgccttcggcggccgtgtgctggacgactccaaacccaagtacatcaacagccccgagacgatggtgtacaaaaagtcccgcacgctgtttgccctgaatgtggccaaaaaatcgacgaataaacgttatattttgtgcgagggctacatggacgtcatctcgatgcacgaggctgggtttgacaccgccgtctgcgcctgcggtaccgccttgacgcccgaacaggtcaaactgctgaccgaatacgccgacgaagtggtgctgagttatgactccgacgaggcgggccagaaggccaccgcccgcagcctggccatgttcaccgacgccgacatcaaggtgcgggtgctgagctaccagggcgctaaagacccggacgagttcattaaaaaatacggcaaggagcggttcgccatgctgctggacggcagcgctgacccgacggagttccagctgaaaaaggctgccgccaactatgacctgcgggattcggccgggcggctgaactacctcaaggacgccatcgacatcctggcccgcaagggcgttacccccacagcgcgggacgtctacgcaggccgcctggccgaggagaccggcgtgggtaaaaaggcgatcttggagcagatgaacgatgtgctgcgcagcacccagcgccgcgaccgccgcaaagagcagcgcgacctggccgggcagggcaatgccgccgacatccgggtgccctacagcgccgggggagatgccgctttgggtgccgccagtgccgggcggcaactcatcgccgcgctgctgcaaagccccgaaaagatcccctatgtgcgccagcgtttgaacatggacgccgtggtcctgcccgaaatgcaggaggccctgcgggctattttccgctgtgcggacgagcagctgccggtgaacatcaccagcctgcagcagatgctggacgataagccgatggccgaagtcaaccgcgcccaggccgtcaacgccgggcaccccctccagcagaaggacattgacatgtacctggaacggctggacaacgccaagcccatcagccagaccgtcaaaggcactaccgacgaccagtttttaagcgccttctcgaaactccgcaaggaaaaaggcgcggccgatccgccccaatctgattgaagaatttctctcaaacatccgtgttcatataaaaaaccaaaggagaacgtacttatggcagaaaagaaagattctatccgcagcttgatcgagaccggccgccgtgccggcaagctgaccaacagcgagatcagcgacgcgatggaggagagcggtcacgtcctggacgtggagcagatggaaaagctctacgaggaactggagagcaacggtatcgaggttatcgatgatgaccccgtcagcgatgtggacgccagcctgctgagcggcaccactgaggaaggcgccgacgacttcgacgacgccctgaataccgacggcattaccatcgacgaccccgtcaaggtctacctgaaagagatcggccgcgtgcccctgctgacccccgaggaggagatcgacctggccctgaaaattcaggccggcggccccgagggcgagaaagccaaaaagcgcctgagcgaagccaacctgcgtctggtcgtttccatcgccaagcgttacgtcggccgcggcatgcagttcctggacctgatccaggagggtaacctgggcctgatcaaggctgtggaaaagttcgaccacaccaagggcttcaagttctctacctacgcaacgtggtggatccgtcaggccatcacccgcgccattgccgaccaggcccgcaccatccgcatcccggtgcatatggtcgagaccatcaacaaggtcaagaaggtctccagccagctgctgcatgagtacggccatgaccccagcgccgaggaaattgccgagcgcctggagatgcctgtggataaggtgcgcgagatcatgcgtgtggcccaggagcctgtcagcctggagacccccatcggtgaggaggaggacagccatctgggtgacttcatccccgacgatgacgcccccgtgcccgccgaggccgccagccagaccctgctgaaagagcagctggccgacgtgctgaagaccctgaccccccgtgaggagaaggtcctgcgcctgcgcttcggcctggaggatggccgcccccgcacgctggaagaggtcggcaaggagttcaacgtcacccgtgaacgcatccgccagatcgaagccaaggccctgcgcaagctccgccaccccagccgcagcaaaaaactgcgcgacttcctggattgatttgacagcataatatagcaagagccgctcccttccattggaagggagcggctcttttgtgtagatgttttggaacttacagctcctcgccgttggtctcgatcactttacggtaccaatcgaagctgtcttttttataccgcttgaagctgccgtggccctggtcgtcacaatcgacgtagatgaaaccgtagcgcttggccatctcgccggtggaggcggagaccaggtcgatgcagccccacacggtgtagccgaacaggtccacgccgtcctcctcgacagcctgcttcatggcgcggatgtgccgctgcaggtagtcgatgcggtaggggtcgtggatgctgccgtcagcttccagcgcgtcccgggcacccaggccgttttccacgatgatgatgggcagatcataccggctctcgatctcgttgagggtgtagcgcaggccgtccgggtcgacctgccagccccactggctggactccaggtacgggttcttcgcgccgcccagcaggttgccggaggcctgagccgcattggggtcgaccgtcacgcagttggtctgatagtaggagagggagaagaaatccaccgtgccgcggcgcagggtctcgcggtcctcatcggtgatctccagatggatgccgtttttctcccagaagctctgggcgtagtaggggtaggcaccgcggcactgcacatcggcacagtaccagttgaactgccgccagttctgctggaattccagcatgtccttggggttgcaggtcaaggggtagacgggcatcatggcgatcatgttgccgatcttcgcctctggatccagctcatgcccggccagcacggtgcgggcgctggccacaagctggtgatgcagcgcctgataccgcacctgcacatcatccacctgatgcaggaaatcccgcgtgccctcgttgcggatgcccagggacatgtagttgcccaggggcagggtgccgcagttgatctcgttgaaggtcaggtagtaccgcaccttgcccttgaagtgggcaatcaccgtacgggcgtaacgctcaaacagcgcgatcacctcgcgggaggcccagccgttgtacttgttgaccaggtgcagcggcatctcgtagtgggacagggtcacgatcggctcaatgccgtgggctttcagctcgtcaaagacgtcatcgtagaactgcaggccggccgggttcggctcggtctcctcgccggtggggaagatgcggctccacgcgatggacatgcggtaggctttaaagcccatctcgcacatcagggcgatgtcctctttataatggtggtaaaagtcgctggcggtgcggttggggtaggtcaggcccggctcggtgtcaggtgtgatctgacggggagaggtatgcgtcccggcagaaagcatatccgcctcgctggggccctttccgccctcttgccagccgccctcgatctggttggcggcggtggcaccgccccagagaaagtctttgcaaaacggcataaaaagcatcctttcgggagaaaattacttgttggcagcttcgggcttgtacaggacccaggtggctgcgaaggtggccacagcgcccaccagcacggagatgaccatgaacagcaggttgttgggcttgtcagcgctgacgaacagtggcagagcgatgacagaggaagcacccgcaaaggcatagatagcggtcttgagcagacctgccacgcaaccgccgatggcagaaccgatcatggcgccgtacatgggggtcttgtacttcaggttgatggcgtacatggcaggctcggtaacaccggccacaacagcggtgacagcggtggagaagccggtggacttcaggttggtgtccttggttttgagagcgacagccagtgcagcaatgccctgatcgatgttggagatgatcagtgcggggaagaagatgggctcgtacagggggtcaacggtcagcatctgcatcaggtagggaacaaaggcaccgtgcataccggtcatgataacgaacggcatcacagcggcaaaggcggccacaccgatgaagcccagggtgttgtacagccacaggacgaaggtgctcaggtaggtgcccaggaaagaaccgatggggccgaggacgcagtaggccagggggatcatgacgatgatggtcagcagcggttccagcacggaacgcaggatgtcaggggagtgcttggcaaagaacttctcgatgggggccatgacggcgcagcacaggatgatggggaagatggtgctggagtagcccacgccgtacacggggatgcccaggaagttgaaggcggtgccgtcgctgacgccgctggcaaaggacgggtagatcagcaggccgccgatgaccatgcccaaggcggggttggcaccaaacttcttggcggcgaatgcgccgatcatgatgggcaggaagtagaagccagcgtcaccggcaaaggtgagcagctggtatgtgccgctgtcggcgggcacgccggccatgtccatcaggatcaggatgaccttgatcatgccgcagccaatcagagcggggataagcggggtcagcgagccggagatgccgtcgaagattttgtcgatgacagccttgacacccttcttctgggcgggcttttcatcgtccaacttctcgtccacggatttctctacggcgaagccgttcttctcgcaaatcaggcggtaggcatcgttgacagcctggccgatgatgatctggtactggccgttctgccactgggagccgagaacaccgggcagtttttcgatttcgtcttttttaacggcggactcgtccttcacgttaaaacgcaggcgggtcacgcagtgggtaaagaactggacattggctttgccgccgacaagaccaacgatcttgtcagagagctcctgatatttctgtgccattattggttcctctttcttgattttcagtgtgtttggtatatctgtacaaagggtgcgcgcttccctttattacatgcgaggttaagcctgctcgcgggagcagaaccgttcgatatgaagcatgagataggacatttcctcgcttcccaggttcttgccggtcttttgctgcaggtaggtgcggacatcctccgcacacaggtaagtctctctatactcctgtttcagattgttgaagagtttgtcgttgttgttttccagtgtctcgttgttgcggatgcgggccagcaggtattccatgtgggtgataaagcggctggcgttgaagccagaacggtcaatggtgatgttctcccgcttttcgatcaggccgatgacatcgctgatcatcgtgctggcgtcgaggaaatcggccttcggggccacggagttctcggcgttgatgagatgcagcgcaatggcggcggcttcttctttgggtaggcgcacaccgaagcgctggttgatgcacgccacagcctgggtggcaaccttgtactctgcttcgtgcaggtaagccaggttgccgacgtagggcggcttgatgtggatgtttttcttgtagcggtcgatggcaaagttgatgtggtccgccagggtgatgaccaggttgcggttgaaatcggcatcgatactgttggcggccagatcaacgagcatacccgagacatcgaagatctccttggggatctctttcagcaggccctggtattcggggctgatgccgtagtaggtgcgctcaatgaccgagaggtccgtcagctcgtatgggatgggcttgaagccgatgcccttgccaaaggcgatgagctcacgctggttgccatccaggcacagcgctacgttattgttgatctttttgatgactttcatgggctcaccttccttatacggggtaaaatgaacatgcgggcaaaaaaataagacacgaccatacaggtgcattttctgcatctgtcaatggtcatgcctcccgaagagtaacaatccgttaacgtatgttcatttttctttcatattttacgatgtccccccaaaaaagtcaatcggcgaactcgcacaaaaagatgaacgtattcttgtgcatattgctattgcgtgacttggacagccttattttgccgtccggcaatacacctcgatcgccttgctggcaaactcggcggtaccggggccacctgcggcgttgatgttttgggtaaacgcaccgcctgcggtgtacagctggccgagctggcccaaaatggttttggagcaggtgtagtaatgctcgctgataaaatcttgcagcttcttcacctgggcctgcacggcgggggcggcagggtccatgctttgcatcttaccgaaagctgcaatgatttccatcagctggccgcccatagcggaaacctctttttccgtcttgagggcggtcttttgctcaaactctttgtactccggcgtggcgccccactgctgcttggcctgggcggcgtagtccttgatcttctgtgtatcaaatgcggtaaaatccataatggttcctcctgtggtttgtgtctttttcgcaagggcgatgagatcctcgatatgctgtcgcttcagcttcagcagttcgatctgctgctccagcgccttttctcggtcgaaggcggaattagataggatccgctgaatgtctttcagcgaaaattccaattcccggaacaacaggatttgctgcaaacgttccagcgctgtatcgtcatacaggcggtagccgctgtcggtatgcccggcggcgggcagcaggccgatctggtcgtaatagtgcagcgcgcgtatactcacgccggtcaggcggctgacttcgtttacggtcatcatggggggacacctcactttcccttgcggtaagtatagcatacactatgacgcagcgtaagggtcaagacggaaaataggggaaggtacgtgaaaaaaaatcatcttgaagttttatctcatttgtgctacacttgtggtcgtgtgagaaacaacccggagggacgtaggaaaaatggaaaacgaaaaaagaagcagcttttccggcaggattggctttgtgctctcggcagccggggcgtcggtgggactgggcaatatctggcggttcccgtacctggcggccaaatatggcggcggaatcttccttttgatttatatcgtgctggcgcttacctttggctacacgatgatcatggccgaaacggccctgggccgcatgaccggcaaaagcccggtgggcgcttacgccagctttgccaagccgggcaagcgcggcgggttcttaggcttcggcggctggatcaacgccatcatcccggtgctgatcgtaccgtattactcggtcatcggcggctgggtcatccggtatctggtggggtatctcgccggccaaagccgggcgctggcggcggacggcttcttctcagatttcatttccaacggtgctgtaacagagatctgcttcctggcctttgcgctgttcacgctgggcatcatctttgcgggtgtgcgcaacggcgtcgagcgtgtctccaaagtaatgatgccggtgctggtggtgctgtcggtcattatcactgcctactcggtcacgcggccgggagcgctggcgggcgtcaagtatttcctggtgccgaaccccgccaacttcagctggatgacggtggtcacggcgatggggcagatgttctactcgctgtccatcgccatgggcatcctggtcactttcggttcctatatgaaaaaggacgtctccatcgaggacgcgacccagaacgtcgaggtgttcgacacgatcatcgccgtcatggcgggcctgatgatcattccggcagtgtttgccttctccgatggcgagccggacaccctgcaggcggggcccgcgttgatgttcattacgctccccaaagtttttgccagcatggacctgggcagggcggtaggcgtgctgttctttgtgctggtgctgtttgcggcggtcaccagctccatcgcgctgaccgaaagcgcggtctccaccttccaggatgagctgggctggagccgccgcaaggccacagtgctggtgggtgttatcatggtagggctgggcacgctgtccagcctgggctacggcccgctggccggggtgacggtgctgggcatgcagttcctcgatttcttcgacttccttaccaactcggtgatgatgccgatcgcggccatcgccacctgcctgctggtgtcccgcgtggtaggcgttgagcgcatcgaacacgaggtcaccctcgagggcgggagcttccgccggaagaaggtcttcaattttatgatccgctggctctgcccggtgttcgcggcgatcattctggccagttccgtggccaatgcgtttgggatcattgctatgtaaaacaggggacaggctccccgtgttctatccaacacaacatcttgcgcctcctcttttgagggggcgcttttctttcagagcgcgattgtcaagagcaatcctgcgcaaaaaggtgtccacatccttgtgaaaactgcccaaaagcggggaatatagcacccgttacgaatttgtcaacccctgcaaaacagtgcaaaatcgtcaatatgccgaaattttgttacactcgcccgggcgttcgacggccaagaaaaacttcgcaaaaaagccgaaaaagccttgacagcaagccttttaccatgtatactgaaacagtatcacaaaaatggaatagagcgccctaaagggattttgcgaaaacgacaaaattcaaaagtttgtgaaaaacgacgaatatacatcgctttcgcacagctcctttaggtcggcttttaccgactttgtcaatctacggaataggagtggtcgcgttttatggtaaaggtcaagcccgtacaaaacggcagaacgacccgcatgagcttttcccgcatcaacgaagtgattggcatgcccaatctgatcgagatccagaaaaactcttacaactggttcctggaggaaggtctgcacgaagtcttccacgatattgccgctatcgaggactataccggcaatctcgtgctggagtttgtggactaccgcctggacaaaacccccaagtataccattaaagaatgtaaggaacgggacgctacgtatgcagcgcccctgtacgtcactgcccgtctgttcaataagcagaccggcgaggtcaaggagcaggagatcttcatgggcgacttcccgctcatgaccgattccggcacctttatctccaatggtgccgagcgtgcaatcgtttcccagttggttcgttctcccggcgtgttctacggctccagcaaggaccgtaccggcaaggacctgttcaccgccaccatgaaccccaaccgcggtgcctggctggagtacgagaccgactcccaggacgttttctatgtccgcatcgataagaaccgcaagctgcctgtcacgaccctgatccgtgccctgggcctgtccaccgatgagcagatcaagcagttcttcggcgattccgagccgaagatcaacgcttctctcgaaaaggacatcacccataacaccgaggaaggcctgctggaagtctaccgcaagctgcgccccggcgagcccccgacggtcgagagctcccgctcccacctggacgccctgttcttcgacccgcgccgctacgacctggctcgtttcggccgttataagatgaacaacaagctcgcgctggcccgccgcattgccggttacaaggccgccgaggacatcatcgcccccctgaccggcgaactgctggccgccaagggcgagaagatcaacctggccaaggccaacgagatcgatgccgccggtgttacccgcgtcaccgttctggtggagaagaagggccaggaggcttaccccgtcatcgtcatctccaacggctgcgtggacgcccagcccttcttcagcttcgatgtcgatgctgaggccggcatcaacgagcgcgccaacttcgccgagattcgcaaaatccttgaggccacctctgaccccgaggagcagaaagagttgctgcgccagaatcacgatgttctgatcagccgcaccgtcaccgtcgatgacatcttcgcttccatcaactacctgctgggccttgaccacggtatcggcgtgaccgacgagatcgaccacctgggcaaccgtcgtgtccgcagcgtcggcgagctgctgcagaaccagttccgcatcggcttctcccgcatggagcgcgtcatccgtgagcgtatgaccctgcagaaccaggagaacggcgagatcaccccgcagagcctggtcaacatccgccccgtcgtggccgctatcaaagagttcatcggctccagcccgctgtctcagttcatggaccagaacaaccccctggccgagctgacccacaagcgtcgtctgtctgccctgggccccggcggtctgtcccgtgaccgcgcaggtttcgaggtccgtgacgttcattatacccactacggccgtctgtgcccgatcgagacccctgaaggtcccaacatcggtctgatctcctacctggctacctacgccaagatcaacaagtacggctttgtcgaggccccgtaccgcaaggtcgataaggctaccggaaccgtcaccgacgaggtcgtctacatgaccgccgacgtcgaggacgaatatatcgttgcccaggccaacgagccgctggacgagaacaatcacttcgtccgtccccgcgtttccggccgtcaccgcaacgacatccaggagttcgacgcttctcaggtcgacttcatggacgtttctccccgtatgatggtttccgtcgctacggcctgcatcccgttcctggagaacgacgactgtaaccgtgccctgatgggctctaacatgcagcgtcaggccgtgcctctgatggtcacccagcagcccatcgttgctaccggtatggagtacaaggctgctaccgactccggcgtctgcatcctggctgcccgcgaaggcaccgttgagtttgtcgacgccgagaagatcgtcgtgcgctgcccggacggttctgccgacacctatgagctgatcaagttcatgcgctccaaccagggcaactgcaacaaccagcgccccatcgtcaatgttggcgatgtcgtcaaggcaggcgacgtgctggctgacggtcccgccaccaagaacggcgagatcagcctgggcaagaacgccctgatcggcttcatgacctgggaaggctacaactacgaggacgccgttctgctgaacgagaagctggtccgcgaggatgtctacacctccatccacatcgaggagtacgagaccgaagcccgcgacaccaagctgggacccgaggagatcactcgtgacatccccaacgtcggcgacgacgccctgaaagacctggacgaccgcggcatcatccgcatcggtgccgaggtcaagaccggcgacatcctggtcggcaaggtcaccccgaagggcgagaccgagctgaccgccgaggagcgcctgctgcgcgccatcttcggtgagaaggcccgcgaagtccgcgatacttctctgcgcgtgccccacggtgcttacggtatcgtggtcgacgttaaggtctttacccccgagaacagcgacgagctgcagcccggcgtgcgtatgtgcgtgcgctgctacatcgcccagaagcgtaagatcagcgttggcgataagatggctggccgtcatggcaacaagggtgtcgtttcccgcatcctgccgcaggaggacatgcccttcctgcccgacggcaccccgctggacatcgtgctgaaccccctgggcgttccttcccgtatgaacatcggtcaggtgctggaagtcaacctgggctacgttgccaaggctctgggctggaaggtccagacccccgtcttcgacggcgcccacgaagccgacctgcgtgactgcttcgccgaggcccgcgagaagtggcacggcgagaacgcccccgagtatccgaccaagctgccccgcctgatgggtgagaatggccacatcattgatttttccaagatcgatctgaccgacgacggcaagaccaccgtttacgatggccgtaccggcgagaagttccccagcaaggtcacggtcggctatatgtactacctcaagctgcatcacctggtcgatgataagatccatgcccgttccaccggcccgtactccatggtcacccagcagcctctgggcggcaaggcccagttcggcggccagcgcttcggcgagatggaagtctgggcgctggaagcttacggcgccgcttacaccctgcaggagatcctgaccatcaaatccgacgatgtcgtgggccgtgtcaagacctacgaggccatcgtcaagggcgatcccatcccgcgtcccggcatccccgagagcttccgcgttatgctcaaagagctgcagagccttggcctggatatcgttgtgcaggataaggaaggcaacgccgttgacatgcgtcaggaatttgacgacgatgacagcagctttgaaaacagcgattacgacctgggcgataatgtcatggtcgaaagcgagctgcaggatgagtacagcgtcaaggatgccgatgaaggctttgatgatgatctggacgaggatgccggccccagcgctgaggatctcgctgcgatcgagtctgattccttcgacgattgatcgctgaatcgtgtgtcatattgaatttgagagggttcgctgaatggaaaataaagaattcgattctattaagatcggccttgcctccccggaccagatccgtgcctggagctatggtgaggtcaccaagcccgaaaccatcaactaccgtaccctgaagccggagcgcgacggcctgtactgcgagcgcatttttggacctactaaggactgggagtgccactgcggtaagtacaagcgcatccgctacaagggtaagatctgcgataagtgcggtgttgaagtcacccgcgccaaggtccgccgtgagcgcatgggccacatcgagctggctgcacccgtttcgcacatctggtatttcaagggtatccccagccgtatcggcctgatgctggacatcagcccccgtcagctggataaagtcctctacttcgccaactacatcgttaccgaccccggtttcaccccgctggagaaaaaacagctgctgaccgagcgcgagtacaaggagatgcgcgaaaagtacgaggacacgtttgaagccggcatgggtgctgaagccatccagaagctgctggctgagatcgacctcgaaaagctctctgccgagctgcgcgaggaactggagcatgccaacggccagaagcgcgtccgcctgctgaagcgtctcgagtgcgtcgagagcttcctggagagcaaccagcgccccgagtggatgatcatgacggtcatccccgtgatcccgccggatctgcgcccgttgctgcagctggatggcggccgtttcgccacctccgacctgaacgatctgtatcgccgtgtcatcaaccgcaacaaccgtctgcgccgcctgctggagttgggggcgcccgacatcatcgtgcgcaacgagaaacgtatgctgcaggaagctgtcgatgccctgatcgataacggccgccgcggccgcccggtcaccggcgccaacaaccgtgcgctgaagtccctgtccgatatgctgaaaggcaagcagggccgcttccgccagaacctgctgggcaagcgtgttgactactccggccgttccgttatcgtcgtcggccccgagctgaagatgtatcagtgcggtctgcctaaggagatggccctcgagctgttcaagcccttcgtcatgaaggacctggtcgagaaggagaaggccaacaacatcaagtccgcccgcaagatggtcgagcgtgcccgccctgaggtctgggactctctggagaccgtcatcaaaggccaccccgtcctgctgaaccgtgcacctacgctgcaccgtctgggcatccaggctttcgagcctgtcctggtcgagggccgtgccatcaagctgcaccccctggtctgcacccccttcaacgccgacttcgacggcgaccagatggctgtccatctgccgctgtccaccgaggcccagcgtgaagccaagatgctgatgctggcctccggcaacctgctgaagccctctgacggcgagcctgtcaccgtgcccacgcaggatatgatcctgggcagctactacctgaccctggtcaaccccgatgataagggccacggcaagatcttccgcgatgagagcgaggctatgatggcttactcctccggtctgatcacgctgcaggcacccatcaaggtgcgccgcaccctgaccttcgacggtgtggaggagaccgctctggtcgacaccaccatgggtcagattatcttcaacaaccccatcccgcaggacctgggctatgtcgatcgtaccgacccggctaccaagttcgactacgagatgaacccccgtaccctgaagatcgcttccggcggtaagagcgacaagctgaccaagaaaggtctgcctgacatcatcagccgctgcctgaccaagcatggcaccaaagtctgcgccatgatgctggatcagatcaaggcacagggttataagtactccacgctgtccgctatcacggtcgccgttcccgatgccatcatccccgatgagaagcccgcgatcctggccgccgccgataagaagatcgagaaggtcatgaagaacttcaaccgcggtcttatttcggacgaggagcgctaccgcagcaccgttgctatctggcaggctgctaccgaggaagtctccgatgctctgagcaacaacctgaaggcccaccaccagcgcaaccccatctatatgatgtccgactctggtgctcgtggttctatggaccagatcaagcagctggccggcatgcgcggtctgttggctaacacggccggtaagaccctggaaatgcccattcgtgctaactaccgtgaaggcctgaatatcctggaatacttcatttcttctcgaggcgcccgtaagggtctggctgataccgctctgcgtaccgctgactctggctacctgacccgtcgtctggtcgatgtctcccaggaagttatcatccgtgaggaagactgccacgctaccgagggtatctgggtccgcgagatcagcgaaggtaactccgttgtcgagagcttcaaggagcgcttgaacggccgctacgccctgcatgacgttatggaccccaccaccggtgagctcctggtcagcaaggacaagatgatggatatgttcgacgccgagaagatcgccaacgccggtatcaccgagctggagatccgctccgtcatgacctgccgtgcccacgtcggcgtctgcgcccgctgctacggctccaacatgtccaacggcgagtgcgtcaaggtcggcgagtctgtcggtatcatcgctgccgagtccatcggcgaacccggtacccagctgaccatgcgtaccttccataccggcggtatcgcatctgctgaagatatcacgcagggtcttcctcgtgttgaggaactgtttgagagccgccgcccgaaggccatggctatcatgtccgagatcggtggtaccgtccacatcgacgataccaagaagacccgccatgccgaaatcaacggcgtggacgagaacggtgcacccatcaccaagagctacctgatcccgttcggtcagcgcctcaaggtcatggagggcgacgtcgtcgccaagggtgctctgctgaccgaaggccacgcttatccccaggatattctggccgtccagggtcccatcgccacccagaactacctgatcagcgaagttcagaaggtctaccgtctgcagggcgttgacatcaacgataagcatatcgaagtcatcgtccgccagatgatgcgtaaggtccgcatcgaggattccggctccagcgactttatcatgggcagcatcgtgaaccgccgcgatgtcatgatcaagaacgaggagatccaggcccgcatcgatgccggcgagaccgatctgaagctggtccaggccagccaggtcctgcttggtatcaccaagtccagcttggccaccgactccttcctgtccgctgcttccttccaggagaccacccgtgtcctgaccgaagccgccatcaagggcaaggtcgacccgctggccggcctgaaggagaacgtcatcatcggtaagctcatccccgccggcactggtctgccggaggtcgaggaagagctcgtccaggctgagatcgcccgcgacgccgccgaagccgcttacgaccactaatctgtaaatgaaaatcccgtcaccgtttggtggcgggattttttatgtgcggtgtttgcaaaaggtcaaaatcaagaaggattcagcaaaatcgttaataactcacaaaagggaatcacaaagccaaaaaggaagaagaacacggtttcgcgcagaagccggacaaattgcgaaaaccggggctgaaaagcactgagccatgccaaaaattgcgtttccctaagtgatatatgggcatcacaaaagtaccagaaaaataacgccagacattgcagcaatgccgcagtaggaaagataaagaactttgcggcgtaggaagcagggacgatctgtgcgccgacatcccacaaaattgcaaggctgtccggacatagcaaaagccctgccagacaaaacaggatggataacagcagacatacggcacggagaagttgaccggcataccggctctgcggagaaaacagatcgacaaaagtcttaacagaatccgcaccgttgcccgtgccggaggtcccggtgtgaattaattcgtctaatgtcaggtgcagtacttgggccagcggctccagcgtgtttatatcgggcaatccaacgccgcgctcccagcggcttaccgctttgtccgtcacatggaggcgtgcagcaacctctgcctgtgtcagtcccagcgtcctgcgctggtcggcaataaaggctccgaaacttttagcgtccatgtttaatccctccgtatatgatctgcaacaagcgtagcacacggaggccgaattgtaaaccgacgcttcgtttacaaacgtacatacgcaaaaaagcaggggagcactttctcttacattgacacacacacggcggtgggttataataaattaaccgcaaaccacccaatcggaaagggaagtgaccgttatgctgtttttgcagtatccgccgtgctccacctgccagaaggccaaaagatggctggacgaccatggcatcgcctacaccccgcgccatatcaaagaggaaaaacctatggtcgaagaactgcggcagtggattgcccgcagcggcctgccggcccgcaaattcttcaataccagtggcttggtttaccggtccctggggctgaaagataagttggataccatgaccgaggaggagcagattgctctgctggccaccgacggcatgctggtcaaacgcccgctgctgataggggaggacttcgtcctgcccggcttcaagcccgctgattgggaaaaagcgcttctataataaggataggataaggagaaaaccatggctgaaattttaaaagaacgcagcgaactggatccgcagttccagtgggacctgacgccgatgtttgaaagcgacgctgcctgggagaccgccctcgaaaacctcgatgccgagatcgacagcgtagccgcttttgcgggcaagctgtccgacgccatcaccatcggcgcttatctggacgccaccaccgagctgaaccgcaaggtcgagcagctctactgctacgccagcatgcgccacgatgaggacacccgcggcgaggctgcccagagtatgtacgcccgcatcaacagcaagtacgtcaagcttatcaccgcgctgtccttcgcccagccggagatcctggccctgcccgaggagaccctgaccgccatcgtcaacgatcccgctgtggccgactacaagttcaatctggaggacctgctgcgcagcaagccacacaccctctccaaggccgaggaaaagctgctggccagctttggcgaggtaatgcaggctccctccgaggcttaccacaacctcgaggacgccgacctcgtctttgaccccgccaagaacgccgagggtgaagaagttgaggtcaccggctccaacttcgtgcccatcgagatgggcaccgaccgtgtcctgcgcgagaatgctttccgcagcttctacaagggctaccgccagcacatcaacaccatggccgctacctacgccggtgctgtcaaggctgccaccgccgaggcccgcgcccgccactatgagtcctcccgtgccatgtccatggcaggggagaatgtgcccgtggaggtctacgacaacctggtcgccaccgtccgcaagcacatgcccgccatgcaccgctacgtccgcctgcgcaaaaagatgctgggcgtcgacgagctgcatttctatgacgtctatgccccgctggttggtgacctgaagaagtcctacacctacgagaccgcccagcagatggtgctgaaagccgttgcccccttgggcgaggactaccagaaggacgtgcagaaagcctacaacgagggctggatcgacgtttatcccaaccgcggcaagcgcggcggcgcttactccggcggctgctatgactccaacccctatatcctgctgaacttcagcggcacgctggacagtgtttccaccctggcccacgagatgggccataccatgcacagctggcgctcccgcaagcatcagccgccgcagtatgctgactacacgctgttcgtggccgaggtcgcgtccactgtcaacgagaacctgctcatcgagcagctgctccagaacgagaacgacccccagacccgcctctatctgctgaaccagtacctggagaacttcaagggcaccgtctaccgccagacgatgtttgctgagtttgagcgcgaggcccacgccatggtggagcgcggcgaggccctgaacgcctccgctctcaacgccctgtataagcgcctggtcatcgactacttcggcgacgacatggtcatcgatgacgagatccagtacgagtgggcacgcatcccgcacttctaccgtccgttctacgtctacaagtacgccaccggctactccaccgccgtggccctgtccgagggcatcctcaaagagggcgagcctgccgtcaagcgctacaaggagttcctctccatgggcggcagcgcctacccgctggatgagctgcgccacgccggtgttgacctggccaccccggccccagtcgacgctgccctcgaaaagttcgagcgcatcctcgatgacgccgaagctaccctggcaaagctgcagtaacaataaaaaggaaggggcacccgcgagggtgccccttttgctgttatataaggtgttacttgccaagaactgccttcaaataggcggcttcgcgggcggctacctgtgcctggaatgccttcacagcatcggcataagcggcttcgcgcttgtcggctgcggcctgggtagccttaccggcggcaatcacagcggccactttggcgtccgcctcagactgagcggccttgccggcggcgatcacggccaggcactctgcatcggccttggcctgggcagctttagcagccttcaggatcgcggcactgtcggcgtcggcctttgccttagcctgcttggagtaggcattgacagcggccgtgtaggcggcttctttggcggcgatctcctgctgataggcttttacagcggcgatgtaatcatcgttggcgtctgcaaaaacgggaacggcgaacatgcagaccatgcagatggcgagcagggcagagagaagttttttcattgtcaatacctccttaaaaataaaaccaagggtgatttggtcccccggaacgcccgggagttatctacagctttattataccagatggcgcataaagctgcaacaaaaaatgactcgacaaaatcatgaattctggcatcgcaaattgtgcaaactagacaaatgttgttgaagcatggacaaaaagcgcttacacaaaccttgggcaggggagtaggcaccctgttcatcttatgcaccgccttataaaaaggcgtcaggccctggcccataggcccgaaatccacattttagcctgcgaaaacaaaaattctccgtattgcacgattttttcaaagtttttttggcaatactcttgacaacgggccgcgaatcctgtaaactaaacattgcgtgagttccagggagtagtgcggcaaaaatgccgcggctccggtaaaacgaacgtgaatatgtgaagaaaggagaaaagaaatgcctacttttaaccagctcgtgcgcaaaggtcgtgaggtcctggtcaagaagagcactgcccctgctctgcagaagtgctacaactcccagaagaagcagtacaccaccatgaacagcccgcagaagcgcggtgtttgcactgccgttcgtaccatgacccccaagaagcctaactctgctctgcgtaaagttgcccgtgtccgcctcacgaatggtatcgaggtcacctcttacattcccggtatcggccataacctgcaggagcacagcgttgttctgatccgtggcggtcgtgtcaaggatctgcccggtgtccgttaccacatcatccgtggtactctggatacccagggtgttgcgaaccgtaaccaggcccgcagcaaatacggtgctaagcgccccaaggccggtgccaagaagtaaggaaacatcttttcgccataaaataggccaagccttttttgtggcacaacgggagtttctaaactttcgagtaccgatgatatcatttatgtgaaggagggaagaaagatgcccagaagaggtaatgtcgcaaaacgcgaagttctggctgatcctatctacaattccaaggttgtcacccgtctggtcaactacatcatgctggatggcaagaaaggtgttgctcaggagatcgtttacgatgcatttgacatcgtgaaggaaaagaccggcaacgacccgctcgagatgttcgagaaggctatggagaacatcatgcctaacctcgagtgcaagacccgccgcgtcggcggtgctaactaccaggttcccctggaggtcagcccggctcgccgtgagaccctgggtctgcgttggctcaccgcttacagccgcgcccgtggtgagaagaccatgtctgctcgtctggccgctgagatcatcgacgccaccaacggtgtcggcggttctgtcaagaagcgcgaggatacgcacaagatggccgaggccaacaaggcttttgcccactatcgttattgattcgctgtcgaggaggtataagccatggcaacgccgagagatgtatctctgcaaatgacccgtaatatcggtatcatggcccacatcgacgcaggtaagaccaccaccaccgagcgcatcctgtactacaccggtatcaaccataagatcggtgaagttcatgacggcgctgctacgatggactggatggagcaggaacaggagcgtggtatcaccatcacttctgctgctaccacctgctactggagccataccgagacccagcacgatccggctctcttcaagaagaaccgtcatcgtatcaatatcatcgacaccccgggccacgttgacttcactgttgaggttcagcgttccctgcgtgttctggacggttctgttaccgttctggccgctaagggtggtgttgagccgcagtctgagaccgtttggcgtcaggctgacgagtataaggttccccgcatggtgtacgtcaacaagatggataccatgggtgccgatttctaccgctgcgtccagatgctccatgatcgtctgcacgccaacggtgtgcccatccagctgcccgttggtcaggaggataccttcaagggtattatcgacctgatcgatatgcaggctgacatctactatgatgacatgggcaatgatgtccgcgttgagccgattcctgaggatatgcaggagaaggcccaggagtaccatgacaagctgatcgaggctgttgccgagaccgacgaagagctgatgatgaagtacctggaaggcgaagagctgaccaaggaagaaatcaaggctgctctgcgtaaggctaccatctccaacgagatcgttcctgttgtttgtggttcctcctacaagaaccgcggcgttcagaagctgctggatgctattgttgactacatgccggctcctaccgacgttgcagccatcaagggcaccaaccccgagaccggcgaggaagaggatcgtatctcctctgacgaccagcctttcgcagctctggctttcaagatcatgactgacccctacgttggtaagctctgcttcttccgtgtgtactccggtaccctggatgcaggcaccaccgtttacaactctgtcaaggataacaacgagcgtatcggccgtatcctgcagatgcacgccaacaaccgtaaggatatcgacaccgtttacgctggcgatatcgcggctgctgtcggcctgaagaataccaccaccggtgacactctgtgcgacgagaagcatcccatcatcctcgagtcgatgaacttccccgagcccgttatccgcgttgctatcgagcccaagaccaaggccggctccgagaagatgggcattgctctggcaaagctcgctgaagaagacccgactttccgtacctggaccgatgaagagactggtcagaccatcatcgccggcatgggcgagctccatctggagatcatcgtcgaccgtctgctccgcgagttcaaggtcgaggctaatgttggcgctccccaggttgcttaccgcgagaccattcgcaaggaagccaaccaggagaccaagtacgcccgccagtctggtggtaagggccagtacggtcacgttaagatcaaggttgagcccaaccccggcaagggttacgagttcgtcaacggtgtcgttggcggcgctatcccgaaggaatatatccccgctgttgacaatggtatccagggcgctatgaagtccggcgttctcgctggctatcccgtcgtcgatgtcaaggtcaccctgtgggatggttcttaccatgaggtcgactcctctgaaatggcgttctccatcgccggttctatggctttcaaggaggccatgaagaagtgcgatcccgtcatcatggagcccatcatgaaggtcaacgttatcgtgcctgatgagtacatgggcaacgttatcggcgacctgaacagccgccgtggtcagatcaacaaccaggagtccgagggtggcaccgctcgtgttaccgctctggttcctctgtctgagatgttcggctacgctaccgacctgcgttccaagacccagggccgtggccagtactccatggagcctgatgaatatcagcaggttcccaagagtgttgccgacaagatcatgagcgaccgcgctaaagcgtaactatttcataaattttacttgatttttctcgtaaaatcttgtattatagccttacgcaaggcaattaaattgttttaattaaaggaggacacttccaatggctgaaaaggaaaaatttgaccgctctttggagcacgtcaacattggcaccatcggtcacgttgaccatggtaagactaccctgaccgctgccatcaccaagactctggctctgaagggcgacgccgacttcatggattactccagcatcgacaaggctcccgaggagaaggctcgtggcatcacgatcaacaccgctcacgttgagtaccacaccgagaagcgtcactacgcccacgttgactgcccgggccatgctgactacatcaagaacatgatcaccggtgctgctcagatggacggcgctatcctggtcgttgctgctaccgatggtcccatgccccagacccgtgagcacatcctgctcgcccgtcaggttggcgtgcccaagatcgttgtcttcatgaacaagtgcgacatggtcgacgacgacgagctgctggatctggtcgagatggagatccgtgagctgctgaacgagtacgacttcgatggcgataacacccccatcatccgtggttctgctctgaaggctctggagtccacttctaccgaccccaacgcccctgagtacaagtgcatttgggagctgatggacgctgttgatagctacatccccactcctgaccgtgctgctgacaagcccttcctgatgcccgttgaggacgttatgaccatctccggccgtggcaccgttgctaccggtcgtgttgagcgtggcactgctcacgttggcgatcagatggaaatcgtcggtatcaaggaagagaagatgaccaccaccatcaccggcctggagatgttccgcaagagcctggagttcgctcaggctggcgataacatcggcgccctgctgcgtggcgttgaccgtgaccagatcgagcgtggccagtgcctgtgccagcccggttctgttcatccccacaccaccttcgatggccacgtttacgtcctgaagaaggaagagggcggccgtcataccccgttcttcaacaactatcgtcctcagttctacttccgtaccaccgacgttaccggcatcatcaccctgcccgagggcaccgagatgtgcatgcccggcgacaacgtcgatatgcatgttgagctgatcacccccgtcgccatggaagagggcctgcgtttcgctatccgcgagggcggccacaccgttggttccggcgttgtttccaagatcgagaagtaatttcccgctctaaaacagcataattcaggcgctcactgtaaggtgagcgcctgtttttatgttgttttttggtgtacagtgtggtatactaataaaaatatggcataccacaaatatgacatacatagagaagggagtacatccatgcagcaggaaaccgttatcgtattggatttcggcggccagtataaccagctgattgcccgccgcgtccgtgaatgtaacgtttattgcgagatctattcgtaccgcaccgacctggccaagatcaaggccaagaaccccaagggcatcatctttaccggcggccccaacagtgcctacctgccggattcgccgaccatcgaccccgagatctacacttggggcgtgccgatcctgggtatctgctacggcagccagctgatgatgcacatgctgggcggcaaggtctgcaaagcccctgagcgcgagtacggcaagaccgtggtcgacctggacaccaccagcccgttgttcgccggcctgccggacaaaaacgtctgctggatgagccataacgactatatcgagacggccgcccccggctttgaaattgtggctcacacccccaactgcccggtggccgctgcccaggataagccccgcggcctgtactgcgtgcagttccacccggaggtcctgcacaccgagaacggcacccagatcttgcacaactttgtgtacaacgtctgcggctgtgccggcacctggaagatggactccttcgtggagaacagcgtcaaggccctgcgcgagaagatcggtgacggcaaggtgctctgcgccctgtccggcggtgtggattccagtgtttgcgctgccatgctggccaaggccatcggcaagcagctgacctgtgtgttcgttgaccacggcctgctgcgcaagaacgagcgcgaacaggtctgcgaggtgttcggcgaaggcggccagtttgacatcaactttgtctgcgtcgatgcccgcgaccgcttctacaagaagctggcaggggagagcgccccggagcgcaagcgcaagatcatcggcgaggagttcatccgcgtgttcgaggatgaagccaagaagatcggcgccgtggacttcctggcccagggcaccatctatcccgacgtggtcgagagcggcctcggcggcgagagcgcgaccatcaagagccaccacaacgtcggcggcctgcctgattatgtggacttcaaggagatcgtcgagccgctgcgcgacctgttcaaggacgaggtccgtcaggctggccgcgagctgggcctgcccgagtacctggtcgcccgtcagccattccccggccccggcctggccatccgcatcatcggcgatgtgacccccgagaaggtcgctatcgttcaggatgccgacgccatctggcgcgaggaagtggacaagctgcccatggcccagcgccccagccagtactttgccgcgctgaccaacatgcggagcgtcggcgtcatgggtgacgagcgcacctacgattacgccatcgccctgcgcgccgtgaccaccaccgactttatgacggctgaggtcaccatcctgcccaccgagaccatcaccaccgccgccaaccgcatcgtcaacgaggtcaaaaatatcaaccgcgtcctctttgactacaccaccaaacccccggcaaccatcgagtttgaataatcgcaaaacctaaa

SEQ ID NO: 7971 - DNA, 4787 bp, Unknown
  gut microbiota DNA sequence
aacaacagtacgttcaatatacaggctctttctttttgctggcttcgcgttgactccaattacaaatttgagggcggtaatgcggttttccaattgttattgctttcttttgcatggttatacgggaatgtttgattactggtttaaaaatggtaggaaggaaccgccaagagaaatgggatcatatgtcagcgaattccggcatgacttaataaagaatttatagaaatcagagataaaagttataatggtacaacgaagtaaatgtcactgtactgttttatgcagggctttttgtgttgaaagggacggtgtgatttgctataatcaaagaaatggaacgggaggtgccatgcgtacaaatgcaaactttattacctgattgttcagttcgcaaactgcagccggtcgatgccgatatagaaaaaatctacgcaatggcatcccaaaacacgctgttttaccagtatcatccaccctttgttacctggcagagcattttggacgatatgtccgcattgccgccgggcaaaacgatggcagacaaattttatattggcttttttgatggcgtagcgctggctgcagtggttgatatgattctggcctatccaaatgaaaccacaggttacattggctttttcatggtggataagtctcgccaaggccaggggatcggcagccgtatcgtggccgacatagaaaatactatgcgcaacaatggtatgtgccatagccgtctggcagtcgataaaggcaacccgcaaagctactcgttctggacaaaaaacggttatgctgtttgcggccccgaaatccctaacgatttttccgcttatatccccatgcaaaaagaactgacacctctataaagattctacaaggagaaaaacaatgcctaaacgcttacttgactgctgcgcgtcggatttccgcagctttaccaaaagtgatcttctcgaatccatccagaaaagcgaggggcgcgtcattgcttgcgagaccatcggtacggtgcagccgctgctgggcaatgtgaccaacgccgagttcgccgcgtcgatgggtgcggacatcctgctgctgaacatgttcgatgtgcagcacccggtcatcaacggcctgccggaaacggagccggaaaacaccgtccgtatgctgaaaaaactgacgggccgccccatcggcatcaatctggagccggtggccgagggcgaggagggcgagacagaccccatctggaaaatgtctgccgggcgccgcgccaccgtcgaaaacgccctgcgagccaaagagctgggcgtcgacttcatcctcctcaccggcaaccccggcatgggcgtgtccaacccggccatcatcgaaacactgcgcaaattcaaggcagcggtgggggagagcatcgtgctggcggcaggcaaaatgcacgccgccggcgtgttgaccgaggccgccgagagcatcctgaccgaggccgacattgccgactttaccgccgccggtgcggacatcattctgctgccagcccccggcacggtgccgggcatcacgatggagtacgcccgcaccctcatcagctgcgcacaccgtcacggcgcactgaccatcacggccatcggcacctcgcaggagggtgccgacaccgataccatccgacgcatcgccctgatgtgcaaaatggcgggcaccgacatccaccacatcggtgacaccggctacacaggcatggcgctggccgaaaacatcatggcctactccatcgccgtgcgcggcatccgtcacacctaccaccgcatagccatgtcggtggagcgttaaaaagtatctgcggaggagaacttctcatgcgtgaaatttccatcactgaattacaaaacttaaagatcggccaggccgaaaacgcccaggcgggcaccggctgtacggtgtttctgctgggcgaaaccggtgcccccgtgggccttgatgtgcgcggcggcgggcctgcctcgcgggagagcgagctgctcaagcccacggccgcagcccaggtcatccacgccattttgctgggcggcggcagtgcgttcgggctcgatgctgcgggcggcgtgatgcgctaccttgaggaacgcggcatcggctttgatgtgggcgttacgaaggtcccgctggtttgccagtccgatctgttcgacctgacggtgggggatgcccacacccgcccggatgcagcgatggcgtatcaggcctgtgtcaacgccgagaccggcaactaccgcgacggcaactacggtgcgggcaccggcgccaccgtaggcaagctgatgggcatgccccattgcatgaagagcggcatcggcagttacgccgtgcaggtggggccgctgcaggtcggcgcggtggtggccgtcaacgcgttgggggacatctacgattggcgcaccggccgcaaggccgcaggcctgctggccgacgacggtaagaccttcctcgactccgaggacgtcatcctacagcagttggatgccgcaggggaaaagttcgtcggcaacaccaccatcggcgcggtgttcaccaacgccaagtttgacaaggcacacctgtgcaagatcgcggccatgacccacgacggttacgcccgtgccattcgcccggtgcatacggccaacgacggcgacagcatctacgcggtctcgctgggcgatttggctgccgaccaggacgtggtcggcgctcttgccgcccgcgttatggccgaggccatcctgcgcgccgtgcaggcggcagacagtgcctacggcttccccgcagccaaagatctcaaacggtgacaccaaatcataacagtacaaaatcttaaaaactccgtctggacaactgttgccaaaccgttgccaggcggagttttttggggtataataaaagcaagaatcaacacgcaaaaaccacgcggggagaacgcagatggcaaaagcagaggaacagaaaaaagacctggccgcctacctgcaggcgggctgcaagccggagggcaagctggccgtcgggctggcggtggagcatttcatcacccacgcgggcggcgagcccgtcacctttacccaggtgcagaacgtcatgcgccagatgcaggcggcgggggacatgcccattctgcaggatggccaatacctgggttttaccacaaaacagtacggtgtaacgctggaatctgcctgccagatggagatccgcatcgccccgcagctggatatgatccacttggtagacatctacaacgccttttacctgcagctgagcatgacgctggccacccacggtctgcgcgcctggacggtcagctaccatcccacccgccgcgccgaggaactgcctctggtgcccacgccccgcaatgaggccatggaccgctacttccggcagacaggtgcctgcggcgtgcagatgatgcgggccacggcctccacccagctgatcattgattattatagcgaacgcgattttgtacaaaaaatgcgggcggcctgtctgctcacgccgttctttgggctgctcagtgacaacgcgcccatttaccagggaaaccgcaacaacgcctgcagtgtgcgcacccgtatctggcaggatgtggacaccgaccgctgcggtgtgccgccccggctgatggacccggatttcggctttgacgcctacgccgacacggtactgacccgcccgctggtggtgtcctgcaaaggcggccactgcaagggcgtgggccgtaagaccgcccaggagatctatggcgcacggctggaccactgcgagatcgagcacatcctctcgatgttcttcttcgatgcccgcgtcaacggcggcatcgagatccggggcgcagactgcatgccgcctaagtttattttggcttacgcccagttggtgcggtctatcttcggcagccaagcggcactgcaaaatgtgctgcgccattatccgggcgttaccacggtggacattgccaatgccaagctggccgtctgcaaggatggtttcaacgcctgggtctacggcaagcccatcggcggcgagctggcctggctgctgatgcaggcccgcagccgcacgccctcgcaggaggagcgcgccctgctggaccccatcagccggttgatcgcccagaaaaagtcggtccgcgaggaagaagcggactacgaataaacccggccccgccgcgcatactgacccgaaagggggtatgctgcgtgcgggaaacatcctaccatgccgtaattgctgagatgacggtccgctcgctgtgggaaacacagaacgtgatggactgcatcccggacgagctgtggcagcggctgtacggcggtgcgccgttgtggcagcatttgtaccacgcgttgcacagccttgaccagtggttcatcaaccccaaagccaccgattttgtggagccgcccatccacacgccccatttgcaggacctggcgatctacccctcggcctgcgtggaccgcgcccagatggacgagtatttttacacgatcaaggccaagctgtccatgtatctgacctcgctgcacgacgaggatctgctgcagcggcccgaaaattgcgaatggacgcggtttacactgattctatcgcagtatcgccatctccacacccatctggggatgctgatgggcttcatcgtggccgagaccggcctgtgcccccgcacgctggaagtgggggagccgttcccacagccgccctacgacccctaccgtgcgccctgatttagaaaatcccggaaaggaccccttatgaaatac

SEQ ID NO: 7972 - DNA, 4848 bp, Unknown
  gut microbiota DNA sequence
ttgcacccggcggcgctgcttttgccgctggccctgctgaccggctgcgcccgcacgccggatatgacccctgtgtggcaagaaacactgcccggcagcggcgccaaagccacgctgtccaactgcaccttgcaggacgaaagggaagtagactatatctatagccgcgaggaccaggattggaagacccgcccggcgcttttcactaccgccagcccggtgctgacgctgaccggcgtgaccgccgaccaggtagagctgcgcttctctgaggaaatcgctgacctatacttaggctacgaccgcgtgatgccccagcccaagctggactacatttttaccgagaccgccgacggcgccctgcaataccagctggacaccgtgtacaattacgagttcatcatcactaccgagaccggcactgatgattttttggtgatttgtgagcaggaataagcccggatgatgaaaaaaacgaacggtagatatacactgtaaaggggctaaacgccgtaacaaacccatccggtaagcgggaatggaccgcagaagaagtaaggcgcgatccttgcggtagtgttgggaatcatgttattgctgaaatagcagagcggcaagcaatgaaatcgtaatttgtggaggaaacgtatgaaatacttatatttgcatggattggggcaaaatgccgacagttggaacaaggtgacaagcgcaacagaagtgtcggaaaatagcgcatgcttggatttggcagaaatgatcaaaggaaaagtagcaacatattccgctctctactctgctttttcagaaatgtgtaacgcggaaaatgaagatatcatattatgtggtctctctttgggcagtgtattggcactaaactatgcgatagactatccccaaaaagtaaaggcactggttttgattgcagcgcagtataagatgcctgcgagattattaaagctgcaaaatgcgctgtttcattttatgccgcagtcaatgtttcaacaaaccggatttggaaaactcgattttataagtctgtgtagtaccatggcagaacttgattttagcgattcgttgaaccaaatctcctgccccgcattggtcgtttgtggagaaaaagacaaagctaacaaaaaagcgtcaatcgaacttgcagatattctgaagtgttcccaattcaaggaaatttcggaaacaggtcatgaagtaaatttggagtccccagaaaaattagcatccttattgcgggagttttatataagtatctgacaacttccagtttacaaagcacaaagcctcccttacataaagggaggctttgtttatacgatagggaactgcgcaaaatccgttgtcactttttctccgccatctcaatggtcgtggtcgggaaggcaaagtcacatccgtctttgtgcaccacatccataatttgcaggttcagccggttcttggcctgcaaaaagtcggccaggcgggtggtggtgacatacatacggcagcgcaggtcgatgctataggcattaaacgtatccaccgtcacggtcactttatcagccagcaccgccgggtcgttctgcaaaaccgccgtcaggtcacggcacagcacttccagcgtttcccgcggggtatcgtaggtcatgcctacggtaaaatcccataggcggcttttgcgctggtcgcagttgcagatgtactccgaggcgactttcgaattttcgatcgacaccaccacgttatccggcgtgcggaacttggtggagcggaaggaaatatcctccaccgtgccctccagactgcccagcacgatgtaatccccaattccaaagggatgctccagcaccagcgccacaccggcaatgaggttcgatagggtggactgcgccgcaagcgagatggcgatgccggcaacgccggcgccggtcagcagaccggtgaccggcacgcccatggtgtccagcatggcgatgcccgcaaacagcaacaccagcgcgcggaagatattctcaaaaaagcgggccatcgtctggttggtggcaaggtccagatggttctgggcactgcgcagcagcaaacggcacatgggggccgaccgccacgcgcccagcgcaagaaaataaatgttcagcagggtagagagcgtacccaaaaagcctgccaccgtcgcatgcttctgcacaaggggcagcagccccaccgccgcaaaaaacagcgtctggcgcagtgcccaggccagcggctttaagtaactctctgtcaaaatgcaaagccactcgggcagatgtttttgcagccggtgcaaaaagccgccgcccacatggtaaaacacaaagggcagtaccagggccagcagcaaaaagatcccgctggggataagttctccgatttcaatggcaaaagcagatgcaggcatacgcggcacctcctgtgtttttttcataaggtaaaagtattataccacacccccttgcaatttgtaaaacctgtgctataataatgcccagaaagtctgtttcagggcggggtgcaattccccaccggcggtaagcagtatcctgcaagcccgcgaccggctgcgtagcagccgctgacccggtgtgattccggggccgacggtatagtccggatgaaagaaacggaaagctgtttgctatgccttttccaacgccctgctgccattttccgcagcagggcgttttgctttagcaaaagcctcccgcagaatttatcgaaaaaacagctttcataactacttttttacgggaggcattttattatgcaaaactctaccagcaaagtccgcgttcttacgggtaccgccatgcttggcgctgtggccgccgtgctcatgtacctggaatttcccatccccatcatgcccgctttcgtcaagctggatgtgtcggagctgcccgcgctgatcgccagcttcgcctatgggccggtctcgggcatcctcgtctgcctcatcaaaaacctcatcaagctgcccagcaccagcactgccgcggtaggcgagctgttcaacttcgtgatgggcgcgctcttcgtcggtgtggcgggccttatctacaagcgcaacaagacccgcaagggcgccatcgtcggcgcactgctgggcgcgctggttatggcggtcgtctcggtgccgtacaactacttcatcgtttacccggcttatgtggtcatgtatcatctgccgctggatgccatcatcggcatgtaccaggccatcaaccccaatgtcaatggcctgcttgcctgcctgctggtgtttaacctgccctttaccttcgtgaaaggtgcactggatgcggtgctctgcttcctggtctataagccgctttcgcccatcctgcacggccgcaaataagtacacgggccgaaaaatgtcctacttttgcgcaaattggctggtgtgtaccacgttttatcgttgacttttcccaaaagctatggtaaactatccacacaacaacagaatagcaacttatcaagagcggctgagggaacaggcccgatgaagcccggcaacctgcatgcaaatgcaaggtgccaaatcctgcgggaaaccgaaagataagcgtttggcgcgcggtcttttggctgtgcgccttttttgtttctcacggttgcgtttctgccgaattttataaggaggcttttccccaatgtccaaatttctcttcacgtccgagtctgtaaccgaggggcatcccgacaagatctgcgatcagatctctgatgccatcctggacgccattctcgagaaagaccccggtgcccgcgtagcctgtgagaccacctgctccaccggccttgtccacatcatgggcgagatcaccaccgattgctatgttgacatccccggtgtggcccgcgacgtcatccgttccatcggctatgaccgcgccaagtacggcttcgactgcgacacctgcggcgtcatcaccaacatcgatggccagagccccgacatcgccctgggcaccaacgatgatgttgccggtgcaggcgaccagggcatgatgttcggctatgcctgcgatgagacccccgaactgatgcccctgcccatcagcctggcccacaagctggccaagcgactgaccgaggtccgcaagaacggcaccctcgactacctgcgcccggacggcaagagccaggtcaccgttgagtataacgacggcaagcctgtgcgcatcgacgctgtggtcatctccagccagcacagccccaaggtcagccaggaacagctgcacgaggacatcctcaacgaggtcatcaaaaaggtcatccccgccgagctgctggacgagaacaccaagtactacatcaaccccaccggccgctttgttgtgggcggcccgcagggtgataccggcctgaccggccgcaagatcatcgtcgatacctacggcggctactcccgccacggcggcggtgctttcagcggcaaggaccccagcaaggtcgaccgttccgccgcctacgctgcacgctgggtcgccaaaaacgttgttgctgccggccttgccaagaagtgcgaagtcgagctggcctacgccatcggcgttgccaagccggtctccatcatggtggacactttcggtaccggcgttgtggccgacgagaagatcgaggccgctgtggagaaggtctttgatctgacccccgccgccatcatccgcgatctggacctgcgcaagcccatctaccgccagctggccgcctacggccacatgggccgcgaggatctgggcgtgaagtgggagaacaccgaccgcgtggatgccctgaaagccgctttggcctaaggcaataccgcacaattcccgcctgacg

SEQ ID NO: 7973 - DNA, 527 bp, Unknown
  gut microbiota DNA sequence
tgcttccactacatcaaccgcaaggcgcgggagtatctggaacaggaaatgaaggacaacgacgaaaagcctatgggcggcggtttcggcggcgatgtgccggacgaactctgctaccagtgggcgcgggaatatttccgcgatgccgaagccaaggaggatgccgaaccggaagaaaagtttgtccccaaaacttacaacgggaaaatgcccaaggcaggcaaagtcaaaaaagataagcccaagaaagcagcgcccaaaccagccccgaaacccgcgaacgaagaacagctcacctttggtgacttcggcacagaggaggcagcaggatgaaactggacaaacgagcctgccgccatgcagccaatgttccgctgcacatcagcctaaatgccggtgtgttgtacacggaacgggtgaaataccttgtcaccgctgccgtcaaactgcttggcgggcatagggtgctgacagtttacttctatgactgtgaacgcctgaaaacaaatgaccgtatgccgaagtgg

SEQ ID NO: 7974 - DNA, 317 bp, Unknown
  gut microbiota DNA sequence
taatggtgaccaacggcgactacggctgccacgaccacagcgtaggctatgcgcgtctgcgtgaaacattgacgggcgtggaaatgctgggggttccgaatgagcaggtgacattcctcggctatgctgataccggtatgccgcgggcggagagctttcttgcgggtttgtatgatgaaaccgatgagaacaatgttcatccctcccactgcggcacggagacctacggtctgcccgaaaagccggatttccacgcgcagcatttcggtaagcctgcgccgtatacaaaagccggctttgtgcaggatctgaaagcc

SEQ ID NO: 7975 - DNA, 367 bp, Unknown
  gut microbiota DNA sequence
aatccggctgctgcggctgtatccgtggtgataacattcaccaccacgcccgcgccacattcagtgggtatttggccaaattgcggttccgggtcatcaacaacctgtttcacaaggaggaaagcggcttcagtgcgcggacatcccagcagccgcgctcccgctacacctcccgcaaatacctgtttgtactgtacgccgccacgctgatcggccctctggtagacagcatccgcctggcactgcaccataaagacgccaccatgctgctgcattttgtgtacgtgtattacacctgcctgtgcattgcctggtacctcctgcgcgccctgctgggccgcccgccggagaataagacctacggaaa

SEQ ID NO: 7976 - DNA, 1078 bp, Unknown
  gut microbiota DNA sequence
cgatgactatgaataatgctcactcgtctgtgcggacacagcgcagcgcataccgtgcctggccggtcgtggtacaggtaaacaatgtcaggtcccagttgttttcgggcgttttgaccgccatctcctcgatttgggtcggctgcaggacctctgtgtccgataccgcatagtgccatgtgttgtcattcatataggagtatgatgtttactaatgtcggctactcccgtagaggctgttttgtatttacaacctcaagaagaagaatagacttttttgcaaagatatgttataatacatcaaatgcaccgaaaggatgtcgattctatggcgaagaaaaaatcgaaatgcgggtttacgctggtcgaactcattgttgtattggtaattctggctattcttgcagcactgctgattccggctcttaccgggtacattaacaaggccagaaagagtcaggtcgtggcagaaacgcgagcgttgacgcaggctgtgcagactgagatgtctacgatatacggtctcaataattcgtttcaacggcaaaaaagtattggtaagccgctgacgattgcttctaaaacaggaaaatattcagacaatggtggtaacacatctaccggagacttgggcgatttaaaagagcactacgaagagataattcatctttcggaagttcctgcgttagagaaggggctcacggcattaaatgatgcctatttttactcgttcatcgacgaaaacggcgcagtgatgtggacggtatacgataacggcaatgggtataccgggatatattgtggcgatgacggaaagattgattcatttaaaagtggcgaagttaagaacgcagaggcctacaaagacctttatgcgggatatgttatctattacaacaaaagagatataggcggtattgatgtgtttacaaaagatgtcttttacgctacattaggaattgaaaacccttaaggcaaagcacttcaaaaaatagtctgtagtgatatggcgagtgccatcatatattagcaaatccctcagagcaagtctgggggattttttctttgtacagtatta

SEQ ID NO: 7977 - DNA, 190 bp, Unknown
  gut microbiota DNA sequence
atattaaaattattaatcatatttcgcattaacattgtcaacatcaaatgtttgtggtgctgtcatactatttctgtttctgctatatttcataattgatgattttgatgtatttggattatcacatagccaaaaaacgtgtccaaattcatgcgtaactgtacttttagcaaaattattaaagtttgtt

SEQ ID NO: 7978 - DNA, 26779 bp, Unknown
  gut microbiota DNA sequence
atacacaaaattaaaaagggagccgcacgaatgtgcggctcccctgctacttattgcctaattattctttcgcttccacttctgcctttttggcggctttcttggccttgcgggctttgcgctttttgtggatcagcgccaataccaggatcaacgccgcggcaccgcctgcgcagacagcgatcagcggcaccttgctttccggcaggcggaaagcagccaggccggtggtaccggcgggagcggtgaacttcaggtagctgccgtctacggtggtgtccaccttctgccagccgtccgcggtctgcaggtacacttccacattgtccgggccgtccggggccaggtagcgcatcgtatggctggtatcgccgtcaatgtcgaagctccagctctccagatggctgcccaccgctgccggtgcgtcgctgctctcggtcaggtccagggcctcagtggtggcaaaggtgccttccaccagcaggatggcacggccgtcgcgctcgtcgctgctctcgcgggtggtgttcagctgcgaatacttggcgttgatggtcatatcaaaggtgatgctgctgaaatcggttgtgtcccactcgccgtagctgccctctttggcgggcacaacggggacatcctcgtcggccaagctgccgccgtagggtacgtcacactgggccaccagcgtgtcgccgtccataaagcgcagcgtcaggttcgagaaggccagcggcacatcgccctgtgccagaaagtcatcatagctcatcggctcggcgatgccagcgtaactcacgccgtcgatgccagcggagccctcgtccacgaaggtgttgccggttacatcgccgcccagcgggtcctccacatagccggcgatggcacccatctgctcggtggcagtgtcgatgacgaccattgcgcggcagttttccacggtcttgccgctgcctacgatgccgccgacctgtttcgagccggaaaggcggcacttggcgccgctttcgcgcacgaccgacttgctggaaccagccacgccgcccacacacttggcgtcctcggcgtccacggcgccaaagccgtagcagctgatggcagagcccatctccatgctgcccacgatgccgcctgcgttttccttcttggcggtcacggtgccgtagttggtgcagtcacgcacgaccacacgggatttaaaggtaaagttcagcgattggctgccatcgatggtaaagtcatcctcggggtccaggtcgttttcgcgggccatggcaccggtgatgccgccggcgttgatgtcggcgttgacattgccctcgttgatgcagttggtgacctttccctccacgtcctcctcggtgtcctcgtccgagacatcgttgatgaggtcgtccgtgtcggtggtgacgttctggctggcgccggaaagcgtctggccgatcttgttcatctgggccgtgatggcgcggatgtcgttgataagggcctgcagattgttgttggtgtcgctgctcaggccgctgaccgtatcggtgatgctggtcaggctgccgctcaagtcattcttggcggcggtgatgcggtcggaatccaccgcaatactggggacggtcagcgagagcgaaccatccgcgccagccacggcgctggcatccagactgccggaaccgttgtgattgatgtcgatggagagatcaggctggccgtgcacgacgcgcccggtctcgtccatggcctgggtgtcagtagaatagtcggcctcggcgctggtgtcgggctgtgcttcagcgggcacttccggctccgggacgaccggatcgggttcgggtgtgggtgctggcgtggcgggggtatccggctgggacggttcctcgggggtgggggtctcgaccggcgtatcgtcatccggcagtggggtcggtgtcggtgtggggagcgtgacatccaggtcccaatgctgattgccctgattgttttcagagccggaaaggctgccgttgatcagggcgctcaggtcggtcttgatggtctgggtgcttagcgaaacaccgtttttggtctggtccagcagggtgtccacggcgttgcgggcaccggtgatgcggctttgcaggtcgttgagctggttgctcaggctgctgcctgccgcgctggcgtcatcgcaggcgcgattgaccagcgtttgcagggtctccagctcaccgcccaactcctgcagtgtgtcctgggagtaaagcagtgtgctgctgggctccatctggcccacgatgccgccgccctctttgcgggcatagacggggccgtagttgacgcagccctcgacatagccggtttggctgcccacgatgccgccgatgttataaccgatgtgcaggtagcccacggtgccgcggttgaggcaggcgcggaccacgccggaggaagtaccggcgataccgccaatgtcggtgatgtcagcggcattctcggtgccgatcagatcgttcagcgtcagctccgagaggtcgacttcgttctggtcgacggtggtgttgacgttggcgtcgttgccgcagttgatgaccacgccgtggttttcacccacgatgccgccgatgaagtgggcaccgtagacgctgccggtagtggtgcagttgttgatggtgccgctgctcaggttggtaccggcgatgccgcccacaatggatgcgccggaggcaacgccctcgaaccggcagttgatgagcgtaccggcgttgctgcctacgatgccgcctacggtggtgcggctgccggagggcatcgagcggcctcggatggtcagatcatgtaccacgccgtcgtcctggatgtagcggaagaagcccgtcaccgagccgtcgtccaccaggctcaggccgctgatggtgtggctgttgccgtcaaaggtgccgctgaaggtggggataccggcaaagtcaacgccggtcaggtccaggtcggtgttcaggtccaccgtgcggtcctcactccaggagtcgagacggcaatcggcgaccagctgcaaaaggtcttccacactgttgatggagaccggcagcttctcagtctcctctccttctgcccagacgggcagggccagcatcagcagcagcgccagggcagtcaacccggccagcaggcggcgcgggaagttcagctcggtgttcattcagcgtcgccccctttcgtggtgtcggcaggttcattcggggattcgttggtggcggtcacgtcgccttccggcaggtacatatcgggttcatccaccgtgacttcggtgccggtggagatgctggcgttgaactggccatgcagcacgcctttgatctcggcatctaccacgccgttgatgtaaccgcggacgcggccgttgacgtgcatcgtgccgctggcggtgcgggtggtcacgccgatgcccttcatctcaaagctggtgcgctcgatgatggagtcgcccagtaccaggatctgcggcagaacaaacagtaccaggatgatggaaatgatggtgccgcggcccagacactcgccgatagcggcgataacggggttggtggtcagcacgctgatcagcacacccgcggatgccaggatggagccggaggtgaagatggtcgggaaggattcgttcaaagccgctacaatggcctctttgtggtgcatgactttcttcaggtcggtgtagtggctggagataacgatggcgtagtcaatgttcgcgcccatctggatagagttgacgatgaggtaacccaggaagtacagctgcgagtgctgcagatacgggaacgcaaagttaatccagatactgccctgaatgacgatgatgagcagcaccggcagaccggcagacttgaaggtgaacagcaaaaccagaataacgaacaacgcagacagcacgctgatgagcaggttgtcctggccgaaggagctggacaggtccatggcgctggtggtattgcctaccacgtagtagtcactgtcataatacttgcccacgatgtcatggatcttgtccacaaaggcgaaagtctcgtcgctttcctcgggcacgttcaggtaggcgaccaggcggctgtacttgtcactctgcagctggacctgagccttgtccaactgggcgaacaggtcgtccagcgtgtcctgcacatcgccgcccagggtgatgttgccgtcctccatctcctgtttgaggaacataaacatatcgtacagcggaactttgtagtcgctcaggccgttgatgatctcgccatactcgtcgtgctcgacggcgtaggcaccatacagagccttggcaatctcgtagtccaggttggccagctcggagagctggcgcggggtcagggcgtcggtcagcatgtagccgtccatggcttcgatgttggccagaccttgggtagagtcgacctcgggacagctgtccagctcggccaaaatcttgccctcggactcgtaatcgcccgccggtacgatgatggccaccatgttgctggtgccaaactcacccttgatcttctggtaggcggcctgacgctcactctgcttggcggtgaccaggtcggtgtaggtgtagcagtaggggcacaggttcgcaaaaacagctgccgcgatgatgaccaccgcaaagatgggcggcacgatgtagcgggtcttgacgtcgaacttgcctacggcagtgatcctgggcaccaggttcttgtggcgggtcttgtcgatcagcttgctgaacagcaccagcaggccgggcatcaacgtaaagaccgacagcatactgaacaggatggccttgatcagcacagtggccaggtcgcggccaatgccaaagtgcatgaacgccagggcggccaggccgctgatggtggtcagcgaggaggaagagatctccgggatggccttggaaagcgcggcaatgcaggcttcccgaacgcccagcgtctcgtgttcgtcgctgaagcggtggcacagaatgatggcgtagtcgatggccagcgccagctgcaaaatgaccgtgaccgagttggagatgaagctgatggtgccgcacaggaaattggtgcccatgttcagcaaggcggcggcaccaaaggtcatgatgagcacaggcacctcggcgtaagaacgggaggtcagcgtcagcaccagtacaatgatgacggcggcgatgacgatgataacgctcatctcggattgcaggtccgccgaagaatcgtagccgacctcggtgtagatcgaggtgtcgtagtcggccagctcggcgcggatctcgtccatggcggcctcggcgcggggatcgtcaacctcaccgtcaaaactgaccgagaacagtgcggaggaatccttgtagtggtctgaggtctcgtcgaagtcgatggagtccacaccgtcgatgtcctccagctgttcttccagctgaacggccttatcgtaggtgatgttggacaccatgacgcgggccgtgccgtaggtggtgaagttgtcgttcatcacagtcaggccctggcgggtctcggtggagtccggcaggtaggtggtgatgtcgttttccacgttgacccagcccgtagcaatgacacagaaaatcaacgcaaagatgtataaaaggaaaatcaggttacgcttatcgacgataagcgtcgccagcttttccatcgcattaccttttggcttttcgttttccaaagaaatgcagcctcccttaaagtggatgtttcccctattttgtgtgctactattataagaaaaaaatccgttttgtgaaagagacaaaacggatttaatgtacaaaaatatgaacgcctttttgtgtaaaaatactaataaattgtgaacactttattgaggcaaaactgccgccaaagcggcagggacggtttggtaatagttgaatgaaaaagagtcatcgatgataccctcgctgccggtgtagtgggcgtttgtcttgatgactgcccagcagttttgcggcagcggcacccagatctcggcgcacgacgcaccccagttgtcctgagaggcgcagctgcgcagggcctccggcgtgaccgcgacgggcagcggcacagcggcatcccaggcagaaatcagggcgtcgttgcagggcgttgtgtaaaattcgtctgtatagctgccgtcggccagcgcggtaaaaaactgattgagggcttcgcatacgacttccagcttggtatcggtcagtacattgccgtcaggcgggaccgcatagctagtaatgccgtagggcggcgcttccacggagccaaggtcctgcacgctgcggttctcgtagtggtggccatcatcgtcctcattgagcacccagtaggtgtcatagcattgcagggacgcaggaccccaggtcagccccagcggattggtaagctcggcagaagtgattccccagaaagaaacgtcctcactggaggattcgtaatagctggccagggtcacgctttgcgtgtcctcataaaaaggcgaacggcccagccaatctacttttccgtccgcatcgaacgagaggtaatactcatgccgtccgcacagaaacggcgtgttgccggggtcagtgacggtcagggaaaggaacgggctgtcatattccccgccatacagggcggcttccgtgacattcagcccatcaaggtcatccaaagggaaagtgtcggtcagcacacgttccgagcaggcagcccgcacttcctccacatcgttgttgtataggcccatagccagacggtgggcattttccttggcggtatcatcgcgcagagacatggaataccaccagaaattggcgggtgtttctttggtgctgtccagcggcagcatggtatattccagcaggctggccgggttaggcgtaggcgcgggagttggttctggtgtaggttctgccgttggcttcggcgtaattgctggttccgccgccgtggagacagacggttcagccgaactagacacagcagtcccctcccctgctgcgcagcccgccagcagcagggtgcaggccagcgcagcacaagtaatacgcaatttcataaaagtacaccacctttttattacacgagaaactcagaggctcccttgtgtaaagggagctgtcagcaaagctgactgagggattgtcctgtctgcgttgtgatgcggttataatcgtcacgcttcaatccctccgtctgcgctacgcgcagcagcctccctttacacaagggaggcttttaccatctactctaattataccgtcctatgtttccaatatgttacaaaaatgcccacaaaaacaaaaacaccgtgcggtgttgaaccacacggtgttaaaagctattgttaagctaaaattacttcagctcgaccttagcgccgacctcagccagcttcttctggatgtcctcagcgtcagccttggaagcctgctccttcagcttggcgttcggggtctcaaccagcttcttggcctccatcagggaagcgccggtcagctccttaacggtcttgatgacctgcatcttgttggcgccaacgtcagccaggatgacgtcgaactcggtcttctcttcctcagctggagcggcagcgccggcagcagcgggagcagcagcagcaacagcagaaacgccgaactcctcgcagatggtatcaacgagctctttcagctccaggacagtcatagtcttgacagactcgacaatggcagtgatcttctcagaagccatggtagttacctccataaattgtaatgttttaagcggcgcggtttgtattagagcgctgcgcctgggcgctcaagcagctgtgcctaaaatcaggcagcagtctcgtcctgcttgtcgacgataccctgcagggcaacggccaggccgccaacgataccgttgagggagccagccagcatggagagcagaccttcgcggttgggcatggtagacaggctcttgatacctgcagcatccatgacctgaccatcgcagaagccacccttgacgacgaagcgcttggacttgtcggcgtcagcaaacttgcacaggatgcgagcagcagcagccggatcatccggagacagagcgatagccgtgtcacccttgaagtagtcggtcagaccctcgtactgggtgcccttaacggccaggcgcagcatggtgttcttgacgaccatgtaatggacgccagcctcacgcagctccttacgcagcttggtgtcgtcagcaacgctgatgccgttgtaagcaacgacaacaccggccagagaaccagcgatcttctcgttcaggtccttgacaagagccttcttggattccagaatctttgcactgggcatttgaatttcacctcattccacttacagattggtttcggtaagtggctttcttgtgattatacagaaaaaagccatcttcccgtcgccgggaaaatggcttgatagctttgcaatcaaacgcacgtttctcggcaggtgagcttgcgctcattatgccttgcggcacctgctgtcttaaaaacagcttaattagtatagcacgggaacgtgcgtttgtcaatagcttttctcagtaaaacctgaaaaattagacaccgtacttgttggtggcaacgcggacgccgggacccatggtggtggcgatggttgcgctcttgaagtactgacccttggcggcggcgggcttagccttggcgatggcatccaggacggtgtccaggttggtcatcagcttctcggcgccgaaagaggccttgccgatgggcacatggatgatgttctgcttgtccagacggtactcgatcttaccagccttggcatcggtaacagccttgccaacatcgggggtaacagtaccggccttcgggttcggcatcagaccacgggggcccaggaccttaccgagacggccaacgcggcccatcatgtcgggggtggtgaccaggacgtcgaagtccaggtagccgccggcgatcttggcgatcagctcatcatcgccgacctcctgtgcgcctgcagcctcagcggccttggcagcatcgcccttggcgatagcgataacgcgaacgttcttgccggtgccgttgggcaggacaacagcgccgcggacctgctggtcagcgtggcggctgtcaacgcccaggcggacgtgcagctcaacggtctcgtcgaacttagcggtagcggtcttgcagcacagctccagggcctcgctaggatcataagtcttgctgctctcgatcagcttagcagcgtcggtatacttcttgccgtgtttcattgcttattcccctcctgttcaaccctcaacggtaacgcccatgctgcgggcggtgcccttgatcatgctgacagcagcttccagagaagcagcgttcaggtcgggcatcttggtcttggcgatctcctcggcctgagccagcgtgatggagccaaccttgttcttgttgggcacgccggaagcagtgtcgatgccggcagccttcttgatcagaacgggagccggaggagtcttggtgatgaagctgaaggagcggtcagcataaacggtgatgacaacggggatgatcatgcccatctggttcttggtacgctcgttgaactctttggtgaaggccatgatgttaacgcccttctggcccagggcaggaccaacagggggagccggagttgccttgccggcggggatttgcagcttgatgtagccagtgattttctgtgccataatacttgcacctccaaattttgtggtgagttgcggcctgcggtgcagacctcccacgggcgtgcgacctccgcacgccctataaaaaccgtaccccaggccaaagcctgttcgcggtctctaccggaaattgcgatgttctgatttatatcagaacagtttgacctgatgcagctccagttctgcgggcagctcgcggccaaacatggtgatttttacgcgcaccttgcgcgcgggaatgtcgatctcctcgacagtaccgacggaaccttccatcgggccggcggtgatctccaccgtatcgccgaccttgtagtcgaccgtaagctcggccgtggtctcaacgcccatcttggcaacctcagcctcgctcaggggctcaggcttggattcagggccgacaaaaccggtgcagccgcgggtattgcgcacgatgtaccaggtgctgtcgttcatgaccattttgacgaaaacgtaaccgggatacagcttgcgctgcacctctttttcgccggtcttgttgccgcgcttgtccaggacttcttccaggacggtctcggtggggaccttgacatcgcagatcaggtcctggatgcggcggttttctaccatcgtcatcaggtcctgggctactttgttctcgtaaccggaataggtatggactacataccaggatgcttgttcagccatggtctttgcctccgcttaaagcgctcaggcgccgatcatcagatggatggcgccgccgaagatgagatccagcaggatcagcacgacagctgcgaccagcacgaccacgagaaccgtgatggtgttggtctttacatcggctttgctgggccatacgacctttttcaactcgcctttagtatccttaaaatacttgccgatgcctttgaaaaagttcttgaccttgccaaaaaacgaagttttcttggtcttgtcgctttgagcctgggctgcggtgttaaccgcttttttgtctgccatctctaagctcctatcctcacttggtttcgcggtgaagggtatgcttcttgcagaaacggcaatacttcttcatctcaagacgatcaggagaattcttcttgttcttctccttgttgtagttgcgctgcttgcactcggtgcaagccagggtgatcttgacagtcattgttcggcacctccattatcggttaataagcctccctcgcgcttgcaggctgcccgcgaaaatggacataaaaaataaacccgcaaaagaggtgctactatagtaccacaactgcgggtttacgtcaagagaatttacaaatttttttgcgttgcttggagaggaatgtcgatctcctcccccaaagtaaagctgtagatggtcaatttagtcaccggcacagccaaacgctgggcaaaagcgcggcggtacagctgcaattgcgcggcgtattcctttatataaaaggcagcatcgcggctgcggtcggtcttgtagtccaaaatttcggcgtggtcgtcgtagaccagcaccaggtcggcaatgccctgcaccagcacctcagcctcgcactcccctgcttcgggggtgatctgcgcagcgggcagggcggtgatgaacggttcctcccgcagtacggccctggcgtggcggatgcgccgccagacggcactttcaaaaaacgggcgcacgcggtccaggtccagtttgtcggccaagcctgcatccagcaggcgggcatcgatctggtgctgcacctcggcgtccaggtcgggtgcggtgccgtcgaaggggacgctctgcataaaggcgtggatggcggtgccgcgctcggccccggtcatgccggtcttttgcaaaaaggcagggcgctccagcgccacgggccgcgcagcgtgggccacggcgctgacactgaccttggcagggatcttttgcagcggggcgcgggggttgcaccaggcaaagctttggcgcagggtgtccagcagggcttcgtccggcgcgggcgcgggggccggttccggcgcgggggtcgcctcgggcgcaggcaatacctttatagtaagcggtatgcgggtgggcaggtagtggggcagcaggccggtgtaggcccacagcgcgtcactgctggggtgcagcagcacggcggtcagcagccagcccgcccagctggacatgccctgcatggcttcggggccggtggcctcggcgtgggcgcagagggcgggcgttttcagcgagctggctgcctttttcagcggtatcgtgataatcagcgcatcctgggcgcgggtcagcgccacgtacaaaacgcgcatctcctcgctcagcgtttcggtgcggatggcctgggccagcgcggcgtagggcagcgttttgtaccgcttggcggtgctgcccgcccgcagcatgacgcccacgcccagcctgctgtgggtcagcactgggcggatggcgtcgctctggttgaactggtgggaggtgttggccacaaagaccaccgggaactccaaccctttggagcggtgcaccgtcatgatgctgacgcagcccggccgggtctgaccgccggtgttttgggtcaggccgccgttttgccgggcggcatccatggcgcggataactcccggcaggccggtgcgcccggcagaagccgcccaggcgcagaaggattgcagatcctcccggcagcgggcaccctcaggcagggcccccacggcggctaagtacccggtgcgcgccaaaagttcctccaacagcgcgtccactggcagggtgcgggccaggcggcggaactcggccagcgtttccaaaaacggcgcaaatcggggctggccgccgtacagcaccgcgccgtacaaactgccctcggggcaggcaccgcgcagggtgaccagatcgtcggcggtgtacgggaacatggggctgagcagcaccgccgccagaggaatgtcctgggcggggttgtcgatgacccgcagcagcgccgcaaaggggcggatgtggggctcgtccagcaggtccgccgccgtatcggcaaacacggggatacccgcagtgcgcagggcggcttcgtacacggcaaaatcgccgcgcccgcgcagcaaaatgcaaaaatcatcgtagcggcaggggcgctggccggtcttgtcgcgcacgacaaaaccctcggccatcatctcccggatgcgggcggcaatggcggcggcgtccccctcggccccggcaccgtcgatgacatcgacctcgcagaagccgcggtaatcggtagttttgctgcccaccacaaggcgctggccgtcgccgtaggcaacgccgcccaagccttgagagaagaacacctcaaacagatagttgatgcccgcaatgacccccggcgcactgcggaagttggcatccagcgccagcgaggcaggctgcggtgcgggctgggggtaaggctgccagcgctgctgcttgtccacaaacacctgcgggtcggcctggcggaagcggtagatgctctgcttgatgtcgccgacgaagaagaggttgtccccttccgaccgggccagcgcaaagtagatggcatcctgcaaggcgttggtgtcctgatactcgtccaccagcacggccgagtaatggctgctgacggtgcggcacagcggcgtgcgctggttgtcgggcgtcagcagcaggtccagcgtcaggtgctcgaaatcggcgtagtccagcagcttttcttcgcacttggcggcaaagcaggcatcggcgaactgctgggtcacccgcaccagcgcgtccaccaggggcgcggcgcggcggcggtcagcagcgtattcctcgccggtacacagcaaaaagtcggtgcgcaggctttcgatctgctttttggcgcgggcgcgcagctcactggccgcaaaggcgcaggggttgccgtccttgccgcccttgatgcgcccggcccgccgccaggcggtgtcgaactcgcccagcgcggccacggatctatcccaatcgcctttctcaagtacctggcacagccaggtcacgcggtcggcatcctcctgcaaaacggcggtgtaagcaaagtcggcggcctcgtctttggcggcggtgcgggccgcagcctgcagcaaggcgcgggcgccctgagcgcgctgcaaagagatagccagcagattctgcccccagggggtgtcctggggcggggcgtcctgctgccacatggcggcaaactgctgcagcacctcggccgggtggggcagagcacggctgaaatggtacagctccagcacggcgttgccggcggtattgtcggtgcggccccggccgtagaggtccgcaaaggcgcggaaatctgcatcggtgtaggccgattccaaaacggcggaaagtgtctcctgctcaatgcgggccagctcagcttcctcggcggtggtaaagtccggcggcacatccagcgcggcaaagtgctgctgcacaaaatgcaggcagaaggcatccaccgtgccgatggctgcccgctgcaatagcaattgctggcggcgcaggcgcatgtctccggggtgggcgcgcacttcctcggccaggcgggtggtgatgtccgcccgcagtttggcggcggctgcgttggtaaaggtcatgatgagcaggctgtcggcctccacggggtggatcgggtcggtgatgaggcccaccacccgctcgaccaacacgcgggtcttgccggaaccggcggccgccgacaccagcaaactgccgccccgggccgtaatggcggccgattgggcgggggtaaattgtatcttggcagattcaggcataggccagcttcctcgttctcgtcattcttcaaaaggttcgtccggcacggcgggggtgcgctcgtgctcgccgtcccggtggcggcaggccatgcggaactcgcagtaggtgcaggggctgcgggcaccggaacacagcggtttggcgtcgatctcgccgctgtacaaatcctgcgccatttgggtcagcaggccgtccaggtggtcgcggatgcgccgcagcttggcttcgtcggccagcctccccttgctgttggtgatgcgtccggtcttggcgctgaaattcagcggcacaaactcccctgtccccctggtgtccatggcgcggtagatactctcattatccaaaagcaggccgttcagcgggtaggtgggctgcaggtcggcctcttcgccggacacttcctgccggggcacgctctcgggtgcagggtcagccagcaggtattctacgccggcggcggcaggggccgggaacagcgaatcgccgttgcgttccagcgtaaacagatacaaaagcatctggcagtccagcccgcagtagacttctttgagctggaagtccttgccgccggtcttgtagtccaccacccgcaggtaagtgcggccgtcgccgggcagcggcatggcgtccacgcggtcgacggtgcccaccacgcggatggtatgccctgccccgtcatccaggcgcaccggctcgatgcgcggggcgtcggggtcgtcgccggggcggtcatcgatgcgcagctcaaaggccaccggctgaaagcccgactggcgcaggtcccgctggatgaaccccagcaggttaacgaggttacggcggatgcgctccactaaatactgcatgcgcacggtggcgccgggcagattggcggtgacgtactcgtccaccagactgtccacaagggcctgcaattcctcgggcgtcaggtccttaaaggcggcgccctggcggcgcagggcgttttccagcacccagtgggtcagcgtgccgctgatgttgggggccagctcggccttttggcgcggtgcggcccgcagaatgtactgcaaaaagtagccgaaggggcaggtctggtatttttcaaaccgggtgggactgatgcgcagctcccgtcccagcagcttttccagcgcggcggtgttctgcactttggtgggtgcatcggggtcgtcctgggcaatgcgtaccacggcggcgtacccggtggaaagctcgccggtcttttcggcttcgtccagcgcggtgcgaacagcggcaccggcggcgctctgggccgggtcctgggtcagcacgcccagcacatccagcgcggcggcgggggcggcggccagctcagcggcggtgggctgcacaaagggtgcctgcagcaggttcagcaccggggccagtgcggcgctggcggggtcagtatcctcggcatgggcggcaccgggccagctgagccaaaggaaccgctgcgacaccgtgagggccttgtaaaagcagatgccctcgcgcaggactttgttttcaaaacagtcgggcagttcggccccctgatggatcatcaagtcgcggtcggcatgggtcaaaaggccctggtcgccgggcgtctggggaaactcaccctccagtagacccaccacaaacacagcgtcggtctccggcaggcgcatacggcccgcggtggtcaagatcacgctgtccagactttgggggatatgccccatgtcggtggtgcgcagcagcagcgtgaacagttcggcgtagtcggcgggggcgagcacttcgtcccccagcagcagggccaactggttcagcaggcccatgaccacgttccactcccgcagcacttcgtccgcttcgggcaggcggccctgggcacgcagcgtttcggccagggtgttgagggtgtcttcggcccccagggcttgtaaaaataggtagagctgtttggtcagcgcggcggccccgacgtttttggtgcggggcagaaagtctgcgacccgctccatcacaaaggcgcgggcggcttcagcgtccgccaaggtctggcggtcctgctctttatcggtgcccgcgtacccggcagcgctgcgggtgaagggctcacgccaatcggcggcgcgcaacggccaggtgtaagcatagttttccagtgcgcactgctgctgttccggcaggtcgacgaggccggtcttgagcagacgcagcaaactgcggctggagacaccgccgcgggccaggtccagcgcggcatgcacggcgcgggcgggggcggtgttctccggcgtggtggcttcgtcgcaaaacagcgggatgccctgcaggcggaattcgtaccgcagtgcgccaagatacccggcggtgtcgcggcagatgaccgccatgcggctgtagggcacgccggcgcgggcacggacggcgatggcggcggccacggccttggcctcggcctggcggctggcggcggcatagcagacgatggccgggtcggcagggtccaccgtgcagtccggcgtataggtcgggtcggccagcagcaggttcagttcggccagcgcggggacgccggcgtggcgcttgtcctcggtcagaactaccgtgcgggtgggcacattggcatcggcggtcatccgctttaagccggcaatcacccgctgcacgccgctgaacagccccatgcccccggcagtgtcctgttcgccatcgcagcacaggcagacggtcacatccgccaccggcagcatggcagccagcagggcgcgtttgggcgcgttgaaggtatcaaactcatccatgtacacggcgcggcccgcaaaaaagctggcatccagcatctgcgccgccagctgttggcggtcgccgggatccatggccgtctgggccagctgggcctcgtaggagccgtagatcagcgaaagttcttccagcttttcccggtcagcccccggcaggcgggcataggcggccagctggtcgggggtgatgccggcacttttcagttcctcgatggtctgggcggctttctcgcaaaaagcggcgctgcggcgctggcggttgtagtagacgactttgtccagcaggctgtccgccgcacggcgcaccagcagggcacggccggcttcgctcagggtctccacggccgcaccgccgtaacggcgcagcagtgcttccgccagcgaggtgaaggagtagctttccacgtaggcggacaggctgtcgcccaaaatatggtagagcgtcccctcggtggaggaggtgaactgttccggcacgatgagcaggctgcgctggccgttttcggcgcgggcgcgcagctcggccagcatccgccgggatttcccgctgccggaggggcctaaaatgaatgtgagcatggagtgttccttttttactgttgaatccaatttttcactgcgtccaccaccgcaaaccggacctcataccgcccaaacaccagggcgttttcggcctgggaggggtacttggcctgggcaccggagacacagagtgcggggtacagcacacaaaaccagttgtggcctttcccctcccccagctccacccgcagcgcggtgtagcgcccgcccggcagggcgaagctgccgtaatcccgcggggcaaaatccagccgttccagtttcagccgggcagtctgggggctgtgggctttgtacaaggcctgctgtgcggcctggtgcagcacgggcagcgcctgccgcagggcggcttcggctccggtggtggtgtcggcctgcaaaacgctgtcgggcagggcggccaaaatggcatcccgcacctgcagcttgaccagctgatcctccagcgtgtcgctgttggccaaaatgtgcagccgcaccgtgtcggcgcagacgcggtcggctacctggcggcggtgggcggcgaaagctgtaagtaaaaccgtaagtgcgaaccccagcgcaaagccaagctccagcacgcggcgctttttttccagttttttcagcatacaagttctcccctttcgcagacagtatgggcgaaaagggagcatttgaatcaactattttttctcaaacatctggcggcgcaccgtgacacgcggcccaccgtgggtggggcggcagaggtagcactgcttgtagttgggacgcagggcggtcagggcattgcgggcggcggtctcgtcgtcgaacacgccaaatacagccgcaccgctgccggtcatctgggcggtcagggcaccatgctcccgcagggtggcacagatggaaggggtctccaccgcgccggagcagtgctccagcgcattgcccgctgcagcgcagacggcgcgcaggttctcggcgcggatggcctgctcctgggcttcgcagtccgggtggaccgggctgcccatcgtgtcataccgggcaaaggcctcgggggtggaaacgcccacgctgggcattgccaccacgaaccagcaatccgggcagggcggcagggccttcatcaggtcgcccacaccgtgcacgcggcaggtgccgcccagcagtgcaaagggcacgtcagccccaatgcccgcgccgatggcgcacagctcgctcatcgaaagatgggcgtcgtacagctcgctcaggcccaccagcacaccggcagcgtcggcactgccgcccgccataccggcgcgcaccggcacccgcttgtagatggtcatgtccacaccggccaaaagccccgtgtagcggaaaaaggccacggcggccttgatggcggtgtttttatcgttgacaggcacaaagctgcccggcagcgtcagcgaaagcgtattgctgcggcgcagtgtgattttttcgtataaatcgatggtctgcatgaccatgtccaggtcatggtagccgttgggcagcgtgcccaccacgtccagcgaaaggttcagcttggccggggccagcacggttacggaacgttttaacatggcgctcacttctcccatccgtgttcgtgcaaaaattcgcggatacgcttcatcgcggtctgcaggtgatccacgctgtaggcgtagctgatgcgggcgtagccttcgcccgatgcaccgaacgcgctgccggggatgatggcaacttccttttcccgcagcagctgctcgcagaattcgctgctggtcaggccgctgatctgaatggacggaaagacgtaaaacgcgccccgcggctcaaagcaggtcaggcccatatcgttgagtgatttcactacataacggcggcggcggttgtattcgtcacgcatcatctcgatctggtcgtcgcactggtgcagtgccgtgatggcggcgtactggctggtggtgggggccgacatgatgcagctctggtgaattttcgtcatcaccttgatgagcggcgcaggacccgcggcgtagcccagccgccagccggtcatggcgtaggatttggagaagccgttgactacgatggtgcgctcggccatgccgggcagcgaggcaatggacacatggcggtcgaggccgtaggtcaattcggagtagatttcgtccgacaatacgacaacgtttgtctcccgcaggacggcggcgatctcctccatctcggcggcgctcatcacagcgccggtggggttgttggggtacgggaagatcagcagcttggtcttgggcgtgatggcggcccgcagctggtcggcagtcaggcggaactgatcctcggcgcgggtggcaatgtgcaccggaacgccgccggtcagctgggtgatcggctcgtagcaaacgaagcagggctcggggatgacgacctcatcccccggctgcaccagggcgcggatggtcaggtcgatggcctcgctgccgccgacggtgactaggacattttcctctttatagtgcagttcaaaccggcgggccaggtagttgcagatctcgctgcgcagttcttttaagcccgcgttggcggtgtacttggtacggcccagttccaggctgcggatgccggcatcgcgcacgctccagggcgttttgaagtccggctcgcccacacccagagagatgcagtggggcatatcggctgccaggtcaaagaacttgcggatgcccgagggccgcatggatttcgcggcaggcgcaagcagttcatcgtagttgatcacaggacggtacactctctttcatcgggctcttcgggcagatacaggcggccgccgcgcttgtaggggcgcagcacaaagctggtggcggtagagagcacgtcgtccagcggggacaggcgcttggccacgaagatggcgatctcctggaagctgcggcccttgatgatgacctgcaggtcgtagctgccgctcatcagcagcacggtgtccacctcgtcaaactgggcgatggtcatgccgatatcgtcaaagccgcgggccttgtggggggtcacgcgcagctcgatcacagcctcgaccaggttgaccccggcctgctcccaatcgatgagggtctcgtagccgcggatgtagcctttttcggcggcttcatccatcatggcggcgacctccgtgggggtcttatccagcatggcggcaatatcctcaatgggcatacgggcgtttttttccaaaatgcgaagcagttcttccataatgatacacctctacaatcgtgctatatacagatgattatagcatagatggagtggaaatgccaagaatttttcatcgcccccaaaacaaaagagcatgtaccccaaaaggcacatgctcttgaaattattcggcggccgattcgctgtcagcgctgtcttccccgccgtcctcggccggggcatcctcgctgtcggcggaggtgtacttctccgcgctcgtgtccgaagcggcatcgtcgttcagcacagtgctggtgtcggccatggcgttgcccagctggtcttccaccatgctctgggcatcctgcggtacattggccgtgggggccggggtggcggtggcttcgggtttcatctcactctcctgcagggcgctcaggtaccattcgtggttgctgccctgggtgaagacgtaatccatatacttggtgggggtggtgggcgcggtcagtgaaagctccccgttggaggaactgttcgtggcggtgggaatgtaacccacggtcacatactgcttgccgtccgctttccagatcttctctacttccggcgtgtactgcgccaccgagctggtgacgggcaccaggtagccctgcttttcctcgtcatactgataagaaaatacgtcggtgctgaaactgccgtcgtccacggtgtaatccggccccagcaggttggcaatgtaggtgtcgatctccagcttggggatgatggccgagccggtgtcggggtcacgctcgtactggtccaggctgccgccgctgttctgcacctgatagacggtgccccagatggcggcctgcttgaaaacgccggggtctacgctggatacatcgctgaaagccagcgggtccagcatgaccataccgaacaggcggtcctcgtaggctttgcggcggtcggaatcatccagcacactgcgcagcaggctgaccacccagccaaacacggtgaaaagaccaatgacagccagcagcagcgctacgccgcctacgatctgccgtgccagacggcggttattgcggatatgttcttctttgtaatttgccatttcggattaggtgctcctttgggagaatgagaaatgcacagcgcaattacttgttcttgtacatctgctcgtagtatttctggtagtcgccgctggtgacgtgggccatccagtcggggtgtgccaggtaccagtcaatggtcagcacgatgcccttctcaaacggggtctcggggtaccaacccagatcttccttgatcttggtggggtcgatgccgtaacggcggtcgtggcccagacggtcggccacgtgggtgatgagctcctcgctgatgcccttgtccttcaggcggtcatgcagctgggcgatgacggtcttgacgatgaagatgttggggcgctcgttgtggccgcccacattgtagacttcgccgtccttgccgccgttggcgaccatgtcgatggccttgcagtgatccataacgtacagccagtcgcggatctgcatgccgtcgccgtaaacgggcagctgcttgtgctgcttggcgttgttgatgagcagcgggatcagcttctcggggaactgatagggaccgtagttgttggagcagcgggtgatgttcatcggcatgccataggtatcgtggaatgccttgacgaacatgtcggcgctggccttggaggcagagtacgggctgtgggggcacagcggggtggtttccatgaagtaaccttcggcacccagggcgccgtagacttcgtcggtagagacctgcagatacttcttgccctctttccaggtcttggcggcggcgtcataccaggcgtccttgcagcactgcagcaggttcacggtgcccagcacgttgctctcgacgaagatctcggggttcttgatgctgcggtcaacgtggctctcggcggcaaagttgatgacataatcggggtcatacttggcgatcaggtcggtgaccagggctttgtcgcagatgtcgccctgcacgaagatgtggcgggcgtcgccctcgatgtcctgcaggttctccaggttgccggcgtaggtcagtttgtccagattgatgaggcggatgtcctcgtacttctccagcatgtaatgcacaaagttggagccgatgaaaccggcacagccggtaacaagataggttttcataatttataattctccgttccagtttgcaaagaaatcgtgtaaggcatcctgccagtcgcgcatctcgtcgccgacggtgcagcgcagcatgcggttctccagggcgctccaggcggggcggctggcgctggcggggttggcagcggcgtactcggcgctggtgcaggggttcaccttgcagggcaggccggcttccttcatgatggcggaagcaaaatcataccagctgcagatgccgttgccggtgcagtggtagatgccgtaatcgtggctgacggccagcttgaggatgtggtaggccaggtccaccgcgttggtggggttgcccagctggtcattgacaacggtgatctcgtcgtgggttttgcccaggcggaccatggtcttgacaaagttttttccatagtagctgtacagccaggcggtgcgcacgatgaaatggcggcggcagaaccgctcgacatactgctcgcccagcagcttggtctggccgtaggccgagataggcgcgggcacggcgcactcgtccagggcgatgccgccgttggcgacaccggggaacacatagtccgtagaaacatggatcaggcgggcgttgaccttctcacaggccagggccaggttgcggggtcccagagcgttgaccttgtaggccgcatcgcgggagatctcgcagccgtccacattggtgaaagccgcgcagttgatgacagtctcaggctggtggcggcggatatagttgatggtcgcttcacggtcggtgatgtccagttcatccacatccacggagatgatggtggccttgcgcagccgctccgacagcgggccgaggacgcagctctcggcagccagctgcttttgcagctcggtacccagctggccgcggcagccggtaattaaaatcttcatgataactcccctgttctgcgcttagtactgcagcttgtcgtcggccacgttcttcaggtgctggccgtaggggctcttgccgtaacgggcggcgctttccagcagtttctccttggtgatccagccgtacttgtaggcgatctcctcgggagccgagatcttaatgccctggcgctgctcgacggtctgcacaaaggtggcagcttccaccagagagtccatcgtgccggtgtccagccaggcgtagccacggcccagcagctgcacatccagcttgccctcgtccaggtacatctggttcagggtggtgatctccagttcgccgcgggcgctgggcttgacctgcttggccatcttgacgacgtccttgttgtagaaatacaggccggtgacggcgtagttgctcttgggttcggcgggcttttcctcgatagaggtggcatggccgtccttgtcaaaggcgacaacgccgaaacgctcggggtcgttgacaaagtagccgaacacggtgctgcggccggcggcggcgttggctgcagcgcccttgagccgcttggagaaaccggcgccgtagaagatgttgtcgcccaaaaccatggcgcagcagtcatcgccgatgaactcctcgcccagaatgaacgcctgtgccaggccgtccgggctgggctgtaccttgtactgcaggtgcaggccgtactggctgccgtcccccagcagggcctcaaaacgcggggtgtcggtgggggtggagatgatcaggatgtcctggatgccggccagcatcagggtggacagcgggtagtagatcatcggtttgtcgtaaacgggcagcagctgcttggaggtgaccatcgtcagcgggtaaagtcgggtgccggcgccgccggcaaggataatacctttcatcgttacaactccttattttatattccgtgcgcgccgcccatcccacgggggcaggtccccctggggcataatctcgcacaatagtagagttattataacgcatttacgccccgggcgcaaggggcaaatcttgccggaaactgcgcccggcggctggattttgttgccaatttgttacctttttgtgacgattgcttgacgtaaagggcgctgtgtggtacaatgtacaaaacgtaaatgttaatggcgcgtatctctgcgcatttttatagccgatcctcggcctttgtactttgaatttaaggaggcgttttcgcgttgaaacgctttttatgcgctgcattttttatggcgcttgtcgttttatttgctgcctgcggcgcgctgaacagcagcaccgcggccagtgccgccacggcgacccccaccagttctacctcccgcacccagaaaagtgagccggtgcaggtgaaggaaaaccccgccaaggtggatgtggtcggtgagcaggccgcgacagcccccacggctaccgcagcccccgcccagacccccgcgaccggggatttcccggtgatgtatctggcaggtgtgatcgggctgatcctgatctgttcggccggacttttaatgcttcgtaaaatataagcggacaacgccctgcggggcgtttttttgttatggcaacaccgcacaattcccgcctaacggcttaagcaccgctccggcggctgcggcacggcatctgcgttgccaaaatgctcgataatacacaaagtattatctgcgcttttggcttagcagctgccgcacctcgctcgccgtatcggcacttagaattgtgcggtattgcctttattatactacacgcacccccgcattgccaaaagtttttgcttgacaaggcccgtctttcgtgtatactgaaagcagacataaaaacaggggcgctggggggcatcctcggctgagaccgaaatcaactgcgattttggaaaccttacacctgatccgggtaatgccggcgtaggaagtttgacccatagtcgtactactttgcgcctgcatgttttgcaggcgctttttcttgtttttatgtactatttttgaggagtggataccatgtccaaaacctattccaagacccgcactctggtagagtgcgccctgatgatcgcgctgggcaccgtgctggcgaacatcaagatctattccctgcccaacggcggctccatcacgctgttcagcatgctgccgttcatcatgatctcgttccgccacggggtcaaatggggcctgttcaccggctttgtcaacagcctgctgcagatgctgctgggcttctatgcaccgccggcccccggcctgctgccgctggttggcatgattttgctggactacgtgctggcctttaccctgctgggcctggcctgcgccatcgctaagcccttcagcaacaagctggtgggtgtcggcgtcggcacggctgtcgtctgcttcatccgctttatgtgcagctttttatccggcgtgctgatctggggcaacctgagcgacggcctgcccgcctggacctacagcctgacctacaacggcagctacatgctgcccgagaccatcatgacgaccattgccgccgtgctgatctacaaggccgctccgcagctgttccgcgcacagaacgactaaattctttcccattcctaaaaaagctgcctaaaattc

SEQ ID NO: 7979 - DNA, 2122 bp, Unknown
  gut microbiota DNA sequence
atgatggattttaaacggagaggaggcaaagctatgccgcggcattaccgcaaactgcggggcaactcggcctattatccctttgcggcgcgcaccggcatgcgggcccgccagcggcgggagatccgcgccctgcgcatcgccggtacggtgctgctgggggcggctgctgctttgcttctgcgccagactgtaggccgcggcggccagccggaagctccggtacagcctgtcccctcccctgcgctggtggaaacggcagaaaacgcccgcggcagcagcatcacggtgcagcctgtggctgcaacccgcgacgccctggccgccacactggatgccgacgatgccgctcacgccaccccggctccggcagccccggctgcccacatccaggaggtactgcctgcctaccgcgacctctacgagcagaaccccgacctcatcggatggctgaccatcgacggcactgacatcgacctgcccgtggtgcagacccccggcaacaacgagtactacctgcgccgcggctttgaccggctttacgccaccagcggcacgctgttcatggacgagcactgctccatcgatcccgacgcccccaccgccaactggctgatctacggccataacatggtggacggttcgatgttcggccaactgacccgctaccgcagcgaggatttttacaaagcacacaccacctttacctttaacacgatctacgaaacggcagcctggcaggtagtggccgcgctggatacgaccctgggcgcggatgaactgccctactacaccttttttgatgcggataccaagctggagtggcagcagcgcgtggacgccatcacagcgctgtccctctatgataccggcgtgacgccggcatatggccagcaattgctggtgctttccacctgcggtacctcctcgcccgccgctaagacccgctttgccctgctggcagtgcggtgcggcgaaaactgattttgcacttgcattttataaaagaatcgtctatgatggtgcatgaactattttagtcaaaaaaggagcctgtacaaactatggcagaatttacctatgaagttacggagcgcatcgctgtgctttctaccaacgcccgcggctgggagcgccagctgaacatggtcagctggaacggcaacccgccgaagtatgacatccgcgattggtccccggacggcagccgcatggccaagggcatcagcctgactgaggaagagctcaagactctgaaagacatcctgaacgatatggaactgtgaggttcgcatggaagactaccgcgcccggtttgtggagatctacaataaaaacatcacgcgccccggcgcggaccgcctgctgagctggctggagaccacggactttttcacggcccctgcctccacccgctaccacggtgcctgcgagtgcggtctggtcatgcacagcctgaacgtctacgacgcgatgatgcagcatttttacaccgagggcgaaaacgccgaaagctacgccatctgtgccctgctgcacgacctgtgcaaggctaatttttacaaagtcagcacccgcaacgtgaaaaacgacgccaccggccaatgggagaaagtgccgttttaccaggtggctgaccagctgccctacggccacggcgaaaagagcgtgtatctcatcgagcatttcatgcgcttgaaaaccgccgaggctattgctatccgctggcatatgggcgggtttgatgatgccgtccgcggcggcagctttgccgtgagcgatgcctacaacagctatcccctcgctgtaaagctccacatcgccgacctgacggcaacttacctgatggagcagggcaccagcgctgtggaaaacgggcatcccaaaaacaaatgatttcatatcgcgcctagcgggcgttgccaccatgtggcaacgcccttttttagtgggcttcttccgccgggtgggaaaacggctgcatagggtgcgttttgggaaaatcgctgtgtatatgcgcacgcagtaaaacggccaggttcttccatatagaggtgttcttccattagcgaatatggtatactcagtttagtccggaatttgtaaaggagtgtgactatat

SEQ ID NO: 7980 - DNA, 41891 bp, Unknown
  gut microbiota DNA sequence
gtgcaattctctgctataatagctgtaatgatagaaaattctgtgcgcttttgcagagaggccgcactttgaaaggggattttagaatggcaatctctgaacctactgccgtattttccatccgggatgaccgggatatggagatcaaacaggcagtattgcaggtctaccgtgcgctggaagagaaaggctacaaccccattaaccagctggtgggctacatcctgtcggaggacccgacttacattaccacgtacaaaaacgcccgcgccatcatccgccgcattgaccgcgacgatctgctgcaggctttggtgcgcgactttgtaaaaggctgatttttcaacagaatatgcaaaaaacgcccgtgtgctttagctggcacacaggcgttttgttttattgatgctgcttagtcggcaaaaaaggcgttctgcacggcgttaagcacagcggcgcggccagcggtaaagttgacaccgccctgcaggtagcaggtgtagggggtgcgcagggggccgtcgcagctgatctcgatggtgctgccctcggtaaagctgccagaggccatgaccaccttgtcggtgtagccgggctcgtcagcgggctcagggtcagcgaagctgtccaccgggctgttgtgctggataccggcgcagaagcccgtgagggcggcggcactgccagaatcgaaacaggtcacgatgtcgttgtggtcgtcggtgtagcggggcaccggcttgacccccaccagctccagcaggcactgggcgtagatagcggtcttgagggcctcgcacacgacgccgggggcgtagtagaagcccaggaaagtatcccgcaggctgtcctgggtgcagcccaggtcggcgccgatgccgggagccgtgaagcggtggctgcacttttccaccaggtcggcgcggcctgcaatgtagccgccggtgggggtgatgccgccgccggggtttttgatgaaactgccggcgatcaggtccgcgcctgcggccagaggctcctgcgtctgggtgaactcgccgtagcagttatccacaaagatgaccgcatcggggttggccttgcgagcagtctcggccaccctgcggatcgtctctaaatcgaacgcattgcgctgcatgtaaccgcggctgcgctggatgtgcacaacggtagccgttttggctttttcagcaatcagcgcgtagtccggggtgttgtcgggcagcagcgggcactcgtcgtagttgacgccgtactcccgcagggtgccgcagcccttgcctgcttcgccaataccgatgacaccctccaacgtatcgtaggggcggccggtggcggccagcagggtatcgccggtgcgcagcagaccaaacagggcgaccgtcagggtgtgggtgccgctcatgaactgagagcgcacgagggcagcctcggcgcccatgcagcgggcgaagacctcctccagcttattacggctgtcgtcccagacgccgtagccgctggaaccccagaagtgccgggcctcgacaccgcaatcggtgaaggcacgcagcattttcagctggttgtagtcgcggatctcctccacatggcagaaaggttcacgacaaagttccaaagcttttcggtccagttccagcacgtcggggcgtaaattgtagaattgttcgatcattttgtattccaatctgtagtatattgttgaatcatgccattttgtacaaacccaagccgctggtaaaatccgcggaggtggggcaggcagaggaaacagacgtccttctccgccgccaattcgttggccaggctggcaatcagccagcctgccaatcccctgccccgccattccggcgcggtgacaccggcggccatgtaggcttcgcgggtgctctgctcatagcagcctaccgtgcagacgggcttgctattgtacagcagagcgcggcaggtgccatagccatgggccagggccgtgcaggcggtggagtagaattcgtcggcctcggcatcgctctcggcaaagaccaggcggctgatgggcagcatcgaaggggcagtgtccagcgtaaggccccactttcccgccggagactttggcggaggcagtgcatggccctggggcagcgtccacagggtcagcggttttccggactgccatgtgttggcgtaggccgcaggcagcgggtgttcgcaccgcaggcagtcgacgtgcaggaatcgcaggaagccctgcagttcctcgcgtgtgtcctcgtcgtcgggcaggccaccgcacagggcgccgctgccgccgcgcagttccagcaccgccgtgccgggcagcaggtagaacatccacccgctggccgagtgcgcgccgaacaatgccagatgggtgcccagcacgctctcaaaatacggcttgccggcaatgcgccggcggtactcggcttgttgctgcggtgtggtaacggcttggatcatgggtggtccttttctgttccttttcttataagaaaaggaaccaaaagaattttaatgaaaaagcatagaaacgggcggctatagaatccgcccctatgtgggttggagttctatcgtacatagggcggcatttttatgctaattttgtttgaaaattctttgcgcaactttctttcaagaaagctgcatcacaatgtttttataatcccgcccgcggacctcgaagttggggtagaggtcgaaggaggcggacgccggggacaggctgacgacgtcgccgggctgggcggcactacgggccagctcaacggcatgctgcatgttgtcggcgtgcaggatagtcagcttgctttcgtcaaagtctggatgctcgcgcacggccttctcgatgcgggggccggtagcgcccatcagcaccagcgtcttgacgtgggcgatgatctccggggccagcggctcgtaggggatctttttatcgtagccgcccgcgatcaggatgatcttctggtcaaagctgcgcaggcccgcgatggtgcgcgtggggctggatgcgatggagtcgttgtagtaagtaacgccgtccagtacgcggaccggctcaatgcggtgctcaacacccgtaaaagtggagccgacctggcgcatagcctcgacgggcacgcggccccagacggcggcaatggctgccagcaggttttccacgttgtgcaggccgcgcagtttgatctcagcgcggggcagcacaggggtcacaacgccgttctcggcatagcaaagcgtatcatcgcttgcgcgcaggaaggcgccgcggtcggtctcatgcaggcgggtgaaccagacctgctcgcccttgcaatcgctctgcatggcgcgggtgatgtcgttctcgtagcccagcacggcacggcagggcggcacctgccaaagcaggatgttgcgcttggcatcgatgtactcctgcatatccttgtggtggtccagatggttgggggtcacgttggtgacgaccgccaccttggggctgcggcgcatgctgataagctggaagctggacagttcgaccacggccacggcatcaggcgtgacgtcggccagctggggcagcagcgccgcaccgatgttgccgcccaaaaagactttgcggccggcggcctcaaacattttggaaatcagcgtagtagtggtggtcttgccgtcggagccggtcacagccacgatctcacaggggcagaactcgaagaaaagctccacctcgctggtgaccatagcgccagcggccttggcagcctgcagttcgggcttgaaatactcataacccggcgtgcgcatgatgatgtcctgcccagcgaaaccgtcggtgtaatgctcgcccagactcagggccacattcaggcggcgcagcgtgtcggcgtagtcgccaaagtcctcgatggattttttctggtcgcacagcgtgacctgtgcgcccagttctacaaactgctcaatgcagcgcttgtggctgacaccggcaccgataaaggcaacttttttgccctgaataagtttttccagctgttcgatcggcagcatagctatctctcccctgctttataatttggtttgaatctatacgctattatatacgattacgtgcgtccctgcaacaaaattcggcccgccgaagcggaccgaacaagatttattttaaatccatcggcatcggcggacatgcgccgacaataccgataccgctagagccaaaaagtgcatttttgtgtcgtcaggcgcgaaaatgtgctttttttgcggcggggtgtatccaaaggaggggtacaggagcatggcgcagccacaagcgacgaaccccttctttgagcgcacgaagtacgcgcttactgctggccgcccatggggatgccgtgcttatccagcagggtgcggatcttggtcatcggatcgatgatggaagaaacgctcttgtcgtggttgatggcggcgatgaagtaagcggtatacttggaaacgtcgacgtcgtagtaccactcgcggtccagcagctcgggcttgcggtaggtcaggttggtgcccagcacagccttgatgatgccgtcgtggtaggccttgtcgaacttctccaggccggcggtgaacagcgggaaggtgcagcaggtgaagatgttgcgggcaccgcgcatcttcagctcgtaggcaatatccagcatggactcgccggaagcaatgatgtcgtcagcgatgaagacatccttgccctggacgctctcgcccaggtactcgtgggcaacgatggggttacgaccgttgacgatgcggctgtaatcgcggcgcttgtagaacatgcccaggttgcagcccagcacgctggagtagtacatgttgcggttcatggcgccctcgtcgggagaaacgatcatgaagttatccttgtggaagctgacatcaggcacgtgatgcagcaggcacttgagcacctggtaggtgggcatgacgttgtcgaagctcatggtggggacggcgttcatgacgcgggggtcatgagcatcaaaggtgatgatgttcttaacgccgacatcacgcagctgctgcagcgcaaaagcgcagtccaggctctcacggctgacgcggcgatgctggcggccgccgtacagactgggcataatgacgctgatgcggtgggcgcggcctgcaacggcctggatcagacgcatcaggttctggaaatggtcgtcgggagagagatggttctcatagccgaacagctggtaggtaacgctgtagttgcccggatcgacgaagatatacaggtcgtcgccacgggtagaagccttgaccaggccctttgcgtcgccggactggaaacgcgggcaatcagacgggataatgaaggtgtcaacatccatgccaacctcgcgcgcccagcgcaccaggtgaccatctaccagcttgcacagttcctcggcgccggggcaggcaatcagacccaggtcagcaattgcagactccgtggcgaagaaatcgcgcgggctaatattttgttcagccatacgtgtgtactccttacttccatcacaaatttttaccgttcatcagcggcgggcataccgccacatctattagtattgtatcacagcccccgtgtaaaatcagccccggcatgcgtttttctgccgttttttcgcattttccgcgctttgcacatgcacagttcgccattgtttgaaaaatactggcggattttacaaaaaatttgcaaaaggcggacagaaccaagctccatccgcctattacaggtatttctacgcttttgcgcttactctttggtcttggtttcgctttcgtggatttttcgcaggatcatctttgcatcactgcggcggttttcagcaccatccatatccacacggttcagcgccccttctgtcttggcggggatgaccagctgcagcttgcacatcttgtacagcaggcccaccagcatgaccgtattctgcaccaggcgcttttcacggtcgttgtattgctgccaatcagtacgctcactacacaccgcattggacagtctttgtccttctacaaataaatttaaaatttgcagcaaaaaaggctcccgccaaaatctggcaggagccttgctgtgttatatttactttttgtgctcaggttcttcgggttctttgcgcggggtcaggcggacttcctggacgcggcggttggtggcacgggtgacggtgccctcaaactggccccaggtgaagcggtcgcctaccttaggcaggcggctgagcttttcctgcaccaggccgccgatggccacagcgtcgatctcttcctcgtccttgtctttgacgtccagctcttcggcaacatcgtccacgctggcgctgccggagaccagccaactgccgtcggtctgatggcggatgtcctccaccacgtcatcgtgttcgtcccagatctcgccgaccagctcttccaggatgtcctccagcgtgatgatgccagcggtgccgccgtattcatccacgaccacggccatatggtgcttgctttcccgcagggtgcgcagcaaggcggagatctgggtcacactggtagtgtacagcgtaggtccgatgagattctccagtttgacgttgttgtcccgcttttgcaacgcggcaaagcaatccttctcatgcacaacgccgatgatgttgtcgatcgtctcgtggtagaccggaaggcgcgaatagccgctctcggcgaagcgctcggtcacttcctccatgggggtatcgtccgctacggccaccacgtccacgcggggcgtcaggacgtcctgggcttccacgtcatcaaactcaatggcactgcggatcagctcgctctcgcgattggtcagctcaccgtctttctcggcttcgctgaccatcgtgaccagctcaccttcggtgatggtgtccttctcccctgcattgaagcggcgggccaggaagtttttccaggctccgaacagcatgttcagcggcgtaaagatcgtaaccagaaaacccagcaccggcgcgaaggccatggccatggtttcgggcatttcctttgccatgcttttgggggtgatttcgccaaaagtcaggaccagcagggtcatgacaatggtggaaaccgtagggccataggtattgcccaccaggcggctgaacaatacggtggcaagcgaggacgcaccgatgtttacgatattatttccaatcaggatcgtgctgagcaggctgtcgtaacgctgtgccagccccagcaccttggcggcttgcctgtcgccatcatcagccttgcttttcaggcggatctgattcagcgaattgtacgctgtttcagccgccgagaagaaggccgacataccaatcagaatcaccagtgcgacaatcataaatatactgccatcgtccatgagagaactatcaactctttctttgttttatttatgtacagaaatatacattttagctattatatcatagatatgcacactacgcaaagggtgtgctgtcaaatttttgtaaaaaaacgctttgaccaaaattagagtttcttcagctctttctttgcaaagaaggaacaaaagcaaacaaaaacagcgcctgcccaaacgaacaagcgctgcttttatatcaaactattctgatgaaatcagacgagctcgatgatagccatctcggcggcgtcaccgcggcgagggccggtcttgtagatgcgggtgtaaccaccgttgcgatcagcatacttggggccgatctcgtcgatgaccttcttggcgacatcttccttggtgatgtaggagtagacctgacgcttagcgtgcagatcttcctgcttaccgagggtgaccatcttctctgccatggaacgaacttccttggcgcgggtaacggtggtctcgatcttgccgttctcgaacagataggtcaccatcgcgcgcagcattgccttgcggctgtcggtggtacgaccgagttttctggtaccgggcattccgtttcactccttaaatatcaaatggtatccgcgtgtcgcggggggttagttttcatcgtccttggtcagagagaaaccaagactatccagcttggccatgacctcttcgagactcttacggcccaagttgcggaccttcatcatctcatcctcgctcttgttgatgaggtcgccgacagtgttgatgccagcgcgcttcaggcagttgaaggagcggacactcagatccagctcttcaatcgtcatctccagcgccttttcgcgaccctggtcgtcgttatcgaccatgatctcggtctcgccggtctcatcgcagaggttcacaaacaggttcaggtgctcggtcagcacacgggccgccaggctcagggcttcctgtgcgttgatggtaccatcggtccagacctcgataatgagcttgtcatagtcggtgatctggccaacgcgggtacggtcaacggtgtagttggccttgaggacgggggtataaatgctgtctacgggcagggtgctgatgtcgttcttctcgatcagcgcctgcttgtttttctcagcagggacatagccgcggcccttatcaaaggtcagctccatgaccagcttagccccctcgcccagggtagcaatgtgccactcagggttcaggatctccaggtcatcgccagccttgatgctgccggcagtgacctcgcaggggccgacggcctccacacggacggtcttggggctttcgccgtagatcttagcggcgacgcctttgaggttcaggacgatctcggttacatcctcacgcacgccctcgatggtggaaaactcatgcaccacgccgtcgatcttgacgctggtgacagccacaccgggcagagaggacagaagcactcgacgcaagctgttgcccaaggtcgtgccaaagccgcgctccagcggctcgacaacgaacttaccgtagcggccatccggggaaaggttggccgtttcgatcttggggcgttcgatctccatcataaaaaccctccttgtttcgctggcgcagcgcgccagtcaggttggaaaaatcgtagaataaagctaagaggattacttggagtacaactcgacgatgaggtgctcagcgatgggcacatcgatgtcctcacgaacgggcagcttggtaacagtgcccttcagagcgttcttgtcgcgctccagccaagaaggcagcagcacaacgggagcttcctcgcccagcagcttgctgaacttgacggaagaacggctggactcgacgacctcgatcacatcgcccgccttaacctggtaagaggggatgttgacacgcttgccattgacagtgaaatgattgtgggaaaccagctggcgagcgtcgcggcgggtcttggcaaagccaagacggtaaacgacgttgtccaggcggcgctcaaccagaaccagcaggttgacaccggtctgaccgggcatacggctggccttctcgtagtaggtatggaactggctctccaggataccgtacacgaacttgaccttctgcttctcgttgagctgggtggcgtactcgctcttcttctttctcatctggccgccggggttacggttggtggttttcttaccatagcccataacagcaggagaaatgccgagagcacggcagcgcttggcgataggttgggtatttttagccataactcaaattctcctttcaatcaaacgcggcggcgtttgggcgggcggcagccattgtgcgggatgggggtcacgtcacggatcatagtgacctccaggccggttgcctgcagggcgcggatggcgctttcacggccggaaccggggcccttgacgtagacctcaacggtcttcatgccatgctcgatggcggccttggcggcgacctcagcagcgctctgcgcagcgtaaggggtgctcttgcgggagccacggaagttcagtgcaccagtgctgcaccaggaaacggtgttgccctgagtatcggtgatggtcacgatggtattgttgaaagtgctctggatgtgagcagcaccggcgctgatattcttgcgctctctctttttagtgcgggtttttgccgcagtagctttgttagcagccatgtctcagttcctccttacttctttttgttcgcgacagtgcgcttgggacctttgcaggtacgcgcattggtcttagtgcgctggccgcggcagggaaggcccttgcgatggcgcacaccacggtagcactgaatctcggtcagacgcttgatgtcaagcgcgacgttacggcgcagatcgccttctaccatgatgttgtttttgtcgatgtagtcacggatcttagcttcttcatcagcagtcagatccttgacgcgggtatcagggttaactccggtaccggcgagaatctcgtcggcagtggactgaccaataccataaacataagtcagaccaacctcgatccgcttctcgcgaggcagatcaacaccagcaatacgtgccataaagcacctccattagtaacatcccatgtcctggtcggggcctgcgccgggaatctacgcacttggcccccaagcgttttgggtacggtttccgcggaatgatccgcggacctttagccctgacgctgcttatgcttcggattggcacaaatgatcatcacgcggcctttgcgcttgatgactttgcacttctcgcaaatgggtttcacggaaggttttaccttcatgatgttaacctcctttataacacaaggcgcttatttagaacgccaggtgatccgggctttggtcaggtcgtagggcgacatttccatggtgaccttgtcgccgggcaggatgcggatgaagttcgtccgcagtttgccggaaatgtgagccataacaacgtgtccgttgggcttaccctctttgttgagcagctcgaccttgaacaccgtgttgggcatggcttcccgtacgataccttctacttcgatgacatcttctttagacaagctgattgcctccttgaagggttccgtcagtttgcacaggccgcatcgtaagcggcgatggcatcactgagttgttgatcgcttttcagaagctcgttcgcgagaacggtggtcgtgggggcgacatgcttcgcctttttacgcttcgggtctcctaccttacgcaggtttccgtcggccagcagaagcatctctccttccacttccaaaacagccagggtgcgggttttgtcccttcccgctttggagcggaccagttggccttttacaaagtccatccgggttcctcccagccgtaggtcaggacttcggcgccgccagctgtgatcgccatggtgtgctcgaaatgagcagccaagccgccatcacaggttttgaccgtccagccgtcctttaacgtctttaccgcgtacttgtactggcaaaccatcggttcgatagcgatgcacatgccgggcaccagccgcggaccgcgtccggcgttgccgaagttcggcacttcagggtcctcatgcagctctttgccgacgccatggccgacgaagctgcggacgaccgagaagccgttctcctcgacgtagctctgaacagcatgtccgatatcccctacccggttgccgccgcgcgccatttcaatgccgcgatgcaggctttccttggtaacatccagcaggcgctgggcttccaggtcgatcttgccgcacgcataggtgcaggcattatcgccattgaagccatcgatcttgcagccggtatcgatcgaaacgatgtcgccggggcgaatctgctgctgacggctggggatgccgtgaatgacagtgtcgttcacgctgatgcacgccgtggccgggaagccatacaggtgcaggaagttaggtcttgcaccgtggcgcacgataaagtcgtagatgattttgtcgatctctgccgtggtaatacccggctcgatcgcctcgccgccggccttgagtgcagccgcgctgatcgcacaggctttccgcattttctcaagttcagcagcattcttgatttggatcatggattttaagcctccaaaagcttgagcaggaacgcggtggtggcctcgatggaaccctggtcgggaacctcgacgagcttaccgcgctggcgatagaactcaaccagcggttcggtctgctcgtgataggctttcaagcggtccagcacggtggcgggctcgtcatccttgcgaatggccagctcaccgccgcagcggtcacacacgccctctttggcgctgggtttgttgatgatgtgatagcttgcaccacatttggcgcagacgcggcggccagacatacgcttggtaatggcctcatcgggaacgatcaggttcacgaccttgtcgatctccacacccatcttctccagggcttcgccctgggcgatggtgcgcggcataccgtcaaggataaagccattcacgcagtcaggctgtgccaagcgctctttcacgattccgacgatgacatcatcgggaaccagagcaccggcgtccataaagctttttgccttttgccccataggggtgccgtctttcacggcggcacgcagaatattaccggtcgaaatggtagggattgccagtttatcgcagaggatttctgcctgggtgcccttaccggcgccgggggcgcccaaaaggatcagtttcatcgtacattccctttcttattccaagaaccctttgtgatggcgggcagtcatatagccttccagggaacgaccggtctccagggcaacgccgaccacgataagcaggctcgtaccacccagctggatggacgtgccggtgatgttaccgaggatgatgggcaggcctgcgacgatcgccaggaagatggcgccgatcagagtgatcttggacagcgtcttggtgatgaaatcgctggtgggcttgcccgggcggatgccggggatggtgccgttgttcttgcggagctggttggcaatatcaacggggttgtactggatcgcaacgtagaagtagttgaacgcaacgatcagcagcacgtaaacgatgagatagagcacgctgttgtagttgaacgcgctgaagaaagcatacagggccggatgatcagccgcactcaggttgatgaagcggaagatcaggccgggcaggctgcacagggtcgaagcgaagatgatgggcataacgccagtcatgttcaccttgatggggatgtagctagcctgaccgccgtacatcttacggccgaccacacgcttggcatactggacagggatgcggcgctctgcgttcgtcagaatgacgacgaagatcacggcagccaaggccagcaggaccagtgcgggcaggaagatgtagaactgcggctcgccgttgcttgcacgggccaaaatgttggtgacagcactgtagatgctggaccagcgggccacgataccggcgaaaatcatcagcgagataccattgccgatacccttggaatcgatctggttgcccagccaagtgcacagctgagatcctgccgtgaaggacaggatgataacaacagcgctgaagatgcctgcgaagccctcagtataggagagggcgcccatgttgcggatgatgaagtagtagccgatggacagcatcagaccgatacccgcgccaacatagttggtgatgcggcgcatcttgcgctgaccttcttcgccttccttggcgaggttttccagatacggaatggctactgccagcagctgcatgatgatggaggcattgatggcgggctggacacccagggcgaaaagtgtacattcgctcagagctccgccgctcatcatgttcagatactccagcatatcgccggtaccgccggcgaacatggtggacagcgcaccggcactgatgtacggcaccggaactgcgcagcccaaacggaacaggacgaggatcagaagggtgaaaagaagccgcttgcggagatcatcgatcttccatgcattacggaaggtttcaaacaccttacatcacctcagccttcccgccagctttctcgattttttctttggcggaggccgtgtaagcggcaaccttgacattgacagccttggtcagctcgccattgcccaggaccttaacgccgtccagcgtcttggagatgatgccggcgttcagcagagcctcggtatcgacggtcgcaccagcctcgaacttctcgaggtcggataccttaatggtaacatacttggttgcgaaaatgttgttgaagccgcgcttcggcagacgacgctgcagaggcatctggccgccttcgaagccggccttcttgacaccggagcgagccttctggcccttgtggccgaagccagcggtcttgccgttgccggagccagcaccgcggcccttgcgggtcacagccttacgggcgccagcggacgctttcagttcgtgaagtttcatgcttgcacctccttgcattatgccttggtaacgacaaccaggtgggcgatcttagcgatcttgccctgggtggctgcgttgtcaggctgctcggtaacctcaccggggcggttcaggcccagggagtgggcaacggcgatctgctctttgccgcggccgatcaggctcttggcgagacgaatggtaactttttccattgtaataccctccttagcccaggatctcggcaacggtcttgccgcgcttggcagcgacgctctcagcgtcggtcaggccgcacaggccagcgaaggtagcagcagtgacgttgatggggttgttggagcgcaggctcttggcacgaatgtccttaatgccagcgcactcgaggacggcacggacggggccgccggccagaacgccggtaccgggggcagcgggacgcatcagaacgcggcctgcgccgaactcgccgacgatctcgtgaggaatggtgctgcccttcaggcagaccttgcgcatgttcttcttggcagcgccctcacccttgcggatagcctcgggaacttcgccggacttgccgacgccgtaaccgatgttgcccttgccgtcgccaacgacgatcagagcagcgaacttcataacgcggccgcccttgacagtcttggaaacacggttgatggagacgaccttggtgatcatgccgtcatcttcttgtcttctctgcatggccatagtatcttctccctccttacagcttcaggccggcttcgcgggcaccctcagcgagtgcctgaacgcggccctggtagacgaaaccgccgcggtcatagaccacttcggtaatgcccttttcaaggcacttcttggcgatggcctcgccaaccttcttagcggcctcaatattgccgccgtaagcgttgaaatctttgtccatgctggatgcgctggccagggtaacgccctggacatcatcgatgacctgagcgtagatgtgcttggcagagcggaaaacatccagacggggacgctcggcagtgccgctgatcttgccgcggacacggcggtgacggcgcagacgagcaacgttcttatcagccttattgaccataatgtttctcctctcctattatttacccttgccggctttgccttccttacggatgacatactcgccaacatagcggatgcccttgcccttgtacggctcgggcgggcgcttgccacggacttcggcagcgtactggccgacttcctgcttgtcgataccgacgatgctgaagtgcagagcatctttcagctcgatcttgatggtatcggtctcctcaaactcaacgggatgagagaagcccagggtcagggtcagcttgttgccctgcttagcagcacggtagccaacgccctggatctccagatccttgcggaagccttcggtaacaccgacgaccatgttgtggatgagggtgcgggtcaggccatggaggctgcgggcctccttctcgtcattaggacgggtaaccaaaatctcattgccctcgacggcaacagtcatcagaggatgaaatttggaatgcagggtacccttggggcccttaacggtgatggcgtgctcggccgcatcgaccttaacttccacaccggcgggaatgacgatgggttttcttccaattctcgacattgtctatacccctttcttaccacacaaaggcgagaacttcaccgccaacgtgagctgcgcgggcagctttgtcggtcatgacgcctttagaagtggagatgattgcggtgcccaggcccttcatgaccttgggcatatcttcgcagttggtgtaaatacgcaggcccggcttggaaacgcgcttcaggccagcgatgaccggagtaccgttctcctggtacttcagggtcagggtgatagtcccctgcttgttgtcctcggtcactttcatacccttgatgtaaccctcatcaaccaggatctggcagatagccttcttcaggttggaagcagggatttccacggaagggtgtttggcagtgcttgcgttgcggatgcgggtcagcaggtccgcgataggatcggtgatttgcatgccactaacctccttaggttgtgtttaagagtgttgttattcgttcagacagaagcaatcaagggcttaccaggaagccttcttgacgccggggatctcgcccttgtaagccagctcacggaagcagatacggcaaacaccgtacttgcgcaggtaagcatggggacgaccgcagatcttgcagcggttgtaagcgcgggtcgagaacttggcaggtgcctgctgcttgagcttcatagaaagttttgccattagagttccctcccttagttagcgaacggagcgcccagagccttcagcagctccttggcttcctcgtcggtcttagcggtggtaacgaagcagatgtccatgccgcggatcgcatcgaccttgtcgaagtcgatctcggggaagatgatctgttccttcaggccgaaggcgtagttgccgcggccgtcgaaggagttgccgttgatgccgcggaagtcgcgaacacgaggcagagcaacgttgaacagacgatcaacgaactcgtacatacgctcaccacgcagggtgacctttgcgccgatgggcatgccctcgcgcagtttgaagtttgcgacgctcttgcgagccttgcaaacgatggccttctggccggtgatcaggcccaggtcggcgacgatggcgtcgatgaccttagcgttctctttagcttcgccagcagcaacgttgatgatgaccttatccagcttggggatctgcataacgctcttgtagccgaacttcttgttcagggccggagcgatctcgttgacatactgttctttcaaacgtgccattgtgtactcctcccttacagttcagcgccgcacttgcggcaaacgcggacggtcttgccgtccttgacagaatgaccaacgcgggtagccttgccgcacttggggcaaacaggcataaccttgcaggcgtagatagcgccctcggccttgacaatgccgccctgctcaccctgacggcgaggcttgacgtgcttggtgaccatgttcaggccttccacgatgaccttgccctctttcggggaggtctgcaggaccttaccggtcttgcccttgtccttgccggagatgaccataacgttgtcgccggttttaacatgaagattattcatttaattaaaacctccttacagcgattcgggagccaggctcaggatcttggtgaagccggcatcgcgcaactcgcgagcgacgggtccaaagatacgagtgcccttggggctcttgtcggccatgacgataacggcggcgttctcatcgaaacggatgtaggagccgtcatcacgacgcaggccatgcttgctacggacgatgacggccttgaccacgtcgcccttctttacagtgccaccgggagcagctttcttgacgctgcaaaccacgatgtcgccgatgtttgcgtatctcttgcgggtaccgcccagtacacggaagcacattaactccttagcaccggtattgtcggccactttgagataagtttgcatctgaaccatctttcaggtcctcctttcaaagtaccaggctgattattttgctttctcgatgatcttgacgagacgccagttgacttccttggaaatcttgcgggtctccatgatctcaacgcggtcgccgatgccggcttcgttgttttcgtcatgggccttgaacttcttggtgcgcttcaggatcttcttgtacagagggtgctggacgctgtccttaacagcgacgacgatggtcttgtccatcttgtcggagacaacgacgcccacacgggtctttctcagattacgttccatgttttaccctccctcttacgcgtttttcgcattcttctcagccaggacggtcatcacgcgggcgatgtccttcttaacggcctcgatgcgaatggggttatccagctggtggatggtgtgctgaaagcgcaggttgaagagctcggccttcaggtccttgagctgcttgttcagctctacatcggtcatttcgcgcagttcagtagctttcattcagcgtcaccctcctttacggtgtcaagctcttcacgcttgacgaatttgcagcggaccggcagcttgtggctggccagacgcagagcctcgcgggcaacatcctcgctgacatcagccagctcgaacagcacgcggcccggcttaacgacggctacccagtactccgggctgcctttaccggaacccattcgggtgccggccggcttctcggtgacgggcttgtcggggaagatcttgatccagaccttaccaccacgcttgatataacgggtcatagcaacacgagctgcctcgatctggttggaggtgatccaagccggctcgagagcaaccagaccgtaatcgccctggttgaccttgttgccacgcatggccttaccggtcatgcggccgcgctgaacgcggcggtacttaacacgcttcggcagtaacattactgtttgcctccttccttcttggcgggggctttggcgcccttcaggatctcgcctttgtagatccaaaccttgacgccaaccttaccataggtggtgttggcctcggcaaagccgtagtcgatatcggcgcgcagagtctgcagggggatggtaccctcatggtagctctcggtgcgggcgatgtcagcgccagccagacggccggagcaggtgaccttgatacccttggcaggcgtggcgctgcggtcacggggctgcatggcattgcggatagcctgcttcatggcgcggcggaaagcgatacggcgctccagctgagaagcgacgtcctcagcaaccagctgagcgttggtggaagtgcccttgacctcgatgatgttgaggttgacggccttgccggtcagctttgcgagctgcttctcgatcttagcgctctcagcaccgcccttgccgataacgataccgggcttagcgcagaagacattgaccttaacgcggggtgcgccggtctggctgtcgacggtacgctcgatctcgatcttggggacgccagcagcgtacagctgcttcttcagggtcttgcggatcttgtgatcctcgaccagggtgtcgccgaatgcctgcttagaggtaaaccagcggctgtcccaatctttgatgacacccacgcgcatgccgtggggattgactttctggcccatttgtttacctccttactctttctctttcagcacaacagtcatgtggctggtgcgcttcaggatgcggtatgcacggccctgtgcgcgaggcatgatgcgcttgagcgtggggccggggcagacgtagcattctgcgacgtagagattgttgcggtccatgttgaagttgttttccgcattagcggcagcagagttcaccagtttgagaaggggctcgcaggcggccttcggggtgtactgcaggatagccagcgcttcgtccaggggtttgttacggatgaggtccatcacgatcgaaaccttgcggggactaatgcgggcgtaacgaagaattgcccgtgcttccattcgatgttcctcctctcttatttaccagcggtcttgccgccgccgtggccggtgaatttgcgggtaggtgcaaactcgcccagcttgtggccgaccatgtcctcggtgacgtatacgggcacatgcttgcggccgtcatgaacggcgaaagtgtgaccaacgaactcggggaagatggtggaggaacggctccaggtcttcacgacgctcttcttgccagcctcgttcatagcctcgacctttttgtacagggaaggcagaacgtaagggcccttcttagtgcttctagacattgttcaataacctcccttagccgttggcgcgcttgacaatgaacttgtcgctgcgggccttgtgtttgcgggtcttcaggcccagagcgggcttgccccacggggtacgcgggctggaatgaccaaccggggcgcggccttcgccaccgccgtgcgggtgatcgcaggggttcatgacagaaccacggctgccgggacgaacgcccatgtggcgcttgcggccagccttgcccaggttgacgttctcgtggtcgaggttagaaacaacgccgatggtggcgatgcagttcagacgaacgttgcgcatctcgccggagggcagacgaaccagagcgtaaccattttccttagccatcagctgagccatgacgccagcggaacggaccagctggccgcccttgccgggatacagctcaatgttgtggatcatggtaccgacggggatgttctcgaagggcagagcgttaccgggcttgatgtcggcgttggggccggccatgacctggtcgccaaccttcagaccatcgggagccaggatgtagctcttgacgccgtcctcatactcgatgagggcgatgaaggcagaacggttcggatcgtactccagagtcttgacagtggcaggtacatcaaacttgttgcgcttgaagtcgatgacacggtacttgacgcggttgccgccgccgtgatggcggacggtgatcttgccggtgttgttgcggccggcatgctttttcttggattcgagcaggctgcgctccgggtcaaccttggacaggacactgtaatcagtaacagtcatgccacggcgaccgggggtagtcggcttgtacttcttgatagccatgatgttctccttgttgttatcttatgaattattctcggggtcatatccccataagcgaacccctcggcggggtcctgagtgacggccttgcagccatcaggtcatcaaaccatggagttgaagaactcgatttccttggagtccggggtcagggtgacgatggccttcttgctcttagcagtgtagccagcgtgcatgccctggcggcgataacggccgcggacggagatggtgttgaccttagcgaccttgacgccgaacagttcttcaactgccttggcgacgtcgatcttggtggcatcggtagcgaccttgaaggtgtacttcttatcggcgataccagccatggagttctcggtgatgacgggggcgagaacgatgtcctgtgcgaatttcatcacgcatatacctcctcaagtttcttggcggcgtccaggctgaggatcagcttgtcagcgttgacaacgtcgtaggtgttgacgccggtagcggcggtcttgacaccggggatgttagcggcgctcttgacgaacttggtgtccagggtgtcgttaacgatcaggttcttcttgcctgcgccgacagcggccaggaaagcaacgacggtcttggtcttgtactcgtcggcggcgatcttgtcgacgacgatcaggttgccgttggcagccttatcagacagggcgctgagcagagccaggcgcttgaccttcttgttgatggtgaagtagtagctgcggggcttggggccgagagcaacgccaccgtgggtccactgcggagcgcggatagagccctgacgagcatggccggtgcccttctggcgccaaggcttcttgccgccgccgcggacttccttgcggatcttggtgttctgggtgccctggcgctggttggccaggaagttgacgactgcctcgtggacagccttctcgttcggggtgataccgaacacggcgtcggaaagctcaacggtggaaaccttcttgccgttcatatcgacgacatcaaactgtgccattgtgttttcctcctttacgctttcacgctgtcgtggatggtcacgaccgagcccttcgggccggggatcgcacccttgatcgcgatcagattgttttcggcgtcgaccttaacgacgctcaggttctgaacggtcacgcgcacagcgcccatgtggccgggcagacgcttgcccttgaacacgcgggacggggtggaagtggaaccgttagaaccggcatgacgtgcaacggggccggtgccgtggctctcgcgcaggcgatgctggccgaagcgcttgataacgccctggtagcccttgcccttgctggtgccgacaacgtcgaccttgtcgccctctgcgaagacgtcagccttgaggatgtcgccgacgttcagagcggcgatgtcatcaaagcggaactcgcgcagggtgcgcttgggagcgacgtcagccttgtcgaagtgacccttggcggccttgttgaccttcttggcgctcacttcgccgtagcccatctgaacagcctggtagccgtcagactcaacggtcttcttctgcacgacagtgcaggggccggcctcgatgatggtgaccggaacgaccttgccgttggcgtcgaacagctgggtcatgcccagcttcttgccgatgatacctttttgcattgtgtttgtcctcctgtaaaggttattggttggtggtttcccatcaacatgacctctccgctgatttgcttggcagcgagattggttctgttttcgtgtttctcattactgccggccgttcacggatcacggccgtgcgtaccggcccttatataatgtagggaactcgattacagcttaatctcgatgtcaacgccggcggggagctgcaggctcatgagagcctcgaccgtcttgttggacggcttcagaatgtcgatcagacgcttatgagtgcgggtctcgaactgctcacggctgtccttgtacttgtggacagcgcgcaggatcgtgacgacctccttgtcggtgggcagagggatcgggccggaaacgcgagcgccagtgcgcttagcggtctccacgatcttctgtgccgcagcatcgatcagggatgcatcgtagctcttcagacggattctgattttttctttgactgccattgcattcgcctcctataaaattttgcgccttaggcgagccgataaattacacacgtttccgggtgttcaacaacttcgcatgacaaaatccggtgaaccgtgtttacacagttctcccggaaagaatcattacaaagtaaggtgaacattggtccgtgccgcagaatgcagcaacgtacatatccctttgtttccgtaattctttcgcccggttctaagatcggacatactccgcggaaaaacccgccagcctattggctatgtggcggcaacctcccgcatcaacgcatatcgcggcttgcgcagcttgtttatctgcacaagccttccgcagccaagacgtattataacacacgtttcccggtgttgcaagtgttttttggcatttttataaaatttttttgagatttttttacgttatgccgaaagaggtgtatgtcaagagggttttcaacagagtgcatggttttggtggaaattccgtatagtttatagatattttgtagggacagatgcgggcatcagccctacaaatatgctatatatgtatcagttcggcaggttcacgccgttcacccgccagccgtcctcggtggagacaaggcggatgggcataaccgtggccgtgtccggcacgacaggttcctccccaccccagcctgcaaattcttcactctcacaagtcagaacaagctgccagaactccatgctgccatcgggctgcaactcgggttcggtgaagagatggccgcaataggcaacattgctgccgcggtcgccatctcctgtcaggatggtatcattttctccctcagcaaaaagtgccggttcctcatttaacaaatcatctacccaggcatcggaatagaccctgtgcaggaagctgttgaactctgagaactttgtgtagaacgcaccgtcagttgcatacccttgcagccacttcggtaagtcgtccacaggttcgtaaggccagaacccaccgtgcatgccgcaccacttatactggaagtaataagctgtagccagcgcggcctgcgtctgtttgtccagtgaagccgggacattgtaagtccccgtgcggtcgtattggttctccacccacggcgcgctgaccgtgaccgacaccacgttgttcatcggcagcgtatacggttccgcctggagcttcagactcctgtattgtccatggttacgggtatagttttcctcataatcagggttcaattctttcagggtttccactgtcgtgtggtaaagttccgctgcttcttccagggtgtcggccacatacatgcggagcatcacaccctcggcaggccaggcgaccttttcaagcggttggggcgcgtgaggtgcgctgaacgtgtagtccggcatggtgcagcctgcagccgcccgccaatcatcgaaggacatctcatcgtatacggccattgtcggcgcgggtgtctgagacggggtggatgtcggctccggggtgggttctgctgcgggtgcgggtgcttcggtgggtgtgggtgttgccgcgatgctgtccgacggcgtggatgcacaggcggaaagcattgcgaggacgagagataaggcaagcagtttctttttcataaagtgcctcccttgcgggcggatagggaatctacccctacgaatggaattacacggttactctgtgggggtcaatgcttgtcatcgacctgcgggcggatgcaggcatccgcccctacacacaacggaaaactttctcttacttctttttcagcttctcttccagcccctcacgcggggtgacgtagacggtggtgtacacctcatacaaaaccataccgggcttggcaccgttggctttccagatgttctttacctcggtggtgtccacggccaccttggcgccgccgttctggctggagtgcaacacggccagctcggcggcctcctgcttggtcgtatcggggatgtcctctcccctgctcatgaccacgcagtggctgccgggggctttctgcacgtggaaccacagatctttaccgcgggcggtgtgcagggtgagcttatcgttttgcaggttgttgcggcccaccaaaatttcaaaaccgtcgccggacatgtaccgcaggaagtccgccggtttctgcttgcggtcccgctgcttgtagtatttcagatagccctggctcttcagctcggcgcggatctcgttgagcgcagcctcaccgggggcggactccacctcgtacataacggtggccaggtactcgatctcggcttcgccctccaccagcagcttctgcagcatggcgtgggcggtctgcttctttttatagtcgcggaaatatttctgcgcgttctcattgggaccaaagcgcgggtccagcttgatggtgacatcctcgccggtgtagtagttctgcacggtcacctggcggtcgcccttgtgtacagcccagaggttggcctgcagcagctcaccgtacaggcgcagcgtatcggccttggaggattgggccagttcctcgcggcgggcggcctgcttgcggacggcacggtcgtgcatgttgtgcacagccttgtacagttcgcggctcttctgccgcaggcgctcggcgcggtccttggtggcgtagtagtcctccagcagttcgctgtagctggggtactgggtcagcagcgcggcactgccgtactgctgcggcacaaagaagctgaactccaccggcttggccacgccgtccggctggggcaggcgcaccgccgtgggtgtgccaccgttggcatgttcggccttcagctcatcgatggcggcggcaagtttggctttttcgtcaacagtcaggtcgcaggccagcgccggggtctcgcccagagcgcggcagacggcctcccgcacgacaacagggccgacacccgccacggtcttgcccagggcctgggcgacgggcaggtccttctcgcaggcagcggccaccatggcggcggcgctggtaacgaggaagtccggccgggcgggcttgggcggcagcgtgtagggcaaaccgggcagcaactggcggacctcgctgtcctcaaaatccacacgcttgagggcatcgatgatgcggccgtcctgcaccagcaccaggttggagtagcgtcccatcagttccgccgcaacagtgttcacgaccaggtcgcccatctcgttggtgcagcggaagtcaaagtagatgatgcggtcgcccggctcccggcgcagatcgatcaggcggccgccggtcagatgcttgcgcagcagcatgcagaagcccgggggcgtaagcgggttttcaaagctctccttggtcaggcagacgcgggccgacccgctgcgggccgacagcagcagccggtgggtctctgtgcgggtgcgcagcgtcatcagcacttcgtctcgggtaggctcaaagatcttatcgatcttggcatccagcagggtggttttcagttccccggctaccagcgccagggtcgcagcatcaagagacatgggttctccttttataataagtaggaataggggtcgcggtccgcggcagcgtggcggacggtaagggccgggaagttgctggcgatatgggcagccaacacatcggcgatgccgtgctcggtgccccaatgaccggagaccaccaggccaacgcctttctgtttagccagcagagcgatgtggtgggcggcctcgccggtgacaaggcaatccgcgcccgcatcaatagcttcctgcaggtagctgccgcccgcaccgctgacttcggccaggcaggtgatggggcggccgcaatccacgtaccgcacgccgctgtgcagcgtgtccgcgcagaagcgggccagttgctgcaccgtagtgggttccacagggccgatacggccgcaatcctcggcgaaattgcggcggccctcccgctgcatacccaaaagatccgccagcgtatcattgacgccgccgggggctgcatccagattggtgtgcatgcagatggccgagatgttgtttttgatgagcagcgccggcacatcccctgcgctgatatgcttgagcgggtcaaagatcaccgggtggtggctgacgatcagctggcagtcgttctccactgcctcctgcaccaccgccgccgtgatgtccagtgtggtcagcacgtggctgaccggcacgccgacatccaccagcaggcccacattgtcccagctgcaagccagctccgacggggccagcgtttgcagcagcccgagaatttgctgcaccgttaccgacatgacaactcctccatttgtttgatgagcacatccaccgcttcggcttcctgcccagcaggcaggccgaggcggtatttttttagtttagcgttctgctgggcgtagtaatccccgcagccgggctggccgttcgtcaggccgcaaaggcactctaagccgtccggttcacggcacgcgccggtgtagcgggcgttcatcacggcataccagcggcctgccgcctggcaaagggtctcccccgccagtgcaaagccgcggcgggccagccagcggcgcagcacactgtgcttggtggcgggcaccagcaccagattgtaccgggcgtcaaacacccagggggcggcctccagaatttcaatgattgtttccgcacccatgcctgcgatgatgatgtcgtccgcctcgccgggggccagcacctccagcccgctgcccaggcggcactgcaccttgtccccgaagggggcgcaggtcacacgggctttctccagcgggccggggcgaaggtcacaagccaaaacaagcgggcagcgaccgctgcccgccagtgcggcgcttaatttgccgtggtcgcagccgatgtccgccgccacatgccccggccgtacataggcaaaggcagcagccaggcgggcatccagccgcggtgcattacaggtgtgcaaagtagtcgttcagctcggcgaccagagcgtcggggtcaacaccgtggacggcgcaggcttcctcaacggtctcgccatgggaagccatgcagcccaggcagtgcataccggtggacaggaagatgggcacgcagccctgggtggggtcgttgttcagaatctcggcgatgatggtattcttggtgatagtcatggaaatttctcctttatataaatattgcttattttatgataccggctgccaggcggcgtacaggccaaagccttgcagcagggtcaacatggttaaagtgctggtacagagcgccgcagcgtgggagacatccccgcgcaggaccagctttttgctgctttttaccagcagcagggccagcggcaaaatcggcagcaggtagcgcccctgcaagccgaagagcgtctggtagttgatgggggtccagttcagcgcggcagccagcacagccagcacaacgcagagacagatacctgccgtgcccgctttgctgcggcggcccagcagggccggttcgtcctgccggggcagggcggcggccagcacagccagcagcaggcctacgcccagcaaccagctgacatcgatgcggtagacgatgggttcccccagggtagtgcccagcagaccttgcagccagagagcgccctgctccggcagggtgcgcagcagcagcttgacggtggccggaatgttgcgacagatatagccgaacgagaaggtccagatggagtccccgttggggtaggtcatggtcagttggtcagggtccagcccgccgcccatgtgggagacagcgtatacgccgcccacagcgcccaccaccagtacggcggcaaaagccgctttgcaccagaagaatacctttgggcgcttgtgcagcttgaggtacgccgccagtgccagcaccagcagcaccgcagcggcagcggcggcggttaccaggacggtggtgttcatatcgcgggccgcgtaagccacggcattcagattggcggccagccagaagcagaacgccagcaccagcgtagccgcatggatgcagcagccgccgggaagttcttcgcccaggaatttgacggttgggttaccgtcgtaggtcaggttttccaccgggatcaacaggcagagcaggatgaccggcaggtagatggccttgccgggggcggtcagaccgcccagcacaatgagcaggatcttctgccaccagacagctttctcgccccgcaggcgcaggcaaagcgccgtgaagctgaacaccagccccagcacggcggcatccggggaaaggctggccgccaattgcagcggcatgggcagcagcgccacgcaggcaagcagcccgcgcaggctggtcggggccagccagacggccagcgccgccagcagtaaatacaaaatcaggttggccagccgcccgtagagcagcatcgtgtaaaagttcttgccctgcgcccgtgccaggcggatgcccagagcctgggccagatagctgccgcttccctgtcctgctttcacctcgctgtgggtggtcagcacatcggggctgccgggttcggaggtctcggcgatggcctcattcttgtaggccaggacgccgatgtctccggtctttgtgccgaagtgggcggcgtcacattcccgcagcagcaggttgccgtcctcatcggcagcggtctggccgctccaggtactggccagctcgtaggcggcagccaggtgagtgtattcatcgggggcgaccagcgccggggtaacataggtgaacgtcacgcccagggccaggcccaccgcaggtacaaacaggtagagtggcgcgtgcagcatggccaacagcaccgcgataaagacggcagcggccagcggcttttgcagccgggcagccagcgcggcgggccagttgccggtaaaatcgctgacgcgctgcattgccatggtagcgttgagggtgtcgccgtccgttaccgaaagcggcataccggatacttcgccctcgctggcccagacgcccagcgggccgtcccaggcggattcgttgtacaggcggatggtcagcgtttcgtcatggtcagggatataggcctcgttgcaggtgaactcagtaaaggtatcgtcccagatattcaggaagttacccgctgcaaaaaggatctgctcccccgcctcgttgtaggcttccaccatggtcatgccagatttgtacagctgcccgtgagtgctgaacttgaaccgcacaccgtaaaacggctggccggccttcagcggcatggcctgggtcaagccctcggcggggatgtcgatgatctggctgtagtcatcgttgatgatctcatagctgggggtgttgcccagccgttcctgcaggtcataccctacccagcggcacagcagtgccgtgcaccacgccgccagcacggcagccaacaggctgcacagcacccgcaggaactttttattttgttgcatggggtgcctgcctttctgtgagtatggttcttgcaagtgctattataccgcatatacggaaaaagcgcaaatcatttggtttttgcgtagagataccaggtcacttcgccctcgccgccgttgtaggtctggctggcgacgcagtggtagatggggtagtcgttctgcagatcgccggtcagggccaccacatagtccacagcggcggcatccagcaggtcccattgctgctgccactggtcctgcagcggcatgttggtcacgcagaagtaacggcagggcggcagtaccccggcggcggtgtaaaagccgccgtccaacgtgccgtagttgagtaaagtagcgttgggcgtctggcggatgatttcggcaaactggagctggggcaggctttccgccgtgcggccccgtaaagcgcggttggggcttagcagcaggcaccatgcagccgcggcggcaatgcctgccacggataaggccgtacacacgccgcgcttggcaggcagtttttgcggcagggccgccagccccagcggggcaaacacggccagcaccagcccgtagtagacgaggtagccgcccatcaggctggtaaaagccagtcctgcggccattgccagggttgccagcgccgcaccgtgccgcttagaaagcaccgtccaaagcagaaacgccgccagcaggcagacggcgggcagatcgtcccgcacagcccaccacaggtgctgggccagggtcagggcgctgcggccgtcccctttataaaggaaaaggttgtcatagaagtaacactcccaccaggcgtccagcgcatggtgggccccaaagtaggcaaaccagggcagggctgccagcgccaggccgcccaggtaggcggcacagcttcggcccagctgccgcagccagccccggcgcaggtacagcaccgccagcacggccacccaggccaggtaaaagcccagcaccgtgtatttcagcagcagcgcacagccgcacagaaaaccttgcagggctacggtgcgcagcggcatttgtctgttggctgtcaggcacttgaccagcccgtacagggcggcggccaaaaagggcagcagcagttcctcggcactgccgccgtgggagaaggcccggcaggccgccacggctgccgcaggcaccaggcaccagaccgggtgcaggggtttgccgcgcaatagctccgccgtgcacaggccaaggcctaaaaataccgagaagccgcaaatttccagcacaaatacgccgataaagcccgtgtggtccagcagccaccccagcccgtagaggagatacagcaccgggcctttgtggtcgaacacatcacggtagagcaccttgccggacagcatggattttcccattgtaaaaaaaatgttggcgtccatccaatcgttgaaggcatacagcggcgaagttttgctgcacaggaccagcaccagggcggccgcgcccaggcaccatatactacgttttaactgcgccatgcgcgtggtcatacagtttcccccgtaacaaaccgcgccccggtcaggtgcgaccggggcgcggagtggaaatcagactactgttacacagtcagcgtgtaaatcagccgttctccttcatcttagcgaagcactcgctgcagtagaccggacggtcctcgcgaggctggaagggaaccttgcaagccttgccgcagctggcgcagacagcgtcaaacatctggcgctcaccgcgggtagcgttcttgcgggcatcacggcaggccttgcagcgctggggctggttctcgaaaccacggctggcgtagaactcctgctcaccggcggtccaaacgaactccttgccgcaatccttgcataccaaagtcttgtcttcgaacatagtgggtatctcctctgatttgtatttgcccgcggaagaatctaaaccaacgcattaggaatggaccaacgaactgattttaggcgctactgggggcaggttgaaatatatgatacaggcaaacgcctgaatcctagggtattacgctccccgcagtttgcggcgggcgcgggccagggcgttggcaacggctttgggtgccagctgcttttcctgggcgatttgggcggcggtctggccgtttagggtggccagcagcacgctgcgttccagcggggaaagttcggtctgcatccgttcgatcgtcgcggcgtactgctcgctggcgatggcctgttcctcggggtcagggcctggctggggcagctccttggcatcgggcaagggcacactgaagttcagcggcgcgtgctttttgcgcagagcggcgcggcgggcatcctgctgggcgtgggtgatgcaggcggcggcaaaagacgcgaaggccattcccgcggcggtatcgtaccggtgcattgcctcaaacagaccgatcaggccttcctgcacggcatcctcgaaatccaggcccggcgcggtcgcggcggcggcacctttgcggatggcgggcatcatgcgtgcaatgagggcggccacagccgtttcatcgccgttctgggccaaagccaacaggtcattggtgattttttgcatggggcttcctccggcaggcagatgcgaacacctttataatagccgtaatcacgcattttgtcaatctttttttgggattatgctcaaaattccgctgtatgaaccgcacagaagctggtatactgaaaaaaataaacttgtctgtaacaaaccgcctgccccgcgcgtgttaaaagtgaaacaggcctgatgaaatccaaaacgaaggaggtgccgcgatggagccgagcgaactggccgcggtcgcaggacgctaccgcgacatgatctaccgcgtggccctgcactggtgcggccacccacaggaggctgaggatgctacccaagacacgctgttaaagctttgtgcgacccaccgtacttttgcatacgaggagcatttgaaaagctggctgatccgggtgaccatcaaccactgcaaaagccgtctgcgtgcgccctggcatacccgccgcctgccgctggaggaactgcccgacacaccggtgttcgacgaccccgcccagcgggaattgtacgacgccgtactggccctgccacaggcgtaccgcatcgtgctgtacttattttattatgaggacatgcccactagggagatcgcggcggtgctgcacatcagccagaacgccgtgaccacccggctgacccgtgcgcgggaggccctgcgccgggcgtatcaggaggattgaacgatggagtttgagactttgtataaacagacctttgcccaagtgcgctgcccggcccacgtggcggtagcggcccagcctgccccgcggcggcggtttgggtgggtcatctgcctggccgcgccgctgctgctggccgccggtgttctggcgcgggtgaagttcaccaatttgcacaacacgccccaccccagctatgcccccgatgccgtgggcggttatgccctgcactatacgctgaccacccatccgctggatacgctgggcgaagcggtgcagacactggccgccgaggaacggcagccagcgttccaacggatgcggacgcctgaccactatagtttcagccagatggtcatgacgctgggaaactcggatttgttaattcactacccaaacgatattgaaaaagccgaagtatttaccgatgcggcggacagcttgcaggatgccgctgaactgaccaacctgccgctgctgcgcaacgatcttgtggatgacctgccggacggcgcggcgctgtactgccctgccgcccccaacgattaccacaatcccgtcaagcgcaaggtgctgctgtacggcacctgcgcggacggcgagccgtttgggctgaacgtgctggatggcggcttgctggaaaaggaagtgagcggcgaaagttatgacatgtatatttcgttcaacgcccacgccgccgtgacacccagcggcagccgcaccgctaccgtggagcaggtgttgaccgacggcatctacgatttaaaggatggctggacctgcgaggaatacacgctgcctaccggagacattgccgttattccgctgtacggcggcggcgacgagagcaaagccagcgggaataccgcttattttgtaaatagcggcataatttatacagtttgtatcatggcaccgcaacccggtatcggggatgcacggctgcggccctacctgaagcaggtattggatgcgttttacgcgccgtaacgtcctactgccaatacgcacagaaaaagccagcccgcattgggctggcttttggattattgtttctggtaaaccaggtagcggaagccgatctcggtggtcaggcttttgcaggcctgcagatgcgcggcgccgtcggcgggggtgttccagtagtagggggtcatggcaaacaactgctgcacggcatcgccggtcagggtcagctgggcggcggcctccacactgcgcacaaaggtgaacccctcgtaggcggtgtccttcacctcgttctcgtaggggtggtcgtagaggacctctttcagcccgtagaggtggcgggcggtgggcacggcgtaaaccagatgtccgcccgggcgcagcatgcggcggaactctgccccggcaaacggggaaaagatgttcagcagcaggtcggcccagccatcccgcacgggggcacaaaagctgccgcccacacagaaagcggcctccggcagcagcttggccgccaagcgcacggtctctttggagaggtcgaagcccacgatggcaggttcgtcccccagtgctttgtacaggtaggcgtcatagctgccctcgccgcagccagcatccacgatgtggccgtgaggcaggtcagcacagagatccgccaacgcctgcatcagcggggcgtagtgcccggccgagaggaatgcgcggcgggctcgcaccatctccttgccgtcgccggggtcggcggcatgctttttctggatgggcagcaggttggcgtagccctctttggccagatcaaagctgtgagccttggggcagcgcagggtgcggcccacctgcagcagcggcccctggcagaccgggcagcgcagggctgcggcagtggccggggtcattcggcgctctcccctgtcatcggctgcggggcgggtgcttctttcggttccttggactcgttagggtccgggggcagcggcagcgtcatgccgccgtgggccgcgaggtactcctcgaagttggagaacttctgcttcggagggcggcgggtgatgagctccaggcccggctcttcctccggcgtgcggcgcagcgggcggctggggcgctggggctggcggggcttggcagtctcccgcggcgggcgtgggggcgactggttcagcgtgcgtccgccgttctgacggggcggctgcggcatctgggccgccggcggattctgggactgggccgggccacggccgcggggacgcggtgcattgccgcgggacgccggtttgggctggccgcccttggcgggtgccggggcctgcggacggggctgcccctgctgggggcggggggtccgcggctgggccggggctgcctggcgcgggccgggctggcgggcagccttttcagccgcaggctgctgggctgcagcggcaaccccaccgttgccggaaccgcggcggcgacggcggcggtgcggggcggcgggattctgggtaggtttttccatagtcttttccattcttatcatcagtcgattgcacgacattcgttgtagtagcgtttttcttcggcgtgacccatgctaaaggtcttgcggggcaacacaccgcccagcaccacacctttaaacaggtctgccttggcaaggtccggcagcaggatggcggcggctttctgcccggggcgggaggcaagcgccatggccgtggaggagccgtggatgtagtccacgctggcctcggggtggctgggcaggaagtcgttcaggaaggcttcaacactgcccaccgtcaggggtgccgggggattctgcagggccaccagcagctcaccgttctggtcggcaatggcaaagcgctgctgagacggagcagtctcgtcgccctgagtcttgtcccactcatcgatggccttgtacagctcatgggccgttacaccgaacaccacacggtggatcggctcgatctcgatggccgggctatgtacattgcagacctcggccaggcaccagcgggcggggtgatcttgctgctgttcgggggtcaggcccttcttcagttcctcccagtaggctttggccgtggccagagagtggttgccgtcgccgacagccagcaccatgggcggctcaccggcggcacggggccagcgagcggcaaattttttctcgtcggccaagtcggccagtgcggcgttgatccggtcgatcagggcggggtcttccaccgcccagccgcgcagatggccgccgcccagcatcaactcgccgtcatacagcagaggcaggctatctttatggtcaccgatgggttcgatcagcgtctttttctcatcgtcggccagcatcatcacgtggggcgtttccaaaatagcaccacggcgtactttcagacgcggcgggatgcgctccaccaccgtcttttcgctggggcggatggccggtttgctgccggggttatagtcgtaggcttccaggtccacggcacctaccaacccctggcggatggtgccgtccatctgggtgcgctccacatagacaaagccgtggacgcggcgggtcagcaccgacttgcggtactcctgcatcgtgcggcggatggtctgcatccgctcttcctcctggggggtgcccaggtaggcttcgggcaggacgatatgcagcgtgctgggcttaccggcggccagctcttcggcgcgctgccagtactccggctgggaagtaaactggtctaccgcaatgcaggcccacgggtccagcgaaatgttggcggcgggcagcagaatatcagcgggaacaaagcacggaacagacatacaatgcacctcttccttttattgttacaaaaccacagaatgacccaccagcgcatagatagccagtgagaggacgccaatgtagatcatggaactgggcaggccctgaaagattgcgggcaccgccttactgcgcaagcggcggcggccttcacgcacgatgaagacgatgaaggtgtagcccaggccgctgcccagaccaaacgcgatggattgctccagcgtgtaattctggttggaactgacgagcagcgtgcccagcatgacagtgctgcaggtagccaggctgagctggctgcggcagctttggcgcattttgcggggcagcaggcccagcaccagccaggtgacggccatggcagcgacaccgcaggtcaggtagactaccgggcgcagggccgagatgggcaaccatgcaggcagacgcgagcgcagccacggaaagagcaggttatgggcagcccaacccagcggggcggacagcgtcatgacccagatcagcggcagacacaaatcccacacctgggccttgtggtccggcaccagtttcatcaggcgggtcacacccaaagcgcgggccagaatgacgttctcggcaaagatggccagacccatatagctgacgaactgccacaggccttggcccagggaggatgcgaactcaatgtttagcatacaggcggcgcacctcctcgtgtttataattggtgtacaggttggcgatggcgcaccagacggcggcgatggcacccaccagtacgaaaccgccggagggctgtgccgccagcggcagcggcgcggcgtgaatcacctggttgccaaagacagcaccggtggccagcagctcccgcaggcagcccacgatgagcagagccgcgcacatacccagactgttgttgaaaccgtggcggaaggccgcgctgacaggctccagctcagcaaattccatgcgcttgacaatggcaggttccaccaccaacagcggcagataaatgcccagcagtgacagatcagcaccaaacagctggtacatcagcacgtaaacggggatgtacagcagcgccgccgcatagctgtagatgaccgggcggaagcggttttgggtaaggtggcagactgccacagccaacacacgggtaaaggtgatgagcagcaggctggccacacagagcatgagcgcgtggcgaccatccagcgcagcgcccacgatgggagccatgcctaagccgcgcaccatgaccgggttggacagccagatgtggtcgcggcggatcttttcgttcaggtcattttcggcctcggtgcggctgcggggcacggcgtttttgcgcggctccggggccggggcagccgggcgcggggcaggttcccctgccgggccctcagtgcaggcggcagactgcggggcaggttctgccggagtgggctgcggccgggccgcagacattacgcgggtggcttcgggggccggttccgccgggcgggatacagtacgctgttttgggatggcaatggtgcgggtaccagtaggctcgtccacttttggagcggccggggcctccggggcgcgcggggcagcggccagggcctgggcggcgcggcgggctgcttcctgcgagtcgttttgcgccgtctggcggcggccaaaccaggcagggcggttggccgcgcgccgggcggcttcctgccgcagggcctcctgttcgggttcaggctggggcgtttctgcctgtgtctcccccatctgcatctgctggcgcagggcggcgcgttcttcggccgagagacgggggcggctggtggggatgatgcggtgtttacgctccggcggggcggccatcggctgcggggccggggcggcatgttgggccgggcgggatgccggtgaagaagcgggctgggccgggctttgcatggccgagatggccttttcgatctccgcgcgggaggccccctcctccgccatgcggcgggccgtttccagcatttctttggtaatatggggaatgatcagcgtttcggagcgttcctcgcccttgcggcggtcattccggttttgtggatttggcaagacgctgttcctccttcttcataaagcggatacgctcggtgcggtggctgatgaggtccagccattcggggatggcaccgacgatcagcagcgcaaagcagatggcgctctgatacgggctgaatatgcggaacgcataggtggcaatgcccagcgccgcgccgtagatcagacggctgctggtgcggttgggcatggtgaccggctcacagatcaggaaaaaggcaccgaacaatgccgtgccagacagcagcgtgtacttttcaagatagatgcgctggcggatgaactcccacggccagctgaaggcaggcagttcgttcaggtgcgggaacagccagggaatgccgataacggcaatcataaacgggatgagcaccgagaggcggacccggccgcgcaccagcaaaaacagaccgcaggccagaatgaccagcgccgcgcccgtaccgatacccgcggacacgttgccggtaagcagattcatcgtgctggcgctgggcaggccgccgctgcgcagggactcattcatgccctggacaaggttatcattgatctcgccccaaatgggcagctgagtgccgggggccgggtagtagtagacatgctccggccaggaaacaccggcgatagcggcgcccaccgccgccgggtggaagggatagtgcccctctccgccgaaggcctccttgaccagcacggccgcgatgacagcaacaatgacgatgccgtaggaaacgctggcgggcatcagcagcacgatcagcgctgcaaagcactcgctggacggctcgtgggcgcggtagccctcgccatgcagcggggccagggcgcaatcacacagataggccgtcaccagggctgccagcatcagcagcaccgggcgcaggccgtaatagtaccaggccatgcctgtaaggggcacggcacaccacagcagatcactatagtagccatagttctcgctgcgttcgatcgtaggttgttttgccatggggcttgggttctcctttgggttaatggctgccgtgcagcgtatcgatgacggcggcgggatctttggctttgaacagggcactaccggtcaccagccaatcggcccccgcggcggcgcactgtgggccggtctcggtgttgacgccgccgtccacttccaacagggtgtgcaggccgcggcggtcacgctcggcacggagggcgctgagcttatccagcgccgagggcatgaacttctgcccaccaaagcccggctccacgctcatgaccaggacgaggtccaggtcgtcgaggtaggggtagacagcctcggccggggtgcccggcttgatgctgatgcccacctggcagccggcggcacggatggcggcgatggtctcggggacagcatcgggcacagcctccagatggaaggtgatgaggttagcgcccgccttggcgaaatccggcgcgtacttgaccgggttgctgatcatcaggtggacatcgtagaacacctccggcagggccttgtgcaggcactccagcacgggggcgccaaagctgatgttgggcacaaagtggccgtccatcacgtcaaaatgcaaaaggtcagtgccctggtttaacagccgttggcagtcggcggcaaggtccgcaaagtcagcggacaaaatcgaagcggcgatcttcgtcataatatactccctgtttgtgcgcgtgtgcgcttttccctctgtatctattcgcgcaggcttctgcgcagatagtcgagtttattatatcccattacggggtaaaaagcaaggtgagccgcttggcgggcagcagaaaaaactgcgccatgctgtaaaaaggcagcgcggcgcagtttgtaactttttcttgcagggattattttgccagctcggcacgcacgcgggccagggcagattcgatcacgcggtccatatcgtagtacttgtactcacccaagcggccgccgaaaaggaccttgccctcggcatcggccagggccttgtactgctcgtacagggcgccgttctgggcatcgttgacgggatagtacggctcatcgccgggtttccactcggcagagtactcgcggctgatgaccgtcttggtgccc

SEQ ID NO: 7981 - DNA, 10175 bp, Unknown
  gut microbiota DNA sequence
ttggcatagaaaaacaccccacttattagatagtataccatactgtctaacaaatggggtgcagttcaataacgatgcgggctttttaatttttgtttaactttgcgcccgcgctttgtggtacaatctaaactaagaaagtggggacggttatgatgatccaggaacggctcaaacgctcgaatcttattatgctggtggtgccggtggcggtggctggggtgctgctggccgtagggctgggggtgctggtcctgctgctggagaccatctacctgccgcgtctggggctgaccatgcaggatctgcataccctgggcggagcaggccgaggccgcctttgccgacctcaggcactttgtggtgctgtacggcgtggtagtcattgcagtgctgctggcggcggtggtgggcaccaacctgtggcagacccggaacctgtttgcccatatccgtgagccgctggctgagctgatgcagggcatccaccacatccaaaacggcgacctcaatgcgcccatcgcctacacaaaaaatgatgagttccgccccgcctgtgatgctgtagacgagatggcagcccgcctgcgggagaagatcgaggacaccccctcggacccgaagctgctgcaaacggtgtggggcgtgggctaccggttgcatacagtttaaaaaacgtttaaatgcacaggggcctctgttaaaaaagtttcgctacactgggtacagttcaagaatttttttagggagagttcctgatgattctaacagcattagcctgatgggcctgcagctggcagtattgccggggctgtgcacgctgggatttggcgtgctggcgggcgtggctatatccatcagtgctatccgcgccgcgctgcaaaagtaccgtagccagatgatttggctgatcttgggcctgatgcttggctcactgtacgccatcgccaacggccccgcaagtttggccacgccgcgccccgcgctgagtatggcgaccttccagcctgtcggctttgtgttgggcgctaccgtgctgctggcgctggaaggtgcgaaaatgatgatggaacgtaaagaacaacctggcgtacccattgtgaaaggagcaaaacaggcatgaacctggattggatcatcctgcacggcctacgggtgttgaccacctgcccgctgctggatttttggatgccgagaattacggcgcttggcaacagcggcatcgtttgggtagtggcggccatagtgctgctttgcaccaaaaagtaccgcaggcacggcgtcatgctgctggtagggctggcggcggcgttgctgctgggcaatctgacgctgaaaaatctcttcgcccggccgcgcccctgctggctggacgagagcgtaccattgctgatcgcccgccccagcgactactctttcccatccggtcatacgatggccggggccatcggtgccaccatcctgatggcggcggaccggcggtttggctgggcggccatcccgctggcagtgctcatcgcgttctcccgcctgtatctgtacgtgcattttcccagtgatgtcctgggcggtgcggtactgggcgtggggatcgggttgctgatgctgtatggggagcggcggattgcaggccgatgcaagcatcggcccctacagtgacgagatggcggtatttgtgcaggcggatgctcgcatctgcccgcacaatgcaaaaaaggcgcagccgaagctcaatgtcacttagttaaacaagcaaatccctctataccaccaatgcaaaaagtggtacagagggatttttttcttcggactttgaggggggagcaccggacggtacgtggggcactcctcggtcaccttcggtgacagctcccctcaaaggggagccatttacagtttatatggctttactcttcccgctcccgtctctgcttcgcggctttccgtttccgggcggcggctttgcgggcagcgcgctgctttttctcgaattcctttttgcgtttgctgtggtggttggcaaacatggcgcaactcaagatcagcataaagatggccgcagctgccacgatcagcagtaccaactggaagatctttacattaaacttctgctgcaaggtctgcgtggcatcagaaatgacagattccgttgtcgaagccgtcgaactggcgctgtctgcggcgttctgggcagcggccaaggcctcgctggcggcatcgctgtaacccagggcagccagggcttcggccagggcttcgccgcccatggctaccaggcggtcgttggtgtcgctcttgatcttctcgttgtttacggcgttggccagccactcggccagcaggtccgccgcgccgtgcagggcaggggcgtactcgttgttcacagtccaaccgctggtggtccacatgcggttcatgtacaaaagcagctgcatgccggaatcctccagcatggtctcgtagatgacgtcgccgaagttgtcggccgaggtatccaccgtgccgaagttgagtatgatgaactgcttggcgcgggcgtaatccaccacattggcgcttagattctggtagtaatcccgcagggccgtggcgatgtcggtgtccttggtcagctcggtgcccacgttgatggagtcaatgtccgcccgcaggtcctggtcgccaaagacactgaccgagccgtcatcgtctttggcaaaggtagcacgcatcacatcagcgtagccggcctcatcgctggcctggccgtaataagccttggccagctgcatgcagtcgccgccccagctgcctgtgatggggatgccgttgtacaccaggttcatcgaggccagcaggtggccgaaatcgatattctgcccgccgggcagggtgacggtgctcatgccttgcagagactgcagatcactgtcgttggtgttgacgtaattttcaaaggcggcatcccgcacaccggcggtcaactgccacatctgggtaatgtagtcgcccgtgcgggtgtaggagagggtcagcacaatggggtcggcggacgaatcctcggtctctacgtaggaattggccagggcctgcaggcggcccaggcggtccagcacggtgttataatcctcagcaaaagtatgcggtgcggtcaaaaacagcagacacaacaccagccccgccaataccagttggcgaagcccgtttctttttatgaactgcgtggcaaagcacctccagcacgttttgtttccattttgtaactattggtttaattatagcacagtccctatccccttgtcacggacttttttgtgtaaaaatgtgaaaacgtccaactattcgacgttcctgcggaaaaagcgacaatttgcaatagaaaaagacacaattttgtgctacactggtactattttacaactacaaaaaggatgatttgccatgaatcccttaaaccagaccaaagaaaagcgcgaggccgtccccaacggggtgagccgcgtgggcattgctgcgctgggcgtgctgctgcaagtgctgtggatcgtatgggccgccctgaagctgacccgctactacgcctgggtgcagctggccatcagcgtgctggcgtttctgctggcgctgcgcatctacggccgccacaccaacagcgccaccaaactttcgtggatcatcgtcattctgacctttcccatctttggcgtctgcctgtatcttttgttcgggcgcagcggggcggtcaacatcatgcgcgggcggttcacccgcaccgatacggagctgcagccccactatgccacgccgctggaccgcgccgccatgccccaggacccggctctgcaaaaccagatccactacctgcagacccaggctcactatcccgcctgccgcaacaccgatgtgacctactacggtgacaccaacgccgcgctggaggcccagaagaccgacctgcgcaaagcccagcactttatttttatggagtaccatgccatcgaggattccatcgcctggcagggcattgaggatattttggccgagcgggccgccgccggggtggaggtgcgcgttttttacgacgacatgggcagcatcgggtttgtggacaccgcctttgccaaaaagctgcagcagcggggcatccagtgccgggtattcaaccccatcgtgccggtgctgaacgtctttatgaacaaccgcgaccaccgcaagatcactgtcattgacgggcaggtcggctacaccggcggctacaatctggcggacgaatacttcaacctgacccacccctacggccggtggaaggactccggcgtgcggctggagggcgacgccgtgcgcaatttgacgctgatttttttggagatgtggggtacgacgcagaaagaaatgccggccatcgagccctatctgcctgccatccgctacaccgcccgggaggctgccactgtgctgccctacgctgacaacccgctggacgacaagcgggtgggcgaggatgtctacctcaactttatcaacagcgcccagcggtatgtatacatcaccacgccctacctgatcttgagcgacgagatgcagcgggcgctggtgctggcggcccagcggggcgtggatgtgcggatcatcacgccgggcatcccggataaaaagctgatcttttcggtcacccgcagctactatgcgcggctggccgcgggcggcgtgcaaatctacgagtacacgcccggtttcatccacgccaagcagtttgtggctgacgacaaggccgctgcagtgggcaccatcaacctggattaccgcagtttgtacctgcattttgagaatggctgctggttctgcggctgccaggccgtacaggatgtgcgggcagattttgaggcgttgttcccccagtgcgagaacgtaacgccccagtacagcggccagcgcagtctggccctgcgcggcgtgcagtgcgtgtttagattgttcagcccactgatgtaatcgccgctacaaattgggatgttaaccattgaaaggagctaccatgcaaaaccttaccatatccccgctgtccaccctgccgcaggtgcggatgctggggcgctgtgccggaacggacccgctgacgctgttctggactgggtcgggtattgagctgctgtttaccggcagcgagctttgggtagagctaaatgccgactacgacaccatggaaccctgggtcagcgtggagctggacggcgcgtggatcagccgctttgcggtgaaccccggaaccagccggatgtgcatattccgcggggccgcaccggggcgggccaagcatgtgcggctgctgaaggacgtgcaggcgatgtctgaggacccggcccacctgctgcaagttaccgctatctgccatgcgggcggcgagtttctgcccttgccagcgccgcgctgtcggctggagttcatcggcgacagcatcaccagtggcgagggggccatcggcgcggtgtgcgagaccgattggatcagcacctttttctcggccgagaaccactacggccgcatgacggccgacgccctgggcgccgagtaccgcgtagtatcggccagcggctgggggctggtctccggctgggacaacgacccccactgcacactggccccctgctatacccaggtgtgtggcctggcagcgggggatcgcaacgccgcgctgggggcgcagcagccctacgattttgccgcctggcccgccgatgcggtcatcctcaacctgggcaccaacgactggaacgccttccacaatccgccctgggtggacccggagaccggccgcagctttaagcaaaccctggccgatgacggcagctttgcccctgccgatgctgcccggctggcggcggctgtgcgaaactttttggcgttggtacgcaagcacaaccctcacgctgtcatcgtgtgggcttacgggatgctgggcagcggtctgctgccgctgctgcgggacgggctggaccaataccgcaccgtcagcggtgatgagcgggtgtatctgctggaattgcccgaggcaaggggcgataccatcggcgcccgacagcaccccggtgccgccgcccaccgcgctgcggccaattgtctggcggagtttttgcgcagtgtgctgtaatttttaaacgcaaaaagaggcctgccctttgcatggagcagacctcttttacttgtactatcgctgtttttaccgcagggccatgccgtcggagaaggcgttgccgaccttctcgcccaaaacgtggtaggcgttgttgaaggggtcaaaggtgatgggggcaactttggccacgtctaccttgccgtccgtcatggcggattcgtccacgctgacgttgacgatctcgcccaccaggaggcctgtttcggggtcgtagctcttgaccgtacattccatgcagacggccagctcgttgatgacaggggcatccacgctctcgctcttgctgacggtgaagcccgccttggccagcttatccctggtgttgttgccggaggcaatgcccacataatcgcaggcggctacatgcttggcgtcacccatgctgacggtaaacgcgccggtacgcagcaggttcttgaccgtcttgtggccctcgctcaggcaaacggacagttcggtggtatcgctgataccgccccaggccgcattcatggcatcggcagagccgtcatcattgtacgttgcaatgatgaaaacgggctggggatagctgaacgccttcgcaccaaaatttttgcgcatagaaaacaccgctcttgattttgctacttttattatatcatacctgtcaactgggaataccttggggaattgacactctgccgctcccggtgctatactgggggaagtttgcaaaagagaggaagcaccccattatggcggaaattttggatattgtggacgagcagggccgccccaccgggcagaccgtaccccgcgccgtggcccatgccgagggtatccggcaccgcacctcccacgtgtggatcttgcggcggcatgcgggccgcgtggaagtgctgctgcaaatgcgctgccaggcgaaggattccttcccaggctgctacgacatttcctcggccgggcacattcccgccgggtgcgattttgtggagtcggccctgcgggaactgcgggaggagcttggtgtgaccctgcccgccgatgctttgcaggagtgcggcgtgcggcactttacctttgagaacgttttccacggcaggctgtttaaagataaccaggtcagcaaggtattctgcctgtggctggacaagaacgccgaggatttcaccgtgcagaaagaggagatcgactacgtgcggtggttcgggctggaagaggcaatcgaagccgtgaagaataacaccatccccaactgcatttatttggaggagttggagatggtggcggcggcaacacgctaaaggctcctctcaaggggagccttttatacaaaacacccccgcacgagtaatcgtgcgggggtgttctacttattaactaagcagctacgcttacattacagcttcgggccggcggcgaccagagccttgccgtgctcgttgccttcgtacttggcgaagttcttgatgaagcggctggccagatcgacagccttggtctcccactcagcggcatccttgtaggtgtcgcgggggtccaggatggcgggatcaacgccgggcagagaggtgggaacctcgaagtcgaagtgcgggatcttcttggtgggggcctcgttgatagcgccgctcaggatagcatcgatgataccacgggtatccttgatggagatgcgcttgccggtgccgttccagccggtgttgaccaggtaagccttggcgccggatttctgcatcttcttaaccagttcctcagcgtacttggtgggatgcagctccaggaaggcctgaccgaagcaggcggagaaggtcggggtgggctcggtgatgccgcgctcggtgccggccagcttggcggtgaagccagacaggaagtagtactgggtctgctcgggggtcaggatgctgaccgggggcagaacgccgaaagcatcagcagacaggaagatgacattcttggctgcaggtgcagaagagatcgggcgaacgatgttcttgatgtggttgatggggtaggaaacacgggtgttctcggtaacgctcttgtcggcgaaatcgatgtggccctcggcatccagggtgacattctccagcagagcgttgcgcttgatggcgttgtagatgtcaggctcggagtccttatccaggttgatgaccttagcgtagcagccgccctcgaagttgaagacgccgttgtcgtcccagccgtgctcgtcatcgccgatcagcagacgcttcgggtcggtggacagggtggtcttgccggtgccggacagaccgaagaagatagcggtgttctcgccgttcaagtcggtattggcagagcagtgcatagaagccatgcccttcagcggcaggaagtagttcatcatggagaacatgcccttcttcatctcgccgccgtaccaggtgttgatgatgacctgctcatggctggtgatgttgaaggcaacgcaggtctcgctgttcaggcccagttccttatagttctcgaccttagccttggaggcattgtaaacaacgaaatcaggctcgaagttctccagctcctcagcagagggcttgatgaacatgttggtaacaaagtgtgcctgccaggccacttccacgatgaagcggatagccatgcgggtatccttgttggcgccgcagaaagcatcaacaacaaacaggcgcttgttgcacagctctttcttggcgatatccttaacggtagcccaagtggactcgctcatgggatggttatcgttcttgtactcgtcgctggtccaccagacagtgtccttggagttctcgtccatgacgatgtacttatccttgggggagcggccggtgtaaacgccggtcataacattgacagcgcccagctcgctgacccggcccttttcgtaaccagtcagctcaggcttggtctcctcctcgaacagcatttcgtaagaggggttgtgcacgatctcagtcgtgccggtaatgccatacttggtcaaatccaactttgccatgatgcagatacctctttctctatcagtctgttttgggctgtgatccaagtggtgcgcacaccacttttcgcggtatgaggagcccagcccgctacttcctcaccttagttcttattatacagatttccgccgcaaaagcaataaaaaattcgttaaatttttagtacacttcagcatttgttgccgaaagtgggcaatttctggccagaatcgcatattttgtgaacaaacattgcatgggttgtaaacattagcactctacacttgacagtgctaatttctgtgctatactgagggtgttcgaagggaaaagaacccccaagaacaaaaaagaaaaaccagaatcgcaaaagtccaccgcttatataataagcggccgatgagaattggaggaatgacttatgatgatggttccgtatatgttcaatgatgatttgatggatgacctgtttaacgataattgggagcgcgacttcgaccgcgctatgcacagcatgcagccccgccacatgtttggcaaacgcagcgccaatgtgatgaagaccgatgtgcgcgagacgaaggatggctacgatgtctttgttgatctgcccggcttcaagaaagaggacgtcaagctggacctgcagaacggctacctgaccatcaccgccaaccgcagtgaggatctggacgagaaggacaacgagggccgctacatccgccaggagcgctgcaccggcagctgtgcccgcagcttttatgtaggcgagaacctgaagcccaccgatgttgccgccaagttcgagaacggcatcctggagctgaagctgcccaaggctgacaagcagatccccgaaaagcccaccacgctgatcgagatccagtaacagttccttcgtcagcggacctgacctgatataaagtgcgccgcagagtggaaacgctctgcggcgcactttttttgttttgacttttccgcgtccacaccgtatagggaaaaccactatgaataataaaagcgcagacctttgagccttttttattgttattatgcct

SEQ ID NO: 7982 - DNA, 720 bp, Unknown
  gut microbiota DNA sequence
cttgatggtggtgccgctgccgacctggctttgcaggtcgatgcgggcgtggtgcagcagggcgatatgcttgacgatggccagccccaggccggtgccgccggtggccttgctgcggcttttgtccacgcggtagaaccgctcaaacacgcgggcctggctgtcctgtgggatgccgatgccgttatcctctacctgcagccaggggccgtcggggccggtgccgcagcgcagctccacatggccgccgggctggttgtagcggatggcattgtcgcacaggttggtggccagctcagccagcaggtccttgctgccctgcacggtggcgggctgggcgctgtattgcagcgtcacgtaggccttgcgggcgttgaccgtcatgttctgggcagtttccttgagaagcgcggccaggtccaccggcgccatctccgccggtttttcccggctctggctggcctgggtgctgtccagctcgctcagctgtaaaatatcgctgaccagcgcgatcatgcgctgcgcctctttatggatgcgcgccgcaaaggtgggcacatcggcgggcttagccatgccggtctcaatcagctcggcgtagccggaaatgctggtcagcggagtcttcagctcgtggctgacgttggcggtaaactcccggcgcatcgtctcgttatcctcccgcagtttgcggtcggtctggatggtgcgcgcgagggg

SEQ ID NO: 7983 - DNA, 929 bp, Unknown
  gut microbiota DNA sequence
cacagttataaagcaaggggccggcatttgccccagaattgcaaagtattccgtctcctgctataatatttcaaaaagagaggaggctgagccatggatcgtatcgcgcagtatcatctgcctgggttgtttgaattttacgagttgtaccgcgtgtttctaccactgtactgtacacatcgcgattggttttacccctggtgcgatattgcctcgctttacggtgcgccggccgattgcctgtggggcggcggacgtgtcggcggcggggatgtccgcccgcgggatgcgctggcacttgcacaggaatacggcatctcggccaggttgacgttcagcaactctctactgcagccggaacatttggccgacccaacctgcaataaactttgccggttatttgccgcatgcgacacaccacaaagcggcgtcattgtccactcagaactgctgctggactatttaaaacgaacgtaccccagtttctattttgtgtcgtcgaccaccaaggtgcttacggagttttcgcagttggcacaggaaaccgcgcgggaggatttccgctatgtggtgccggatttccgcctgaataaagcctttgacaggctcgccaccctgccccaagaccagcgggacaagctggaatttctctgcaacgagtgctgctgggtcggctgtcgcgaccgcaaagtctgctacgaagccgtcagccgccgcaacttaggcttggacacccctgaacaccgctgcaccgcccctgatgctgcgcagggctaccgcttttcccgcgccatggaaagccccagttttatcagtaccgaggacatcctgacgcgctatcttccccagggcttcaccaatttcaaaatcgaaggccgcggcctgggcagcgccatcgtgctggaatttttgctctactacctcaccaa

SEQ ID NO: 7984 - DNA, 383 bp, Unknown
  gut microbiota DNA sequence
atccgattccttggcaggctgttggttatggcgcaggtgttaccgccttgtgcttggcggcagcgctggctatcacgacagtgagagatgtggagtaaaaagtagcttctgtgtatagcggaacaaaatacttgcgaaagacctctaattcgattatacttgaattaacgaattttgcaggaggtctttccatggatgtatccgtaggcacccgtctgcgcgtgctgcgcaaggacgcggggctgacccaggcccagctggcggcgctggccggaaccaatcaggctgccatcaaccggtatgagaccgaccgggcagcggcgccctaccgtattctggtctggtacgccacctattttaatgtatcgctggattatattttc

SEQ ID NO: 7985 - DNA, 4708 bp, Unknown
  gut microbiota DNA sequence
cgagaccgcagccgccgagaccgaggccatgcaggctttggcagaacagttggccgcataaggtctgctctttacagtttgccccggctgcgctatactgtggataacacctatacagaacaggagcaggccattatggaaaacgaaaagatcatccttgatattgtagtggatgtgcagaaagattttatcaccggtgcgctggtcaatgccgaggctcaggccaatgtggcccatctggctgaggtcgcccgcgcccacgcccaggccgggcactggatgttctttaccaaggacacccaccccgaggaatacctggacacccgcgagggccgccgcctgccggtggagcactgcattgagggcaccgacggctggaactttgcccccgagctggaggatgccatggacgataccgagcctgaagtctcccacatcgtgtgcaaaaagagctttggtgcctacatgctgcccagcgatattctggacgaactgatggcccataacaaggctgtggatgacatcgaaaagatcatcgtctacggctactgcaccgacatctgcgtcatcagcaacgccatggtgctgcgcgctgcgttcccggaagttgagattgagatccgatccgattgctgcgctggcgttacgccccagtcccaccagacggcgctggatgccctgcgcgcctgccagtttaccattgtataataaggggctgcccgtcttaaaataacaaaacaccccggagctgcggctttgaacagcgccccatttgttagacagtatgatatactatctagcaagtggggtgttttgctatgccaaaaggagtaccaaataaacgatatacgcatcgtcttgtaaattcgatgtaaagttgtgtattatttgtaagatcttgcgttttcttgacttttcaacagattttgccatcattttgtaagacatttgtaccgggtttctgttacactgtgtatgtgtacagataggaatcacaaggagcacagcagatgaactttacccaatggaaaaatttcgggtatccggggcaggaacttaccccctttgagccggtgctggcccgggacaacctggtcacgctgaccaactatggcaggctgtgcagtatcctgtttgtcaccaccccggtgtgccattgtctgttcgggttctttcagccattgcgcacagtaccgctgctgttggcggcgggtgcggcgtttttcctgcggtgggccgctcagcgctgcctgaacgatcccgaccagctggtaccccgcgcccggctgctgaccagcctgttcactctgctgatctttctgctgggcgtttactacgacctcatccgccacccgaccgagatcaacgttctcctctgcctggtgatgctgatccaattgctgctgtttgatgcccggccggggcataacctgacgatgtccctctccgggctggcggtggtggtgttgtgggagtgctacgtgccggacccccaccggctgaccaacatcatgtactgctttttagcctctctcattgggctgtacctggcctggcacaagacccacaacatgtttggcatgctgctgtatgccaaacgggagaaagctgccgtggaaaaagaaacttccacccaggcggcagtcagccagttccagccgcattttatcagcaatatgctgtccaccattcaaattttatgcgatgatgcccccgccaaggccaaggactccctgggcctgtttgcggattacatgcgggtcagcaccgatgccttcaactataacgggctggtctctttcccgcgggagttagcccacgcgcgcaactacgccgcgctggaacagctgcgctttggcaacaagctgcaagttgtatatgatattgaatccgaggatttcctgctgccagcgctgaccctgcagccgctggtagaaaacgccatcacccacggcattggcaacaagcggggcggcggcaccgtgaccattgccacccgcgaggagcctgacaactggctgatcaccgtgcaggatgacggctgcggcaccgataacattgctgccgacggcctgccgccccagcaggagggcgggttcatcggcctggcaaacgtgcgccagcgggtagaatccatcgcaaggggacggctgcattttagcagcattaaaaataagggcgccacggtaacggtcgtgctgcccaaggaaaggtgaagagaagtatgacgatcctggcaattgacgatgagccagttatgctggtgcacctggaaaccgagctgcggaaggtctttcccaaagcagacatcgtgacctttgacgagtgtgacgaagtgctggcctttctggaaacgccccagagccgcagtctgcactatgcgtttatggacatcaagctgcggggcatgctgggcatcgagctggccaaacgcatcaaggaccaatgcccgcagacgcgcattttgttctgcacctcctactcctactacgcgctggaagcctaccagctgcatgcccttggctacctgatgaagcccgtcgacgccgataagctgcgggaggcggtctcccaaattgaagcgcagctgggtaccttcccggaggacggcacagcgacccccggcaaactggtggtgcatacctttggcaattttgaggtgctgtacaacggcacaccgctggtgtttgagcgggaaaaggccaaggagctgctggcgctgctcatcgaccggcaggggctttcgatgaccaacggcgagattgaggcctttttgtgggaggagctgcactcgccccaatatttgcaaacgctgttctactcgctgcgcaagacgctgcgcggcatcgggtttgaggatctgctcatccgcacacgtaaccacaccagcattgatgtgagcaagctgcactgcgatctgtacgagtttttgaaaggcagcgccgacgccgtaaacagctacgccggagagtacatgaacaattacagctgggccgagctgaccaacgcccggctgtacaacggcactttttcagattttgtgctggcggcgcaggcacggtcaagacggtaaaatggcaaaaaggcttccctttgagcaccctccataaagaagatgccacaaggcggcttttgcaactcaatttaacaatttttcgaaacggtgtagccctattggttacgccgtttctgttttcttgcgctccgcgagagatttctggaacacttcttccatttcttctggtgtcagttcgtcgagaatcccgacggcgctgtaataagtatctacagtctggatacgcttgccgtcaaggtatttcggggcgtaacttttagaaatcttttgtgaacgccaatccgagcagcaaaaaaccggagtacacagcctgaaatccggctgtgtgctccggtttattttgatggtacaaatatggaattttttccatggaataagtcgtaacaagccacggatttgattgttcaaatctagcttgccaaagaatttttctgggaccctcgccaattttttcatggcgcttcgatatctatctccgtactcttttaccagatcgtttgtgtagacttgcccgcacgataatccggattcggcagatcaacctcaataaatgcagaaaaccgccatgtaaaccgagatgtaaagcagaatatacgcagtaattggtggtggcaaccgaactttttcgttataatttgcagcgtaatcaagacaaaggaggatcgaacaatggctatcctatgagctgatgggctacactgaacagggtgaaccgtgcgaagtgtatttcaccagatccggcagtgcagaggactattacgcacccgggacctatatcaagatcagcatgagtaagaccatcacccttggcgtggaggtcgtggaagaaccgtctgttccgcagacagcgttggagaaaattcaagagttgggaaccaaagctgactgataggaatgtggaaaaatcaaattattttatatataatttttatgaggtgattgtactatgtacgcaacaggagtaataatcattttagttgctgttctctatgttttattctggatagcagtgtctgccggcatcgtctacctgtttattctgatcgtgaaggcactcaagaaatatgtcaactccaaggaagtacgagaggaaaagaaagctgttgccaaatccttgggcgaagcattgaaggaaaaccgcatccgctgccagatgacgcaggaatttgtggcggaaacgctaggcgtcagccgccagtccgtttccaaatgggagaacggctccagcgaccccaacacctccaatctgattgctctttcgaagctctacaagatttctccggaggaactgttggaatgtgcaacgagaacaccggaggaagattgagatttctttgcaaaggtcagtcagctgacaagaccgatatcatcttccaaccggaaaagttttgtcacagcggttctcttttcggtataatttaggggtgtagttttgctttattataggcgttgggcaagccgttggcaaagcataaaaaagcatcgccttggataagacgatgcttgatgatttatttttgcggctggttatgacagcccaacatatttattatagcaccttttacatgcacttatcaatccttaacatgcacaaataattcatcgcaggattgtctgctctgcgaatagacg

SEQ ID NO: 7986 - DNA, 1106 bp, Unknown
  gut microbiota DNA sequence
attttgtgaatttgtatgggcagttttatgatgcaacgcataattacactggagatgaaggcgcagatgatgaagcggtcagaaatcgaatagaagcacaaactgcacaatttttccggcagacgttgctgtgggggacgctgtaaatagcggagtagaacttaaagagaatatccccctcttgtatgcacttggagttaaaaccagtggatgcgtgagggggaatttttgtatgtatgcagctttagcgcggcttgtctttccggcgacaaaatgctatactcgaagtatgttctaataagaaaagaggaagaaacatggattttgtaaagcgctttaatttgacgcctcatgtggagggcggcgcgttccgcgaactgtaccgcgatggcgaacgcgccaaggagcgacccgcgcatggtgtgatctactatgaactgggtcagggcgaagcctcgcagttccacacgctggatgcagacgagtattggttcttccacgccggctccaccctggaactgtgggaaatcgacaacgccaagctgacaaaatacaagctggggttggaagacggcgctgagccatgcgtgctgatgaaagctggtacgatcttcggagcgaaacacctttccccagcggatgaggcgacccttgtatcttgtgtcacggtgccagagttcacctacgaccactatcgcatctgcgaacgagaagaagtcgtaaacctttgccctgctgcaggggagttctatactaaataaggaagttgttatccagcacacaattgcccagcagccccctctgcgagaagggagaggccgtgtgtttccacctcttacccctacacttggtgccgcatttgcacaacaccacaatatacaccttgcccaaaagtacaataaaaactttgtcaaaaaaaccgaaaaaagtgcttgacaaaggtcatactccttgctataataatcaagctgtctcgcgagggggatagccgctaaagcttgtaactacggcttgtatggcggttttgaagccgaaaggcttcaaaaaatatcgaaaaaagttcttgacaaaagaacttttatgagatataatatacaagctgttac

SEQ ID NO: 7987 - DNA, 410 bp, Unknown
  gut microbiota DNA sequence
attttgcagcttcgccgcagcgaggatacggtatatgaacgcttttcgtctatgcgcgaactggaacggatggggctggaaccggatattgaccattatgaggtggtttatacggctccgcttcttccctacaaggatcagaatacgatgttagaggaactgtatgcgaaattcaatgtttcccgccctgatgattttactggtcatagtctttctgtgtctgacatcgtggctttacggcagaatggtgttgtaagctgtcactatgtggattccatcggcttccaggaactgcccggatttttgaaaccggagaactacctgaaagccgcagaaatggcaatggaggacgattacggcatgattgacggcgtaatcaataacggaaagaaggaagaaccggtggagaa

SEQ ID NO: 7988 - DNA, 891 bp, Unknown
  gut microbiota DNA sequence
atacaacgcgctgtttgcacggctggccgatgctctgaacccggcgcatatcgagaaaaccgcagtgctgtcaatccacccctgcgatttcctcgaaatgtccaaccgtgacaacacttggagttcctgccattgcttagaaggcggcggttaccgcggcggctgccagtcctatatgggtgatgctgtcagcatgattttcttcacggtcagtgacgagtacacgcaggacttccatacagccccgcgcatcacgcgagaaattttctgctataaggataatgttctgctgcaatcccgattgtatcctacagatttggaggaccaaaagacattgtatcgcagcatcgtccagcaggcaatcgcaacatgccttgacaagccgaacctgtggtcacttaagcgtggaaaagataccgaaccttactgcgagtctgcggcggacagcaaccactatcccgactataagtatggatacgcggttgcatctttgctgaaaggcgaaaacgactatggccaaatgacgataggctccgtagcccgctgcgtctgctgcggtggagaacagaagaaccatcgttccatacgctgtgcagagtgcggcaatatgtatgtctgcaagggctgcggcaaaacggtgcatggatatgggcgctatattgatgagcacttttattgcaatgagtgcagctatgaatgtgcggtttgcaaagaaaagtttatcggtatgccgcgcatcggaattgctcgttccggtgagcagcgtgggatatgccctgcctgctatgagcaggttgttggcgtatgcagaaactgtacgattcatggagactgcctttccatcggtgccaatcgcttctgcccgaaccagatgagcggccttgccgcata

SEQ ID NO: 7989 - DNA, 568 bp, Unknown
  gut microbiota DNA sequence
ggaatccatgcaagaattgacgtttgaaaccattctacgtctgccgcagatggaattgaaaaagaggttaaaagccgagctgaaaagcaggggttaccccgttaccgataagcccggctacctgtatgccgagggaacgattcctgtcttgctggtagcccacatggacacggttcaccgtcagcctgtcgagcagatatgctattcggcagacagggcagtagctatgtcaccgcagggaatcggcggcgatgaccgctgtggtgtctggatgattttgcagatcctgcgcacggcgaactgtcatgtgctgttctgtgaggatgaggaagtcggctgtgtaggtgcaaagaaattcacaagaggtcctttgcggccacaggtaaactacattgtagagcttgaccgccggggcagtaatgatgctgtgttttaccgctgcgataacccggagtttgaggacttcgttacctcgttcggatttgaaacagcaggtggttcgtgtagtgacatatcttatatcgcaccgtatctggaaacagctgcggtcaatatcagctgtggctat

SEQ ID NO: 7990 - DNA, 10381 bp, Unknown
  gut microbiota DNA sequence
ctaattgggggacagcatatccaatggattcaccctgaccccgccttgcataagtctacgagccgccagcagatagtcgttataatccttaccgaaaatgcgtttggaatttgacatttatatcgaaatgtggtatctttttgctaaagaatggtggaaaataaatcccccaaaactcctaaaaagtccgcggggttccgctggtttgggccgactcaaaacccgttggtggtgacaccgtatgggggcaggagctgccggaagccgtacacttataaccacaaacgagggactatggataccaacacattcaacaccaccgccttacaggatgagctgaccggggcgctggtgggactggcgcgggcggcggataccgcccctgcggtaagcgatgcgacctggcaggtgatgatcgaagccttggcggcgaacagcccggctgccgcctgcaacgaggccgaaatcctctcgctcattgaccgggtgcatgcggaaaagttcaaggttgtgcccgattgcgccatctgcgcctctccctgcgggcggacggccgattacaacatggccaacatctggaacgcaccggagaacgtccgcagcttaaaggtgctcatcctcctgggcgtccacgggctggcgggctatgcgcaccgcgccctggcgctgggcgtgccggacgacgagttgaaccgcttttttgccgaggcactggccaccatcggtgaggaacttagcccggagtacctgcagcccaccctgctgaaaaccggcgagatggtctgcaagtgcaaggtgctgctggacaaggccagcgctgaaaccagcagcaccccctcccccgccgcgccagcacaacctacgcagtaactgtccacagaatcaacaagctgcgccccgtctatgccgaggtgccgccccgggtggagtataccctgcccgacctgggctacagcttaaagcccgtattggacactatatgggcctggggcgaggggcaccaggcgaagatgcggggataaatagggcaataccgcataattctaagtgccgatacgacgagcgaggtgcggcagctgctaagccaaaagcgcagataatactttgtgtattattgagcattttggcaacgcagatgccgtgccgcacaccgagccgcagcgaggcgcttcggagcgcaaccgccgcttgcggcggctcttggcgcggagatccgccggagcggtgcttaagccgtcaggcgggaattgtgcggtattgccatagggcaaaaaccgggagcacccgttgaaaggcgctcccggtttgttttgtttaattctgtaccatttcgggctgcttgccggctaggtcgttgatgacctcgcctgcgatgataagcccggccacggcggggacgtaggcggtgctgcccggcacctggcggcgctgggtgcacttgcgggcggtgcccggcgggcagatgcagtgctggctgcagctgatggccatatcgtccacgggggtaatggccttctccttggagtagaccactttcaggcgcttgatgccccgcttgcgcagctcggtacgcatgacgcgggccagcgggcagacggatgtctcgtaaatatcagccacttccagcgcggcggggttgatcttattgcccgcacccatacagctgataatgggcgtaccggcggcatcggcctgcatgatcatggccagcttgccggtgacggtatcgatggcgtcgaccacgtagtcgtactgggtaaagtcgaactgatccttggtatccggcgtgtagaaggtctggtagatgttgaccacggcgtcggggttgatctccaaaatgcggtcgcgggcgacctcgaccttgtacttacccacggtcttgcgggtggctaaaatctggcggttgatgttggtcaggcagaccttatcatcatcgatgagatccagcgtgccgatgccgctacgggccagcgcctcgacggtatagccgcccacgccgccgatgccgaagaccgccacacgggacttatacagtttttccatggcctcgtggccaaacaacagttcggttctagaaaattgattgagcattccgttcccctcacgccaaaggcattaagctactgatttactatgttttacagcatttgattatagaacagatgctcggttttgtcaacaggacgaggaaatcggggcaggatcgcgcccccttgaggggagcctttattgtttaaaaccccgtcatatctcccaaatcaatctccgtcttgttcccccaatctctgcgcagggcgatggttgccgtacaatttgtattatcatacaaaattgaccattgcgtattactggtcacatccttggggttcggctcctggctggcagcctggagtgcctgccaggcaatgtcgggggtgatggctccggcgttcgagtccagcacttcctcaatggcgtcgtaccgctcgcggccatggccgtagatgccgtttttctggttgggcaggacgttctccttgtacttcacaaagaagttcgtcacctgctggctgggggtcacgaccatcgggcgggccgggtcgtcacaatcgtactcgatcacgcagccgtcaccggcggcatcggtgatgtaaaagtggtagtcgcggccgctggtggcaaacatatcgtactgttgcagcagctccacggcctcggcggtggtggcggcgcggtccagcaccaggcggatggccatagtggtagccagcaccggcttgccggtatcctgtttggttggttcgctgtccagcgtcagcacggcaatagaaacgcccttctcattgatgccgtccaggcaggcaaagggtgccagcaggctggcaattttggccttggtgctggcatcggcctggttgacacccaggttatccagcgcggcaaaggcgatggatttgtagccgtccttgggcgcggtacacaccagcatggccgaggtatcccgcttgaagtcgtagttgcggcccatcaggtggtcgccgccggtctcctggatgtggaaggcgctgcagccgaaggtaggcgctttgatggagacgggcagcagcggcagcgcctgcttgacggctgcatcaataaagctttggttatccgccgtggtgttggcgatcatcttgtccaggtcgtagtcatagcggacctgcatgcggtagaggttgtaatcatcgtagtcggtcagtttttcgatagaatttgcggtctggatgcggctggcgtacagcgcgccgaagcccacagcggccacggccacaacagccagcacccccacagcaatgcgggcggcaagtttcatagcgggtccctccttttagtgatttggccctctatgcgagggggttcccgcgaagcgggcgggagagagactttggcatggtctccccctccgtcacggcttcgccgtgccacctccctcacagagagaggcttttctttgtgcaaattgtatcacataactttgcatctgcacaagaccagctatgtaactttggcgcgatacacaaaaacgggcataaaaaatgggagaaacccacaaacggggtttctcccatacacgattgcaaaagagatcaggcgttggcctgagaagcagcaacagcgcaggcgacagtcataccgaccatcgggttgttgccggcgccgatcagacccatcatctcgacgtgagccgggacggaggaagaaccagcgaactgagcatcgccgtgcatacggcccatggagtcggtcaggccgtaggaagcggggcctgctgccacgttgtccgggtgcagggtacggcccgtgccgccgccggaagcaacggagaagtacttcttgccgttctcgatagcccacttcttgtaggtaccggcaaccaggtgctggaaacgggtggggttggtggagttaccggtgatggaaacctcaacaccctcagccttcatgatagcaacgccttccagaacgtcgttggcgccgtagcacttaacagcagcgcgctcgccgtcagagtaagggatggtctcgacgaccttcagctcgccggtggcgaagtcgtagtcggtcttgacataggtgaagccattgatacggctgatgatctgagcagcgtccttgcccaggccgttcaggataacacgcaggggctccttacggaccttgttggcggtacgggcgatgccgatagcaccctcagcagcagcgaaggactcatggccagccaggaaggcaaagcaatgggtgtcctcgtgcagcagcatggcgcccaggttaccatggcccaggccgaccttacgctgctctgcaacagagccggggatggtgaaagcttccaggccttcgccgatggcagcagcgcagtcagcagcgctcttcaggccgcgcttgacagcgatggcggtgcccagggtgtaagcccagacagcgttatcgaagcagatgggctggatgccgcggatgatcttgtcgcagtcgatgcccttggccagcagcatctcgttgcaggcgtcgaggctctccaggccgttggccttcaggcaggcctcgatcttgggcatacggcgattctgggattcaaaagttgccataatctatgttcctccctctcttattcttcacgcgggtcgatgtacttgacagcgccctgctcggcagagaagcggccgtaggtaccgatgttcttctcgtaggcttccttcgggtccttgccgtggcggatgtcttccatcatcttgcccaggcggacgaactggtagccgatgacctggttgtccttatccagagcggtcttgaggatgtagccctcggtcagctccaggtaacggacgcccttggccttggtggagaagatggtgccggtcatagagcgcaagcccttgcccaggtcatccaggccagcgccgacgggcaggccgttctcagagaaagcggtctggctgcggccgtagacgatctgcaggaacagctcacgcatagcaacgttgatagcatcgcagaccaggtcggtgttcagggcctcgaggatggtcttgccgggcaggatctcgccagccatagcggcggagtgggtcatgccggagcagccgatggtctcgaccagggcttcctcgatgatgccgttcttgatgttcaggctcaacttgcaggtgccctgctggggtgcgcaccaacctacaccgtgggtgtagccgctgatgtcctcaattttataggccttgacccactggccctcttcggggatgggggcgggaccgtgcttgggcccttttgtgatcgggcacatgttattgacctgtgcggagtattcgatcataattttctctcctttgcatttgttaggcttttcacagctatctttattataaagggtgcagggtcgattttcaagatgttagtctaccctaaccttttgttttttggagaattccgtagaaaaacaaaacccgcctccgaacgaggcggtgaaagctggttttgcaagggatatttaccatttaacatagggggttcccccatggcaaatggtaaatgtgaaatctacatcttctgctgcatttgcctttagtacaggaacccaaacaccacgcgggaggccgcgccgcagaccgccatcatcaccacggcggctgcggcaggcccgatccaggtgcggatgaggccgggggccggggcgtcatttccattcggcacaggctgtctggcctttttacccttgggctgaatgggtgcgtcctcgccttccggcggcaggcagaacacctgcaaaagcccgaacagcagcatgatctcggggaagatcatcgacacacggatagacaccgccgcgtgggccaggtagctgaccagcgccagcgtgaccggcgcgaccccggggcgcagccagttctgcgcggccttgcgcaggtgcgccgtcacaaaccacacccaggcggccaggcccagcacaccactggtcagcagcagctccaggtactcgttgtgggcagcgtaaaacgttttcatccgggcggtgatgtccgcccctgcccactgggccacggcggtgtgcatcataccggggccaacgcccagcagcttacgccagaaaggctgcgccgtccaggccgaccagctgatgcgccaggccgtgccgcgataggtgccccaatcatcgttgaataccagtaggtcatcgagctttcccagcgacgggaagcccggcataaagttagccagcaccaccagcaccacgcctaatgtgactgcaatggccgtcagcacgcggcctgctttccacagcgggatctcgcggctgcgcagggcaaagaacaacacagcccacaccaccgcgcagactgcaaaacccagctgggcatagtggccgaaggccgccagaatgggcttgccgccctgagtgtagacgtgggtacgcatgtactgcatccagcctgcgtcggcaaagaaaaacatgccgatgaccatcagccgccgcagggtgcgggtggtgaaaatcttctggcagagcagcaccagcaccgctgcgccgatgcccagcgccaggccgtcggcatccaccaccgccagcgccagcccgccaaaaaaggccggtacaccgtaaaacaccgtgtgccgcgccccgcgggccaccaaaaacgcatagaacaccagcggcagcgcaaaggccatgaagccggagcagaagtttttctggccgagggtggagaagaactgggcacgctccaccacggcggtatctgcataagtaccaataaggtcgatattaaaaatgttgagcacatacagcaccgtgaccagcgcggtggtaatgcccacgcagaacgtaaggccgttgagcagtttttgcggggcaaaggcccgcacggccaggtaacccacggcggtgaacagcaccatcatgcagccgccgtagtagccgcccagcccccacagggacatggcgggcgacagcgaggtaacggtagagaccacgcccgtggccaccacagcccccagcgcccaaaggccatggtcggtgcgccagggcaggcgacccgcacgggggcgcgccccgatggcggccagcgcccccagccacaggcagaacgcccaggacagagtggctacgccggtgaatttgacaacgccgaggttggaaaatttatcgatataaagcggatatacgcaaagcaccgccagcagaaaggcgacagcggaccgttccgccatccgccgcagctgctgggcctgcatggtttgctgcatgaggggttcctcctgttatgtggtgggatgcttagagaccccctctgtgagggggctccccacagcgtggggagatgtcgcgtagcgacagaggggtccggccgcgtaagcggtcccgcagagcgggtgtggagaaagcacagattgtatccgaagcttcggaccaggcaaggctctctccctccgtcagcttcgctgacagcgctccccctctggcacttcgtgccacctcccccgtatcgggggagtctgtctcacagagggagccttttgcaagtttctttctattcctagcaagcctatattgtaccctgtacggcgcaaaatttcaactgatttggcaaggttttacaagtctgacacaaaccagccctgccacggcacacgccccggccagccagtgccgggcggccagcggcagagcctggctgccgatataactgacgaggctgccgccgctcatccctaaggcaataaacccatagttcacccccgcgtggggcaggccgaagaggtcggtattgaacgcaggctgcaccgccgccccgccggagtagaaaaacgtcagcaccgcataggccgccagcacccaccactcggcggcaaaagcaaaccacaccgaccccgccgccaggcccagatacaccgcatacagcaccggcttgcggcccagcttgtcgctacaggcgggcagcagcaggcgccccgccgcactggcggcggaacctaacacgatgctgcagggcgcagcggcttcgggcagaccgcgctcggtggcaattttgaaaatctccgggctgaacaacagcaccgccggggcggacagcgccaccgccgccacgcacagcttatattgggtcgtacgcaccatccggggccaatccaacccgggctgggggttgccggacgttgccggggcgggcgggtcttgcaaaatcagcgctcccgcgccgcagattaccagcatcacggctcccagggccgcaaagcagacgcggatgccccaggcaccgcccacacccttcacaaacagcgtaaaaaacgcgccggacaagcccatcgccaccccggccacgccagtggcccagccttttttgtccttgtaccacttttgcgcgcaggccagcaccgccggggccaaaaacgcactgcccagccccgcaggcaggctgtacaccagcaaaaacagcaccgcgttggcaaccggtaccagcgaagccgcaaagaatccccccgccagcagcgctgtaccccaaagcccggcaaagcgcgggccgtgggcgtcctgcaataagccgcccatcgcacagcccacaccgtaggccgccaccagcaccgcaaaggccagcatcgcctgcccccggctgaacccatacccctgcatgaccggctgctggaacacgccccacgccgccgggatgccggtaagcagctgtgccgccgcccccgccgccaaaatgtacggtccgcggttttgcgcccgttttgccatagtgcatccctcccctaccgcattagtatgggctattcagattgacaaaatgcgccgggcaggctatcattataagatagtataaaaatagggcgtatgcccccgcgaacataaaggagtacaacatgaaaacccagccgttaaaagggatgcgcgacctgctgccccgtgagcaggccctgcgcgattatatccagggccagatcctggccacctaccgtgccgcaggcttccagcgcatctccacccccattctagaggacatggagaacctggacaagagcgacggcggcgacaacctgaacctgattttcaaggtcctcaagcgcggcgacaagctggaagctgccctgcgcagcggcgacgaaaagcagctgagcgatatgggcctgcgctacgacctgaccctgcccctctcccgctactacgccgccaaccgcaacgagctgcccagcccgttcaaagtcatccagaccgaccgcgtctaccgcgccgagcgccctcagaagggccgcctgcgggagttcgtccagtgtgacattgacattttgggagattcttcccccaacgccgaggtcgagctgatcgacgtgaccgcccgcgccctgctgaagatcggcttcaccggctttactgtcaacatcaacgaccgccgcatcctgcgcgccatgctgcagaagatgggctttgccgaggagcagctggattccgtctgcatcagctttgacaagatggacaagatcggcgccgagggcgtgaagaacgagctgaccgagaagggctttgccgccgaggccgtcactgcgctggatgacttcctgcgcgcgggcgatttcagcctggataccgtcgccgccaaggtggacgacgaggcactgaccgccgacctgcgctatgtcatcgccaccagcgagaagatcgcaaacggccgctatggcatcgcctacgcccccagcctggtgcgcggccagggctactacaccggcatggtgttcgaggtcacctgcccgcagttcagcggcgcggtggccggcggcggccggtacgacaacatggtgggcaagttcatcggccagcaggtgcccgccgtgggtttctccatcggttttgagcgtgtctgcggcattttgctggagcagggctaccaaatccccggtgccaagccgcacctggcgctgctctacctgaaagacgccgactttgccgccgtgctggccaaggccgaaaccctgcgtgccgactatgacgtgaccgtgctgccccaggccaagaagctaggcaagcagttcggcacgctggaagccgccggctacaacgccgttgcctttgccgacaacgatgacatcaaagttcttgggcagaaagccgaataatcacctgtaaatttgtgggaagtaccaaaaatcatggcacttcccactttttgtaaatgcgcacgtaacatttcagccccgctgtcgtatttaggggtaagaggacacaacacggctgaatccgtgaaaaagaaaggagaatccaccatgaaaaaacgtttccgcgtatccactgccctgctggcggctgtattgctggcaggctgcggcagcatcagcagcaaaaacggcgacggcggctattactctgtaaacgaag

SEQ ID NO: 7991 - DNA, 18227 bp, Unknown
  gut microbiota DNA sequence
cccgaggagctgcccgattccaccgacgagacctcgcagaaaatcatttacaacgccgatatcaacattgaatccaccgatttcgacgccgcgcgggacaccctgctggcggcggtggacgattgcggcgcgtggatggaatactccagcctgagcggcgacgcgaaggaccacgaccgctacgcctactacacggtgcgggtgccggtggaaaactaccgcacgtttttggccgccgtgggcgaggcgggcagtgtgctggacctcagcgagaccgccgagaacatcaccagcagttacattgatgtgcaggcccggctaagcgccctggaagcccagcgtgaccggctgaacgagctggccgatcaggccgaaaccacggcggatctgctggagatcgagagccagctttccgacgtgcagtaccagctggaaaactacacccggcagctgaaaaacatggaccagcaggtcagctattccaccgtggacatccgcttaagcgaggttgccaccctgacccccaccggcaccacctttggggagcgagttgtggatgcctttgccgatggctggcgcgggtttgtggtgttcctccagggctttgtgctggcggtcatctacctgtggccggtactgctggtggttggcatcatcgtggccttagccgtcaccctgacgaagcgccgccgcaagaatcatcccaaaccggtgaaaccggcagcgcctgcaaagcccgcagagtacaccccgcaatcgaccaacgacgaaccgaaacccaaatattaacgcataaaggttccacattactgtaggggcgaacactgttcgcccctacatgctctactcgataaaagcatctttttatccattacataaaagcggctccccactacgcatggggagccgcttctattatactatcaatccttcatcgtcagggcgatgttcagatccttcagctgctgggcgtcgaccacgtcgggggcgccgctcatcggctcgccggcgttctgcaccttcgggaaggcgatgacgtcacggatggagtccttcttcagcatcagcatgaccatgcggtccaggccgtaggccataccaccatgcggaggcgcgccgaacttgtaggcatccatcaggaagccgaagctctcgcgggctttctcctcggtaaagccgagggcatggaacatacgatcctgcagggcggggtcgttgatacgcatcgagccgccgcccatctcaacaccgttcagcacaatgtcgtaggccacagcgtggcaggcaccggggtcgctctccaccttgtccaggtcctcggccttgggcagggtgaacggatggtgcatggccatccagcggccttcctgctcgctgtactcaaacagcgggaagtccacgacccacaggaagttgaacttgtcggggtcgatcaggccgtgcttgcgggcgatgtccaggcggacctggcctagggcggtgcaggccttgacccaatcggtgtcgctgaccagcagcagcacgtcgccggtctcagcgttcagggcggcgtacagggcggtcttctcggcatcggtcaggaacttctcgaagctggaggaagtgccatcggcggtcaggcggctgtaagccaggcccttggcaccgtaggtcttggcgacctcgcccagcttgtcaatgttcttgcgggacagcttgtcggccaggcccttggcgttgatggcgcggatggtaccgccagcttccagcacagcggcaaagggcttgaactcggtgcccttgaacacctcggtcacgtcctggatctccaggccgaagcgggtatccggcttatcggagccgaagcggcccatggcctcgtcccagggcatgcggacgaagggggtctgcacgtcgatgttcagcatctctttccacaggcgcttgatcagaccctcgttgatggtcatgatgtcgtcctcggagacgaagctcatctcctcgtccacctgggtgaactcgggctggcggtcagcacgcaggtcctcgtcgcggtagcagcgggcgatctggaagtagcggtcgaagccggacagcatcaggatctgcttgtaaagctgcgggctctggggcagagcgtagaagtgaccgggctgcacacggctgggcaccagatagtcacgggcaccctctggggtagacttgatgagggtcggggtctcgatctcgcagaagtgattctcgcagaaataattgcggatgatctgcatgatcttgctgcgcagcacgatcggctcatgcatcgaggggcgacgcaggtccaggtagcggtagcgcaggcgcaggtcatcgttgacgttgatctcatcgcgcagctcaaacggcgtagtctgagcctcgctcaggatacgcagttcgctgacgtacagttccacatcaccggtggcgatcttgtcggtcttggcggcgcgctcacgcagtttgccgcggcagatcaccacgtattcacttttcaggctttcggctttggcgaaaacgtcttttggcgtatcctcgtcaaaaaccagctgcaggatgccggtggtatcgcgcagatcggcaaagatgatgccgcccttatcgcgggcacgggcgatcgaaccgcagacggtcatctcctgcccggcattggccaggctgacctcgccgcagtaattggtacggcgcagggtccccatcgtttccatagttccagtcccctttacattatcaggcagcgcgccggagcgggccgccgtattctttcagacatatcattataccgcgccccgccgcatttggcaagaggggcacaccgagatttacctgataagacaaaaaaccgcttgaggcataatgcttcaagcggtttttggtgcgcccgcaggaactcgaatcctggaccctctgattaaaagtcagatgctctaccaactgagctacgggcacatctatcttgctgtttcacagccctaatagtatagcaggtgcggcggggcttgtcaatatctggcggcaattttttttgccgtagcatacaaaaagcccgcagcgcagcggccacgggcattaaaacctatattagggggcaggattactgaccaaccttctccttcagacggccgctggccttgaagccggggatggcggtgggctccagcttgctggtgaccttggtcttggggttggtgaagttcttggtctggcgctcacgcatctcgaaacggccgaagcctgcgatagtgactttgtcaccgctcttgagcacgtcaccgatggtgccgaagatgccatccatgaccttctcgacttctgcgctggtcatattggtgtcgttggcaaccttggtaatcaactgagatctagtcataattccttttactccctattgttcaggccagagcctgttactatttacgggctttattatagagaaaattccgcgcagaatcaagggttttttcccaaatcggtcgaattttctcaaaaatcggcaaataacataaaatttgctttgtaaaaggccgcaaatttcgtcacatggcgggaatttgacctgttacagcagtttattaccaccaaacgtgcatattttgcggacttatacgcccatctgggccgccgtggggtagctggcaatggcgccgtagcgctgcacgctctcgccgcaatagcggttggagaatgccagccactgctccagctgggccggggcggcggagggcaggctgtccacggttacgccgtcgcggcaaagctgccacaggaaagacccgatgaagccgtcccccgcgccggtagtgtccacggccttgaccggcttgacggcggcaaacccctgggccgtgcgggtgtaggcgtaggccccggcgctaccgcaggtgtagaccaccagctgcacatgcccggtgaacagtttaggaagggctttttcaatatctgtcgtgccggtcaggaattccagttcctcatcggacacctttaaaatatccgcctggggcaggaactcccacacggtgcggtacagggcctcgcggtcaggccagagcgggaagcgcaggttgggatcgaagctgaccagcgccccagcctggcgggcggcggcaatggcagccttgtgggcctcccgcatcgggctttccaccagcgacacactgcaaaaatgcagggcaaaggcggtggtgaacagcgccggatccacctgctccgggctgtagagaaggtccgccgagggcttgcggtagaagctgaaggtacggttgccgtccgcctgcagcgagacaaaggccagcgcggtgttggcgcagtcggtggtggcaatgtggctcacgtccacacccgccccggccaactcggcggtgatttttgcgccgaaggggtcatcccccagctgggtcagcagggcgctgcggccgcccagccgtgcaaaggccgctgccacattggcgggggcgccgcccacccggggcgcaaaggagaagaccgcaccgaaatcgcagccggtctcggccgggatcatatcgatcagcgcctcgccaatcgcatacaaagtgtcatgagccatcacaaatttctccttacagcgtgatttcgtacagcgtgccgcagcagcccgtcaggcacagggctgctgggccgggggccgggtaatagcgggtggacagcaccgctgcgccgtcattcaggaacacttccagcgaggaggcgtcccccaccacccgcaggcggcggcagggcgcgtccagcactacatgacggctggtgcggccataggccatggcggcattggtaaagtagagggtgcagctgcggtcggcttcgcaataatccaactgcacgccgtcagccaccgtgagggtaaagttccccgccggggcagccaacaggtcaaagcagggtgcggcggaaacggtctcaccgtcgggaagatcgtgggcggtgccgcgcagggcggccagctcggccacggggttctgcagcaggcggtcgccgtcgcgggtcagctggcggggcaccgtcaggcagtgctgccagccaaagtcgacggggttggtgtagtcggcgtcgggcatgcccatccagccaatttgcacacggcgaccgccgtcggcaaagctttggggagcgtagtagtcaaagccgaagtccgcgtggcggaactcgcccagcgtgcaggcaccgcgccaatcgccataaaccgggaagtagccgcagccgtagacattctggcactcgatgccctggggggacacggccaggaaccactggccgtccagctcgaacaggtccgggcactcccacataaagccgaaaggctccggggtggtcagggtgttgatgcaggtccagtggagcttgtcggcgctctcccagacaaggacctcgcccctgtcctccaccgtgcgggcacccagcaccatatagtagcggccgtcgcaggcaaacaccttggggtcgcgcacatggcaggtcaggccggttggataatccttattataaagcaggcactgcttgctgtccaggtggatgccgtcccggctggtggccaggcagacgttatgcccgcggccctgcttgatgtagtcatagtcaccggggtgcttgacgttgccggtgtagtacaggtacatcgtgccgtcctcgacgatggcggaaccggagtagacaccgtggcagtcgaagggttcatccgggtaaagcatgacgggctggcgctcccagtgcatgaggtcgcggctggtaacgtgcccccagtgcttaacgccgccggtcgcatcgaaggggccgtactggtagaagacgtggtaagtatcgccgatcctgcacaggccgttgggatcattgagccagcccacggtgggctgcacgtggaagcgctggcggtgggggtcgctctcgaccttttccgcgccgagggattccaccagcggaacaagttttttcaggtcgcgctgtaaggcgttcatgggggtgctccttttctatataaaaggctccctctgtgagacagactcccccgatacgggggaggtggcacgaagtgccagagggggagcgctgtcagcgaagctgactgagggagaggcaatatccttagctgctgctaatcgcaggttctctcccccaccgcctgccggcgaagcccccctgagggtggcctttcgctgtttttatgcgttttcttcttccggcttccagatcacccaggtcacagcgaatgcgacaccgaaagcaatgagcatggcgatgatgtactgcagcggcatatgcaggtgcagcaggatgccgaagatgccggtcacgccggtgccggtggcacccaggcccacgatgctggcgtacagcgcaccgcaggcaccgcccgccaggccgccgataaagggcttgaagtagcgcaggttgacgccgaagatggcaggctcggtgatgcccatgcaggcagacagtgcggagggcagagccatggacttgaccttggcgttcttgctcttgagggcgacggccagagcggcaccgccctgggccacgttggcagcgctggccaggggcagccagtaggtgtagccgaacttagccagctggccgacatcgatcagggtgtacatgtggtggataccggccacaacggtgatggcatacagaccgcccataacaaaggaaccaatgccgtagggcagctggatcagagcctgcacgccgttgatgatgccgtcctccacagtggtgaagatgggtccgatgacagccagggtcaggtagccggtgacaaagaccgagaccagcggggtgacgaacagatcaaacatggcgggcacgaccttgtgcagccgcttttcgatctgggacatgagccagacagcgatgatgaccgggatgacgtggccctgatagcccaccagcgggatggaatacagcccgccgaacaccggctggtaggtctgcacgccctcggacgcaacggtccaggcgttttgcaggttggggtggatcatgatcatgccgatgaccgcgcccaggaacgggttgccgccgaagactttcgcggcggagaaggcaatgaggatgggcaggaaagtgtacgccgtgttggagaacagctgggcgaacacgtagagggagccggaagtatcgatgttgacgaagccgttgttgaccatgaagttcagcgcttccatgatgcccatcaggaagccggaggccacgatggcggggatgatgggcacgaagatgtcgcccagtgtcttgatggcctgctggtaccaaggggctttggcagcggctgcccgcttgacttcctctttggtagcagcgccgataccggccagagcggtgaactcatcgtagactttgtttaccgtgccggtgccgaagatgatctgcagctgaccctgggcctcaaagacgcccttggccccctcggcgttctcgagggcctttttgtccactttgtcgttgtccgcaatgaccaggcgcaggcgggttgcgcagtgggctgccgatacgatgttggacgcgccgccgatggcatccagtacctgttgtgccgcgtgtttgtaatccatgaaaatcgctccttctataagatgtgaggcagaggactgtgaaatcaatttcatctgacgagtatattatagttgatggggcggtagatttctattcgccgagtgacacaatttagcttggatgtgttatcgatttcacacagtttcacatgggtatttggtactttgcacaaaaacggggtacatctttttacagcgcccaaatattttcatcggcgttttcgtcaccggtggaagcgcggcatttcagctcccagcccagttccagctcccgcgggcgggcatggggatcggccagctggtccagcagcaggcgggcggccttgtcccctgccgtgcggtaatgcaggtgggcactggtcagtggcacgtaggccacccggcccgcacggctgtcgccgacggaggccaccatcacatcctcgggcacacgcaggccctggctgcggcagtactggatagcaccgatggcgatggtatccgtggcgcagaacagcgcgttgatctcccccgcccgctcgaacagctggcgggcctgctcgtagccggactccatgttgaacttggccacactgatgcgctgggcgcggggcattaagccggcatcccgcagggcggcttcgtacccggcgcggcgggcctggcccacggccttatccaacatggtagcgcccaaaaagcccggcaggcggcggcctttttccaacatgcgggcggtggcggcgcgggccgcaccgaaatcatcgtgatacacgcagctgtagccggggtgctgctgccccaggatgaccacaggaatttttaagctttccagcacagcttcgtgctccggcgtgaagatggacgcaatcaaaataatgccgtccaccgcgtcgtggcgcagcatgtccatggcccgcacctcgcgggtgttgtcgttggcggtgttcaccagcagcagctggtagccctgctcgtccagcacacggctgatgccctcgaccatgcgggcacagctttcactgctgagtttgggcaggatgacaccgatctgtttggtgcggcgggtgcgcatcatctgggcctgcatgctggggcgatagccggtctcctccaccgctttggcgatggcggcttttttctcggcgctaaggtagccgccgttgaaaaaccggctgaccgccgccttggacacacctgcgtaggcagcaaattcggtgatattcatgggtaagccccctttgtggtattgatttcagtatagcgcgggcaggaatctttgtaaagcctgccgctctttccggctccctctgcgagacagactcccccgatacaggggaggtggcacgaagtgccagagggggagcgcgatcaccgaaggtgactgagggagagacaaacaaattagcacctactaaatcgaaggatctctccccctcctgcttcgcggaagccccctctcaaaggggggcattcctgcaacacaaaaaaccgcacccctgcggatgcggtttgcggatctattttattcccctttggcggcttcacggtggaggtgggcgatgtccaccagttccatctggctgatgtcatggtcgccgcgcagggcgtccaccagcacgcgggcggtatccatggcggtgatgcaggggatggacagctcggtggccttgcggcggaacttgaccgaatcacggtgcgggtcgcggccatgggggctggtggagatgatgtaatccaccaggccgctttccagcaggtcgatcatattcgggcgggcgccgctcatctggcgcaccacactgcaggggatcatctggctgttcagatagcgggccgtctcggcggtgccgtaaatcttgtagccgtagtcatgcagcttccaggccagttcggcggcttcgggcttgtcgctgtccttgacggacacgatgcagcaggagccgggaccgggcaccttgaactgataaccggcagccaccaggcccttcatcatggcctcgtggaaggtgggggcaatgcccagcacctcgccggtggacttcatctcggggcccagcatggtgtccacgccgtgcagcttcaggaagctgtagacgggcaccttgacagcgtagtaggggctcttgccgttacgccacaagccggtgccgtagcccatatccttcagcttttcgcccagagtgcagcgcacggccagatcgaccatcggcacaccggtgactttggagatgtagggcacggtacgggaggaacgggggttgacctcgataacatagacatggtcgttctgcacagcgtactgcacgttgaccaggccgacgactttcagctcgcgggcaaagcggccggtgtaatccaccagcgtatcaatgaccttctggctgaaggtgtagggcgggtagacgcagatggagtcgccggagtgtacaccggtgcgctcgacctgctgcatgataccgggcacgaggtaatcggtgccgtcgcagatagcgtcgacctcgcactcggtgcccaggatgtacttatccatcagcaccgggtggctcatgtccacatgcttggtgataacgcccatgtactcggtgacatcggcagagttgtaggccacgatcatgttctggccgcccagcacgtaggaggggcgcatcagtacggggtagccgacttcctgcgcggcctgcagggcttcttccagcgtaaagacggtgcggccctcggggcgggggatgccgcagcgctccagcagttcatcaaagcgttcgcggtcctcggcctcgtcgatggcgtccgccggggtgcccaggataggcaggccgatctcgtccatatgcttggcaagcttgatggcggtctggccgccgaactgcaccaggcagccgtccggcttctcggtctcaatgatctggtcgacgctctcggggttcagcgggtcaaagtagaggcggtcgccggtgtcaaaatcggtggaaacggtctcggggttgttgttgaccagcactgcctcacagccgtggtttttcagcgtccagacggcgtggaccgagcagtagtcaaactcaatgccctggccgatacggatggggccggagccaaagaccagcaccttcttctttttggggtcgctgcgctcagcaataaactgcttggcttcgttgtcctcgtcgaaggtggagtagaaatagggcgtcttggcggcaaattccgcagcgcaggtatcgaccatcttgaacgctgcagcggggtgttcgggcagggtgtccacaccggccaggcgcttgatggtcttatccaggaaaccgaacttcttggcgttcaggtacttttcagtcgtcagttcgccgtttttcaggcccatctcgatgtcagcaaggtgctgcatcttgtcaaggaaccaccagtcgatcttggtgatgtcgtagatagtctcgtggggcacgccgcgcttgagggcctcgtagacgcagaaagcgcgctcggaatcctgcacgtgcagatgctcgataacttcctcggtggagagcttctcgaagtcgggcagggtcagggtgtccaggcccagctcggtggaggagactgccttcatcatggcgtgctcgaagttgttgccgatggccatgacctcgccggtcgccatcatctgggtgcccagggacttatcagcatagacgaacttatcaaagggccacttcggatatttgacgacgacatagtccagcgcgggctcaaagcaggcgcaggtctcgccggtaacatcgttggtgatctcgtccagggtgtatcccagggcgatcttggtagctaccttggcaatgggatagccggtggccttggatgccagcgccgaggaacgggacacacgggggttgacctcgatgacggcgtactcaaagctgtcgggctttaaggcaaactggcagttgcagccgccctcgatacccagctcggtaataatatccagcgcggcggtacgcagcatctggtactctttatcggagagggtctggctgggggccacgacgatggagtcgccggtgtggatgccgacggggtccaggttttccatgttgcagacggtgatgacgttgcccttggagtcacgcatgacctcgtactcgatctccttccagccggagatgcacttctccaccagaatctggtgaatgggggaaagacgcaggccgttcgtggcgatctcatgcagtttttcccggtcctcgcagatgccgccgccggtgccgcccatggtaaaggcggggcgcacgatgacggggtagccgatgacctcggcaaagtccagcgcgtcgtccaggtcctctacgaccttggaggggatgatgggctggtgcagcttttccatcgtatccttgaacagctggcggtcctcggcgcggtcgatggtatcgggcttgcaggccagcaggcgcacgccgctgcggtccaaaaagccgttgcgggccagttccatgctgaggttcaggcccatctggccgcccaggttgggcaggatggcatcaggcttttccttttcgatgatgcgttccacgacctcggcggtcagcggctcgatatagacatgatcggcaatgtcggggtcggtcatgatggtagcggggttcgagttgaccagcacggtctcgacaccctcggatttcagggcacggcaggcctgggtgccggaatagtcaaactccgccgcctggccgatgatgatggggccggaaccgatgaccagcacctttttgatacgcgggtccttaggcatcggcgatcactcctttcgctgccagcatacggctgacaaattcatcaaacagaaattcggtatccttggggccgccgttggcttcggggtggaactggacggtgaagcagttccactggaagtagtccacgccctcgcaggtgccgtcgttggcattcacatagctgacctgtcccacatcggcgggcagggtctcgctttccacggcgtaaccgtggttctggctggtgatgaaggtgcgggctttgccggcatgggtaacaggctggttcgcgccgcggtggccgtacttcagcttgcaggtgtgggcaccggcagccagggcggtgagctggtggcccaggcagatgccgaaggtggggatgccggtggagagcattttgcggatgttggcgatgatctccacattctcggccgggtcgccggggccgttggagagcatcaggccgtccgggtgcagctcggccagctgagcggctgtggtggtgccaggcagcacggtcacgcggcagccgcgcttttgcaggcagcgcacgatgttatttttgcagcccaggtccagcagggccacatgcagcggggtatcaccccactcccctgtctcggtgggttcgtaggtcttggcctcccggcaagtaacggtcttaaccgcgtcgaccaccgcgtaggcggcgatctgaggcagcagggcggctttcttctccggttcggcatcggggtcgaactcggtggtgatagcaccgttcataacgccgctttcccgcagggtgcgggtcaggctgcgggtatcgatgccctcaatgccaatgatgccgttttcttttaagaaagtatccagcgttttttcgctgcggaagttggagggagtcttgcatgcttcgcgcacgatgtaacccttggcccagatcttgccgctctcgacatcctggctgttcatgccgtagttgccgatgagggggtaggtctgggtgatgatctggccgtagtagctggggtcggtaagggtctcctcaaagccgaccatgccggtggcgaagactacctcgccgatggtggtgccggggcagcccacgctgacgccgcggaacacccggccgtttgccaatatcagatatgcctgcataattagcctctcttttttacagcgtctgctttgcctgctctttcattttgcggctgcccaggtgtaccaggggcagcttgccctccttgcagatggggcactcttcaggggcgtagttgggcagatccagcttgagggcgctggccacgatggggatcggggacggagcctcggcgcgggtacggtcgaccacgcaggcgatgcccaggcagacgccgccggcctcctcgatgacgcgcttggtctccaggctggagacgccggtggtgacaacgtcctcggcgatgacacagcgctcaccgggatggatgcggaaccgcttcagggtcatgacgttatccacacgctcggtgaagatggcgcgcttgcccagctggcggcccagctcgtaagcgtagacaatgccgcccatggcagggccgaccacaacatcgacattcagctccttcagcttctcggcgaccggggccatgacctcggcagccttatcgggatactgctgcaggaatgccatctggcaatatgcgccggaatggcggccggacgacagcaggaagtgcccctccaaaaatgcttcacattcctttaaaacttccagtgcttctcttgccatgatactttcctcctgtataattttcagcttattgtagcatattatgtatatttttgcaatacggttgtatatctattttgtatggcacgatggggataccacgatattgtaggggcgaatgcgagcatcgacccccacagcgaggttctcacttttccttaccctctcgcgcaccctctgatctcatccagcgtcttgacgccgtgtgcgtccatccactgggcgatctcggcggtgatgcgggtgcaggctttcgggtccaggaaattcgccgtacccacctgtacagccgcggcaccggccatgatgaactccagcgcatcgcggccggtcaggatgccgcccagccccaccacggggatgctgacagcacccacagcctgccacaccatgcgcagggcgatgggccgcaccgccgggccggacaggcccgcgaaggtgttgttgaacaccgggcggcgcttttccagatcaatggcgcaggcctggaaggtattgcacaggctgatggcatcggcgccggcggcctcgaccgccttgcacatctcagggatgctctcggcctgggggctgagcttgacgatcagcggcacggtgcagaccttgcgcaccgcgctgaccacctcgctggcgtcggccgcgcggataccgaaggcaagaccgccctgcttgacgttggggcagctgatattcagctcgataaaatccacaccggcggcgcagagcatggccacgccctcgatgttttcctcaatggtatggccgcccaggttggcccagacggtggtgccgcactggcgcatagcgggcagttcgtggtcgatgaaatgctgcacaccggggttctgcaggccgatggagttcatcaggccggagggcgtctcgtacaggcgctcgccctcgttgccgggctgaccgttcaaggtcaggcccttgccggagatgccgcccagcaggcgcaggtcctcggtgtcggcatactccgggccgaagccgaaggtgccggaggcggcgacgaccgggccggccagccgcttgccgaggaaatcaacatgcaggtctgccatcagtcaaacacctcctgtgcgttgaataccgggccgtccttgcagacggtaacggggccgattttcgtgtggcaggtgcagcccaggcaggcgcccaaaccgcaggccatctttttttcaaggctggccaggcagggcacattagcggcagcgcagagcttggccacgccgcgcatcatcaccatagggccgcaggtcagcacaatgtcgtagtttttcgcgtccagcaggtcagtcacaaggccgtgatgaccctcattgccggaatcggtggccacaaaaacatcgtggcaccagggcacgaacctgtccatgccgtagctggtatcgcggaagccgacgtacacgtccggccgcacgcctgcctggcagagctgcttgcagagcagcagcagcggcgcggtgccgatgccgccgcccaccacggcgatgcgctgatacttacctgccaacgcggcggcatcaaagccgttgccgcaggggccggtgacggtcagcgtctgaccgggctgcagggcggcaattttgtgcgtaccctcgcctttgagctgatacaaaaaggtcagcgcgccggtctggttgtcaaagtcattcacactgatggggcgggacaggatcggcgtagcgttggcggcccaggcccgcagcatgtagaactggcctgcgtggggctcatggcgggggtcctgccactgcaccgtcaggcggcggatatcgggtgcaacagtttcttgttgcagcaccgtcagattacagcttattgcactcaccctgaatgtcctcccgcatgcgcacgcactcgttgtaggcggcctcgtcaaaggctacgccgggctgtttcttgtaggccagcaggatgccgcggctggagttgaccacgccgccgttgccctgggtcaggtactgggcgatgtcggcagccttgccgccctgggcaccgtagccggggatcaggaagaaggtgtttttgtaagcggcgcggatggcggtggcttcctcggtatgggtgccgccgatgaccaggccgatgctggagtagccgtgctcgcccatgtagtccttgcccagggcggtcaggctgtcgcccaccaggtcgtagacatggcggccgtcgtccagctttttgtactcaaaatctttggcgccggggttggaggtgcggcacagaacgaacacgcccttgccctgctgctcgcagtacggcaggtaggggctgatggagtcgaggcccatgtagggggccagtgtgatgatgtcggcctcgaagtcgccggtgaagtgggccttggcatacatttcggcggtcttggcaatgtcgccgcgcttgatgtcggcaatgaccggcaggccggtggcgcgggccagcttgagggtctcggcgtaggcgcgcatgccgtccaggcccagggactcgtagtaggcgatctgcaccttgtagcagcctgccacgcccttggtggcggcgatcagcgcgcggttgaagtccagcacgttctcgccggcggtcttggcggtgtcggtggtgggcaggtagccgatctcggtatccaggccgacgcagaccgggccgttggcagctacgctctcgtacagtttatccatgttcgtcaacattgtgtgctcccccgtttatataatgtagattgcttactcttcgatttggaacgtgaccttgccacccttgatggtggtgacgaccttgccgtacagcagggtgccatcgtaggggcagttcttactcttgctgtggaggtcctcggcgctcacctcatacatgtggtccaggtccaccagcacgacatcggcgtcgtaaccgggggccagcatgcccttgtggtcggccaggcccagcacggcggcggggccggcgctcatcaaaaagctcagcagttccagcggcaggcgctgctcgcggcaaagcttggtgtagcatacgccgaaggctgtctccaggcccaccataccggcggctcccttttccttttcctcggcggtatggggtgcgtggtcggtgccgatgcaggtcacagtgccgtccctgatggcttcgatcagggcggtgacatcgtcggccttacggatgggcgggttgaccttgtactgcaggcggctgtcatcgaaccagaggtgatggggcgtgacctcgcagctgacacgggcgcctttcaggcggctcatgcggatggcgtcgatggattccttggtggagacgtggcacatgtgcaggcgggtgccgtagtactcggccaggtggcagttgcgcacggtctcgatattctcggccaggcggtagtcccaggggctgatctcccggtcctcggcgtgggacatgacggtcaggccgcgctcggtggcgatggcaaagacccgcgccataacggcgttgttcatcacgccgttgccgtcctcggtgatgaacttgatgtcctccggcagggtaagcagatgatcgatgctcttaccgtcaaagtccctggtgatggagacggtctgattggcatcgcacaggccgatgcgcttggcctcggcctccaccgcgtgggcgatctccggcgtggagcagacgggcttggtgttgggcatcaggttcacaaaggtgtaaccgcctgccgctgcggccgccgagccggtggcgatgtcctctttatattcaaagcctggggtgcgccagtggcagtgggtatcgatgaaagcgggcaggatggtgcggcctttggcatccagcacatcctcgccctcgggcaccacaaggccctggccgatggctgcgatcttgtcgccgcgcagccatacctcgatgggtttgccggcggtgtcttttgcgttgcggatcagcatgttatacctccctgggtgtgtatttgggcaaaaaaaaacttttcccaaaaatgggaaaagtcaaaaagtcacaccatgcacagcggcgggaaaggacgctgcgccgttaatcttaaagtttgcaaaaccgctcatcaacatgcagacgtactccttccccacgtattacataattttacttattgtaccatgccccggcggtggtgtcaatgcaatgggggtttttgggcagttagggattttatagagttttggggcaacttttggacattttgacaaaatg

SEQ ID NO: 7992 - DNA, 242 bp, Unknown
  gut microbiota DNA sequence
gccgggtggatacagattgacggaaccaacatcaactacccggtcatgcagtcaaagcaggacccagacttttacctaaagcacaactttgaaaaagccgactccccgcacggctgcccgtatgtgcaggcaaactgcgacctgcaaacgccatctgacaacatccttgtgtatggacacaacatgaaggacggcactatgttctcggatttactgcaatacaagcgcgaatccttttggga

SEQ ID NO: 7993 - DNA, 328 bp, Unknown
  gut microbiota DNA sequence
aacggcgattacctgattccggacatccagttgtcggtgcaggaacagaagcccctgggcaagtacgggaggatgcgcagagcgtttctgcaggagaacaacacgctgctgtacaatcacctgatcctgaccgagaagctgtacccgcacctgtgggagattcaggagaccgcgaccgcacggatggagcagatgatggcggatcttctgaaagcgaatccggcaccggacaagaaattgaaccagatggcctgggtgcagcacatgaacatgctgaaagcgcaggcagaggaagtcattctgacggaacttatcaacagttaaactt

SEQ ID NO: 7994 - DNA, 3927 bp, Unknown
  gut microbiota DNA sequence
agcagttcttggccaggatggtgatgccgcgctcgcgctcgatatcgccggagtccatgacacgctcggcgacctgctggttggcgcggaaagcaccggactgcttcagcatctggtcgaccagggtggttttgccgtggtcaacgtgggcgatgatcgcgacattgcgtaaattttcctgaatcatatacgttccctctctgattggtttgcgattgaatgcctatctatagggggataaaccccaatatccacatacttatctataatacgctatcatgtagtatttgtcaagaatcgcaaattataaaatagtatgctataatataaaatgttggatagtaattgaaagggattttgtacattccgtggggaaggacgcagtttcccaaaaaacaagacaagagagggaaagaacacatggcgacaaaaccgatgcgccgcatcaacatcatcggacaccagaaccccgataccgactcgatctgctcggcccttgcctatgcctggctgaaaaaccgcggcagcctggaaggcctgtacgaagcccgccgcgccgggcatatcaaccgcgagactcgctttgttttgcagcatttcggcgtggagccgccgcgcctgtgcactgatgtcagcccccagatcaaagacattgacatccgcaaacaggcgggcattgacggcgaaatgagcgtgcgcgccgcctggaacctgatgcgcgatgtcgagatcgacaccctgtgcatcgtggataacgagggcgagctgcaggggcttatcaccatcaaggacattgccgatgccaacatggacctgtttgacactgccgtactggccgccgccagcacccgctactccaatcttttggaaacgctggaggctgagctggtagtaggcaacgccgacacccgcatcgacagcggcaacatctgcatcggcaccagtcccgaaatcatggaggagctggtcaagcccgacgatttagtcctggtctccaaccggtacgaggcgcagatgtgcgccatcgactgcggtgcccgggccatcatcgtctgctgcggctcggcagtgccccgcaccatcgtggcccgcgcccaggagaagggctgcgccatcctggccaccccctacgacacctacgctgccgcgcggctcatctccaccgccgcgccggtgcgccactttatgcgcactaaggagcttctgaaattcagcgtaaacacgcccattgaggacgcccgcaaggtcatggccagcgtgcgccaccgctacttcccgattctggacgagaacggcaagtactgcggcgtggtcagccgccgtaacctgttgaacctgcaccgcaagcagctgattctggtggaccacaacgaacgccagcaggctgtggacggcctggaagaagccgatattctggagatcattgaccatcaccgcatcggcaatttggagactaccgggccggtctacttccgcaatgtgccggtgggctgcacagccaccattttgtaccagatgttcggcgagcagggcatgaccccctcgaaagagatcgcgggcctgctgctgtcggccattttgtccgacacgctgatgttccgctcccccacctcgaccccgcaggatgaggccgctgccaaggcgctggccgcgctggcgggcgaggacattcccacctacgctgagcagatgtttgaagcgggcgccgacctgaccggccgcgacgccgaggatgtgttctgctccgacttcaaggtgttcagccgcggcgacgccaagtttggcgtggggcagtccatctacatgacggacaaatcccgtgccgccgccgaggcgctggtagggccgttcctgcccgaggccagccgccgtgagggcctgccgatgatcttctacatgttcaccgacatgaagacccagagcaccgatctgatgtactgcggcaacgctgccgaacagatcgtgcgcgaggcgttccatgtagagccgaaggacggcaaggcctggctgccgggggtcgtcagccgtaaaaagcagttgatcccgccgctgctggccgcactgcaggcgcatcaggagtaacacacatttaaaaggctccctctgcgagacagactcccccgatacgggggaggtggcacttcgtgccagagggggagcgctgtcagcgaagctgactgagggagagacagtatctttagctgctgccaaatcgcaggctctctcccccacccgcttcgcgggagcctcctcccagagggggccgcacctaaaagtaaatgcccgttgcacaaacaccgtgcaacgggcattctttattggtaatttacagcttttccagcgcggcctttacgcggacgatggtttcttccttgcccatcatagcggccaggtcggtgccgccgccgggggtacgggctttgccggacagggcaatgcccagcgggaagagcagccagccgttctttttctccatctgctcggccagggtcttgcaggcctcaaagatggcgtcgcggttccaatcggcctgggcttccagcaccggcagcagggcggccagagcctccttggcggattccggcgtggtcttctgctttttgttgcggtacatctcggcgtcgatgggcagcacggcgtcgaagaaatccagctgcggcgggatgtcctccagcacttcacagcggggctgcaggttggcgcacagcaggtcacggtcaatgtcgcggtgcacagcacggtcgatgaacggatcggccaggcggcggaactcctcggccggcagggcgcggatgtaggcggcgttgatggcacgcagcttaagcgggtcaaagatggcgggggacttggaaatgcgggcagggtcccaaatcttgatcatttcctcaagagagaaaatttcctgctcgccctcgggggcccagcccagcagcagcagatagttcagcacagcggcaggcaggtagcctttggccaccaggtcctgatagctggcgtcgccgttgcgcttggacagcttattctgggcgtccttcataaccggcgggcagtggacgtagatgggcttttcccagccgaaagcctcgtacagcaggttgtacttgggggtagaggacagatactcgctgccgcggatgacgtgggtaatgcccatcaggtggtcatccaccacgttggcgaagttgtaggtgggcatgccgtcggtcttaatcaaaatctggtcgtccagttccttgacgtcgacctcgatatggccgtagaccacatcgtcgaaaccggccacgccggattcagggatcttctggcggatgacgtaaggctcaccggcggccagcttggcgtcgatctcctcctgagtcaggtggcggcagtggccgtcgtagtgggtcatctcaccggcggcgcgctgggcctcgtgcatctcgttcaggcgatcctcggtgcagaagcagtagtaagccttgccctccttgacgagctgctcggcatactgtttgaacatgcccatgcgctggctctgcacgtaggggccgacggggccgccgatgtcggggccttcgtcccaggtcaggccggtggcgcgcagcgtgccgtagatgatgtcggtagcaccctcgaccaggcggccctggtcggtatcctcgatacgcagaatgaacgtaccatcgttatggcgtgcctgcaggtaagtgtacagtgcggtgcgcaggttgccgacgtgcatatagcctgtgggcgacggcgcaaaccgggtacgaacgttagacatggtgaaaacccctttattttaaattagtatcccgtaaattgcaggggccggtgcttgcatcgaccctacaaacatgttcttgttctcaaacgacttcattataaagcgaagacaaatcgctgtcaaccttacacaagatacggctcaaaccgatgcag

SEQ ID NO: 7995 - DNA, 1463 bp, Unknown
  gut microbiota DNA sequence
ggaattgtgcggtgttgcccaaagaaactttcaatatgtttcctgaaaaagcaacgattataaagcaacgattattttaaggagttaccaatggtcaaagcagtcatttttgatatggacggcctgatgtttgataccgagcgcctgtgggataccctgtgggagcctgcctgtaaggagctgggcctgcccctgcccccggatatggccaagttccaggcgggcggccgcggcctggcgggcgataacctgcgccgccacgtggcccagtatatccccggcgacccgcaaaaggtgctggacaaggtctggcagctggccgacgagcgctttgcccagggcgtgccctgcaagcccggcctgaaagagctgctttctacgctggaagacctgggcatgccccgcatcgtggccagctccagcccccgcaatatgattgagatgaacctgcagacttccggcaccgcccgctatttccatgatgtcgtttccggcaccgaggtcgcccgcagcaagcctgcacccgatacctttctgctggcggccgaaaaactgcacaccaaccccaaggattgcctggtgctggaggacagcttcaacggcgtgcgcgccggccgcgctgccggctgcgtgaccgtgatggtccccgacctcatgcagcccaccgacgagatcagggccttgtacacctgctgctgcaaggacctgctggaagtccgcgacctgctgctggccggcaagctgtaaccttataataagaaagcccccggcgggtggaagattccacgcccgccgggggctgttttgtggttgcttacagggccgtgcccttcttggggataaacaggcggctcatatccgcgtgttccagttccagcagcttgatttttttatcaattcctccggcgtacccggtcaggctgccgttggtgcccaccacgcggtggcagggaatgatgatagacactttgttgtgccccacggccccgcccaccgcctgggcggaacccctgccgccctgctgtgccgccagctggcgggcaatgtcaccgtaggtgataatctgcccgtaggggattgtcagcaagattttccacaccgattgttgaaaacttgacccgaccgggtgcagcggtggcaggaagtcgggctccttgccggcaaaatagatgtccagccagcgcttggcctcagccagaatgggcgtggtctgggcacagtgtccgacgggcagggtgttggcaaaatatttctgcccctcaaaccacagccccaccagcccgacctcgtctgctgccagcaaaatcccgcccagtggggactggtattgttggatagaaaccatagcggacacctcacagggatagcggctgtgccgctttttttgccataagggcataaaacaaaaaaggcaacttaccattcagtaagttgccttgtctctatgttacgaaaaggatacc

SEQ ID NO: 7996 - DNA, 23942 bp, Unknown
  gut microbiota DNA sequence
gtgagcctttgcactaaaaactactattcaagtaatcaggtataaaactactattcaagtaatcaggtatataaggaaaccctgcaactactttcccggcagagggagcccagcttgtcgaaaaactgcactttcctttgcagcacacgtaggggcgcgcactgctcgcccctatttagcatgttcttccagccaccgctgcatctcggctttcatcccggcaaaagccttcgcggtgtccgggttctcggtcttgaaatccagcagcttccacagccagccttgctcggctacggcgcgcaggctttcggggtagcacagctcaaatacaaacgaagcatgccccacagcgttatcggcagggtagtggttcagggtgcgcagtacgcagtggtgctcgtaaaaggcgtccagcacggcaggggagaccgggctttgccgcagcgcttcggtgctgacgttataaatttgctccatcggcgtttccacgttcacccgcaggatgtcaattttgtccgcgtcccgcaagatctggcagaacatccgggtgcggtcgtccatctcctccggcaggcggtaggcgttgtgcaggcggatggcggtgcgcagcagcgcgtcctcgtcggtgccggcgatgtagtcccgcaggcggccctcctcaaacagcacggtcacgctcatcagggcgtggtcgatggacttagcgtcgataaacgtgccgtagcggcgcagctgctcgaaccggcccacatcatgcaaaaggccgcacagccaggccaaatcgacatcctgcgggggcagggaaaggctgttggcgatgcgctcacacagggcggccacgcggtaggtgtggtcgatcttcagcttcactttcgggtcggcggcgttgtaatgggatgtatattcggcaaatgcctgccgggcatggggccggtcaagcgtcataaaaatcacctctggtctattgtagcacatggggcgcggggtgcaaagcacattccgcacaatatttttccaacttttacggcacatttcgtgcaaaaagtcgtaaaaaaccttgacaaatcgccccaaaacgactattctttaactatacaaatacgccggaaggtggtgtgcgcaatgaacgctaagggagatgccaaccgaagtgtgcgccaaaccaagcaacgactgtacgaagccctgatccatctgctgcagcaaaaaagcctgcgggagatcacagtgcgggaactgaccgagcttgccgggatcagccgcggcaccttttatttccactatgccgatatttacgccctgatggaacagatggagtctgtccaattggcgcggctggaaagcctgatggataacctgatccccaacatcagccgggaggatgttccccccgcgctgaccgcgcttttcagctacatgaacgacaaccccgaagtctgccatgccttctacggcaaaaactgggagtcggactttacccgcaacgccaaggagctgatcgcccgccgctgcttagggcagctgcaggccaacggcggcggcacccagcgccagcaatatctgctggcctttgcggtaaacggctgctttggcagcatcgtagcctggcaggatgccggctgccagcccccgccggaggaaatggccgccatcacctggcaggccatccgcgcggtgaaggtgttgttgtgacaaggcagatacaaaaaggctccccttgagggaaaccatttaaacagccgcaaattcccgttgcttttcgcatccaattgcggtatactttaaacaaaccgttccccactttgcgggacattgtaaaggagaatatctgagatgggattttttgattttctgaaaaagtctgctgaacccgctgcccccgctgccccggctttcccgctggtgctggctgccgatgccaagggcgccgtggtgccgatggagcagatccccgatgaggtttttgcacagggcatcctgggccagtgctgcggcattgaccccaccgagggcaaggtctacgcccccatcgacggcgagatcacccaggccccggacagcggccacgcactgggcatccagggcatcggcgatgtcgaggtgctgatccacgtcggcgtggataccgtcgagatgaagggcgacggcttcagccccaaagtcaaggtgggcgataagatcaagaagggcgacctgctgctggagatggatcttaccaagatcgccgctgccggccaccccgctgtggtcatcaccgtcatcaccaacaccgacgactttgccggtgtcgaggtcgttgcttccggcaccgtcgaacccggcgcagacctcatcaagatcagcaaataaacctgcttatccccgggcgtaccttgcggtgcgcccctttttttgttacaataggcagtagaatctttataataaaaggaagtaccaatatgagtgcaattttagccgtctgcggcgatgccttctgcgccatggtcagcgatggccgctatgtcgaggaacccatcaccggcgataagccccacatcatcagcgacgaactgcctaaggtccgcaaggtgaaccgcaatgtgctggtgggctttgcgggcgacaccctggccgccgtgcagatcatcaacgcgctggaccagtacgacgtgcgttacctcacgctggaaaaggtcgtcaagatcctgtgcgagaaagcccccgccgtgaccacccagcccgtgggcgtgcgcctgctggtgggtggccgcaaccgcaagggccagtttgtgctgaccaccttcggcaccgccgacaactaccagcctgacacccagcccgcccggcagggtgcctacctcatcgagggtgccgcctcccacaccgagatcgcgccctggctggaacgtgaggtcaagcccgacgcccccaactggcgcagcctggacgatgtagcccacacgctggacgcctgcattgccaagatggccgaggatgacaagagcattaacacccactacttccgccagctggtgatgtaagcggggcaggggagtgccttgcgttcctgcgtggcccttggtataatgattttgtaagctttgccctttgcaagaaaggaactgtaaaatgaaaatcgcattgatcatggaaaacagccaggccgccaagagcgccctggtggaatccaccctgcgcaaggtcgtggaaccgatgggccacgaggtcgtcaactacggcatgtacgccgccgatgacgctgcccagctgacctacgtgcagaacggcatcctggccgctgtgctgctgaattccggcgcagccgactacgtcatcaccggctgcggtaccggcgagggtgccatgctggcactgaacagctttcccggcgtggtctgcggccatgtcgaggaccccgtggacgcctacacctttgcccacgtcaacgacggcaacgccgtggccctgccctttgccaagggcttcggctggggcggcgagctgaacctggagtacaccttcgagaagctgttcggcttcggccacggccagggctaccccaaggagcgcgtggagcctgagcagcgcaacaagaagatcctggacggcgtgcgcgctattgccttccgcgacctgaacgacatcctgaaagacctgccccgcgacctggtcaagggtgccctctccggcgagcactttgccgagtatttcttccccgcctgcaaggatgaaaagctggctgccaccgtgaaggaactgctggcataaagttttcgggtggacacagaatccgcccctgcggccgcaaacgccacgctctgtaggggcgaccgatggtcgcctgcagactgtgcagcaacgcaaaccccacgggcgagcactgctcgcccttacatcctctgcaacaattccccatgtgcctacaatttctgcgggcacatatttttttgcaaaacagcgaaatttaccgttgactaacaggggttaaaatggtattctaattacaggtgtgaagtgtcgcacttcgccaaaaaatcatacacaagtgaggtggttgtctcaatggatacccccagtcccagtcctgtgaaccgatgtatttccaataaggcagccatcatatttttcactttgggtaagtctgaccgcgtgcgggtgtagcatgggggctggctttgcgttgctatgctttgcccataaaactaaaatgtgtacggctgccgcctgaaaaggaggcagctttttatgtctgataccacgatcgcaaccctgcgcgccatgctggccaacctggacgatgccaaaaagtaccagagcctgcgggacgttatgtccaccctgcccgcccctgacctggccgccgtgttcgaggacctgccgccggagaagatgccggtgctgttccgcctgtgtcccaaggacctggcagctgaaatttttgccgagctgacgcccgaaagccagcagaacctcatcgacggtctgaccgataaagagttgaaggccgttgtggatgacctgttcgttgacgatgcgacggatcttgtcgaggagatgcctgccaacgtggtcaagcgtatcctggcccaggccgaccctgcgacccgccgcatgatcaacgaattgctcaagtaccccgaggattccgccggcggcgtgatgactaccgagctgatggagctgcgcccggacatgaccgtgtccgaagccatggaatccatccgcaaaaacggcgtggacaaggagaccatcaacaactgctacgtcaccgaccgtgaccgtaccctcatcggcgttgtctcgctgcgggcactgatcctggccaaagaccccgccaacgagaagatccgcgacatgatggacgccaatgtggtcagcgtcagcaccaccactgaccaggaggatgtctcccagctgttcgagaagtacggctacctggccatccccgttgtggataacgagaagcgcctggtcggtatcgtcaccatcgatgacgctatctccatcatgcaggacgaggccagcgaagatatcgccaagatgaacgctatcggcccgtccgacaagccttactttaaacaatccatgtgggatctgtacaagagccgtgccccgtggctgctcttcctgatgatctcctccaccttctccagcctggtcatccgcgggtacgaggacgctctcgccgccgtgaccgtgctgaccgcctacatccccatgctgaccgatgccggcggtaatgcgggcagccagagcacctccaccatcatccgtggtatggccgtcggcgacatcgagccccacgacctgcccaagattttgtggcgagagttccgcatcgccattctctgcggcggcacactggccctgtgcaactttgccaagctgatcgtgttcgaccgcatcgccgccccggtggccgctgtcgtctgcctgacgctgatctgcaccgtcatcctgtcccagctcatcggcggcctgctgcccgtcatcgccgagaagttgaaggtcgaccctgccgttatggcgtcgccacttatcaccaccatcgtggataccaccacgctgctggtctacttcaacatcgcccgcaccctgctgaaaatttaaaagtaaagattgaacatcgtgttcaattatgtgcttgtaccacgcccccgggtgtggtacaattttttataaggcaataccgcataattctaagtgccgatacggcgagcgaggtgcggcagctgctaagccaaaagcgcagataatactttgtgtattatcgagcattttggcaacgcaggtgccgtgccgcagccgccggagcggtgcttaagccgtaaggcgggaattgtgcggtgttgccataagaacaacttccttcggccccctctggcacttcatgccaccttccccgtatcgggagagtctgtctcgcagagggaggcttttcgacattcctctgcgtctatcaaaatcgaggttttccctatgaatatgcaggatttttacaccgggcacgcctttgatgcttacgagttctttggcgcccacacctactttgggggcacccattttgcggtctgggcaccgtccgcccagcacattgcggtggagaccgaggtcggcacctatgacatgcaccgcacccagtccgccgtttgggagtgcgatgtccccggtgccaatgcgggcatggtctaccagtattgggtgcgcggtgccaacggtcagaccgtggcccactgcgacccttacggcaccgccatgaccctgcgccccgacggccgcagcatcattgccgaccgccccaccggcttcaccgatgacaagtggatggccggccgcacgaaatgcttcgataagccgctgaatatctacgaagtccacgccggcagctggcggcagaaagaggacggcagctggtacacctacgccgagctggccgagttgctgcctgcctactgcaaggagaacggctttacccacatcgagctgatgcctctggccgagcatccctttgacggcagctggggctaccagatcaccggcttttacgcccccaccagccgctacggcaccccgcagcagctggccgagttcgtcaacgcctgccataaagagggcatcggcgtcattttggactttgtgccggtacactttgcgatcgacagctacggcttgaaagaatttgacggcaccccgctgtacgagtaccccgccgcagccgtgggccaaagcgagtggggcagctgcaacttcatgcactcccgcggcgagatccgctgctttatccagtcctgcgccgactactggctgcaggtgttccacgttgacggcctgcgcatggacgcagtctcccgcctgatctactggcagggtgaccccaaccgcggcgtcaacggttcgacgctggaatttttgaagggcatgaaccagggcctgcagcaacgccaccccaccgccctgctgattgccgaagactccaccaactatcccaaagtcaccgctcccgtggagtacggcggcctgggctttgactacaagtgggacctgggctggatgaacgacaccctggactactttaaaaagacatccgaggagcgcaaagagaatctgggcaagctgaccttctcgatgatgtacgcctggaacgagcattacattttgcccttcagccacgacgagaacgtccacggcaaggccaccatcgtacagaaaatgtacggcgactacgagggcaagttcccccaggcgcgggcgctgtacctgtacatggccatccaccccggcaaaaagctggactttatgggcaatgaattcgcccagctgcgggagtttgacgagagccgcgagcaggattggatggtgctggattaccccaaccataacgatttccgccgcttccgccaggcgttgaacagggcctactgcgcagaggatgccttctggcggcgggagtacgacccctccgccttccaatggctggattgctcccaccccgagctggatgcctgcgccattctccggcaggggagcgaggcggctgtgctggcggcattcaacttcggcgatacggagctggaggattacactctcacgctgcctgttgccggcaaactgaccctgctgctggacaccgattgggagaccttcggcggcagcaccgccgcccccaagcgcagctgtgcccgcaagaccgacggcgagctgaagctgactctgccgcccttcagtggcaggttgtatcgtctggagcaggcctgattatactaatcgtttgcaaatacaatttgtataaatacgtactgtataacatttctttttgtacacagaaaaaggccaccgcaggcgcggtggtcttttacgttattgcgttaagttttacataggtgcgatgtcgaaccgatagatcgtggtggagctgtacggggcatccggcagcagggtcgtatcggggaaatcgggatggttcggggcgtcggggaaatcctcggtctcgaagcagacggcatcgcgggcttcgtagcgggcatcatccttgcaggctgtctggggtgcaagatagttggcggtgtacaagtgcatgccgggcagggtggtcagcacctccatgcgaatgccggtctcggggccggtagcccaggcggcgtggcgcaggccgttgtcccggatgatgtagcactggtcgtagcctttggcctgcaccagagcagggtagtcggcgttgatgtcccggccgggggtcttttcctcggtaaagtccatcggggtgcccttgaccggcagtttacggccggtgggcacgctgttctcgtcagcttccagataggcgtcggcgtccacgctgatgcggtggcccagggccgagccgctgccgtggccgttgaggttaaagtagctgtggttggtcatgttgcagacagtgggggcatcggtggtggcgctgtaacggatcatcaggccctctttcaccaggctgtattggatctccaaatcaaagttgccggggaatccgtcggtgccggcaggactgtgggcagtcatcgtcacgctgtcggtctcaccgcgggtgacctcggcagtgaacagggcgtggttgaagccgtgcagaccactgtgcaggcagttgcccgcgctgttgggcgttacatggacgatctcctcatacaggggaaactgcgcgccgccaatgcggttggcaaagcggcccacggcagcgcccatgctgtcggtgttcagttcgtaatcccgggcggtggggtagcccagcaccacgtcggtggggctgcccttgcggtccggcacaatgatgcggtggatgatggccgcataggtcaacagctgcacctcgatcttatcgtttttcagggtgaccagctgcaccggctggccggtagtcagtttgccgaaatcagtgatagaaacagacatggaaaactcctttccttgggtgttgtccttatttgttctcgtcctcttggctcttctgctccagatcgtgcttgacgctggcggccacgctgccggtgccgtagttcagcatacggttcacgcggctgacggtggcgctggacgcaccggtttcgcggcggatctcgctgtagaccttgccctgcagcaggcagcctgccacggcatagcgctgctccatagtgcgcagctcggtcacagcgcacaggtcgtcaaaaaagcggatgcactcgtccaggttttccagccggaggatggcttcatacaaatcggtgcagcgttcgttttgttggttcatgtcagggcgcataggcgcctcctttatttgttcattttgttttgcacagatgtgcatcattatttatattttagcaaatctgcccaaataagtcaacactttagcgcattaaattatcttttaaattatctttgcccttgcacccaaagcaaaagggcggtattataataggtaagttcaactcttgcaggggccgatggcaaatatcggctcgcgggagcacactgtacgcccctgcagccttgctattaaccaatcgtttttataaggagacttttatgccttttgccttactgcttttttaccgtgtgctgggtatcctgctgtgggtgctggtgcttttgatgctttgggagaaataccgcatcgtgcgcggcggcacgttgctgcccgcccagattttggattgctgcaagtccagccagagcgatacccccgcacagccgtcccgccgcgatgccctcatcaatccccgcgtgggtgcgggcggatactgctaccgggtagtatttaccgcaaacggccagcggatggagcgccacaccaacgactccttctggttccaccacgacggccagcagggcaagaccgtgctggtgtggtacaatccggcttccccggtggtggagcgcaaaagctgggagaccgaggttttggccgccgccatgggtgtgctggccacggcactgctgctgattcgttgagataatcgacagaaaatgttaattttgtcttaaaaacagtcgaaatttgaacacttgtacttggtaatggctgagtgttgtggtataatacccatcgttccgcctaaaaaaggaacacaacatggaaatcttgctttattttgttctggtgctggcgctggtaggtgatgttctgctggccatcttactggtgcgcagcagccgcccgcagaagccccaggggcctaccgccgatgacgttgtcaacgcgatgaccccggtattgcagggcgagaccgacctgctggctgaacagctgcgggcgatgcagggcgagagcgcccgcaccaccaccgccacgctgcgggatttttccgccgtgttggccgagaaccagcgccagaacgccgccgccagcaccgcccggctggagtccatcgaccgcgccggggctgcccgccagaaggccgccaacgatgcgctgattgcccagcttacgatgatggagacccgcctgaagaaccttgaggactccaacgctgcccgcttggacggcgtgcgcggggcgctggtgcaagggctgaacaccatccgggccgacaacaaccaaaagctggacgagatccgcggcacggtcgaggaaaaattgcaggacaccctgcaaaagcgcatcaacgagtctttccgcgccgtcagcacccagctggagcaggtctacaagggcctgggcgagatgcagaacctcgccgccgatgtgggcagcctgaagcaggtgctttccggcgtaaagacccgcggcattttgggcgaggtacagctgggcgcgatcctggaacagattttggcccccggtcagtatgccgagaacgtggccactgtgcccggcagcgccaaccgcgtagagtttgccatcaagatgccggggcagaacggcaacatttggctgcccatcgacgccaagttccccggtgacacctacgcccacctgcaggcggctttggagcgcggcgacgctgccgcggcggccgccatgcgcaaggcactgcagtcggtgctgcggcaggaggccaaggacattcacgataagtacatcgaggtgccctacaccaccagcttcggcatcctgtttctgccctttgaggggctgtatgccgaggtggtttccagcggaatcacggaagttttgcagcgggattatcaaatcacggtagcaggcccgtccaccatggcggcactgctgaacgctttgcagatgggcttccgcacgctggcgatccaaaagcgttccggcgaggtgtggacgattttgggcgctgtcaagacagaatttgagaagttcggcgtcggcttacagcagatgcagcgccacctgaaccagaccggctccgacctggaggagctgatcggcccgcgcagccgcgccatcacccgcaagctggaatcggtgcagcagttagaccccgatgccgccgccgatctgctgggcattgaagaaaagagtttttccgtatagggaagtatgagaaaggaatccgactatgatccgtatcgtcactgactcggcggccgatttgaccgcccgcgacctggagacccccggcgtgaccgttgtgcccatgggcatcacctttgccgatggcaccgccaccgtggatgacggcagcatgaccaaggacgagttcttcacccgcctggccgaggacagcaagctgccccgcaccagccagcccagcccggcttcgtttatcgagctgtttgaggaagctgccgatgcaggggatgaggtcattgtcatcactgtcgcgcaaaagctttccggcacctaccagtgcgccagcctggccgccgccgagaccgacgccaaagtctacatcatcgactccgagaccgctacccagggcgaggccatcatcgtgcgtgaggccatccgcctgcgggagcaggggctttccgcctcccgcattgcggccgagctggagacctttaaaaagcgggtgcgggtcgttgccatcgtggacagcctgaagcacctgcaaaagggtggccgcctgcctgccgccgtggctatcgtgggcggtgcactgggcatcaaaccggtgctggcgctgttcgacggtgcgatccatctggtagacaaaggccgcggccgtcccggtgcgctggtagccatgtaccgccagttggacaagcagggcggcgtggacccggcctacggctacacgctggtgtacagcgacgataagcagcttaccgccccggtgcaccactatctgcaccaaaacctgcacctgaccggcgggcgcgtggggcagatcggccccaccatcggcacccacatcggccccggcgcggtgggcgtggcctttgtcatcccggaataaccgctttgcaccaataaaaacagcaagtccccggcagagaggccgcagcctcttgccgggggctttttgcgtgggttacagcgggccttcgcccaggctggggtcggtgggcagcagcgacgggtcaaacggcatatccgtatcgctgttgatgcggcgcttcgggtcctgctcgtaggcagtttcgggcacctcgctcaggtcagtccaaagttcctcggtttcttcctcggctccatgggggccaaacggttcgtgcagcataaaacagacctcctttttgtatagcgccgggcagtgccgcccagactataagggaagtttctcacagtgaggtgggttttatgcgttcacgcgccggatttttttggtgcagcctgtggctgaccctgctgcttttgctgccgctgatccttgtggtgggctttttggcccggcagcggcagacccagcaggaattgcggcaggccgccgccaaccagagccagctgcaaatcgagccgggtgcccaaagcgtgtggcgtatgctgctggtggtgcagaaagaggagccggcctttgtgctggtgcgggcggacggcccggcccacagcgtgaccttctgtgccctgccggggcagctgctggtcaacgcaccggctggcactaccacactggcggaatgtacgctttcggctggggcggggcgggccgctcaactgctgagggctgcgctttccaccggcgagaccgccctaccgccgctgtactacctggcggccacgccctcctgctgggtggattgcgtgggcagcggcacggcggtgcggtttgatacgtcctcgctgctgcagcccgctgcacggctggcgctgggctacggcaaggaggcggtgcaggctgtcagtgccaccgacgcggtggagttgatcgccgacctgcaaagccagatgagcgagacgaccgccgccaatgcccgcgccgccgtctgggccgcttttgtgcggcagaaccccgaccggctgaccgccgtgcccgatgcctggcgcaaatacagtgcccggacgctgactgattttaccgccacggatttgctcagggcaggggagacgctggcctacctgcaaaagcaggccgcactgacggtggattatgttaccgtcgccgtggttgatgcaccgggcggggaagcgttgacagaggatgggctgcaggtggtggagagtttgctgcaataaaaatagctcctgcccggagtggggtaggagctatttctatgctgtacgggcggattctatatccgcccgcaaacccgtgccgttacagatacttcacacccaaaatggccacgcccaaaatcaccagcactacgccggtggcgcggttgagggtggttggttcggccttattggcaaacttagccgcgatgcgcgcccacagcagggtgctgagcacacagcataccaggcagaacaggtccggcgcaccgccaatggcaaagtggctgaccgcacccgtcagggccgtaaaggtcatgataaacacgctggtgcccacggcggtcttcagctcgtaccccagcaccgaggtgagcaggagcagcatcatcatgccgccgcctgcgccgataaagccgcagataaaacccacgcccatgccgcagaccagcgactgcaccagccgcttctgggcgctgacgccctgcatggcctccttggtggtcatgacaggccgcacgatgaacttgacgcccagcagcatcgtcataaacaccgagaagctgcccatggtcgcgccgggcaccttgctggctacaaagctgcccaccatcgtaaacaccagcacggcggccatcatcacagcgccgtttttcacatccaagttgccgtttttcttgtaggtataggccgagacggcgcttgccagcacgtcgcttgccagggcgatgcccacggccatgtaggggtccatccccaaaaaggtgatgagtatcgggctgatgacggcggcggcgctcatgcccgcaaagccggtgcccaagcccgcgccgataccggcgataaagcaaacgataaatgccacaagataggtcatagtgtttctcctttttctgcaaggcggcggcagagggtggcatccatgcgggccatatagtcctgcatggcctgcgcctcggcgggggtcaggtcggcggtcacggcggcggtggcggcctgctggatggcgtgaagctcctgtaccagcggtgcggcagcgtcggtaaagcccagcatccgctggcggcggttatcggcggccgggcttaccgtcagcaggcccatggtgcgcagatgctccaccgccttggacacattggacttagccagcccgcggtagcggcagatgtcgctggcagtgcggcaatccgggttgttatgcaggaacagcaggatgtcgatctccagctggttcagcccatggcggaccgcggcggattcaaactgggatgtatagaactttttatagtgctgtacaaaggccagtaccgggatcaagtggctcacctcacagagtgtttgttttagaacggttataattataaccgttaagttggagattgtcaaggtgttataaggcaaggcttgcgggttcgcccctacataacgccatccttacgcaaaaaggccctccgcccctgagataggggagagggccttacctatggtttgtttactgctcgcggaagcgggagaggaactcgatggtgcgggggttctggggatgctcaaagatgtcggcgggggtgccttcctcgcagatgacaccgtcagccatgtagaccacatggctggaaacatcgcgggcgaaggccatctcgtgggtgacgacgatcatggtcaggccctccttggccagctggcgcataacgctcagcacttcacccaccatctgggggtccagggcggaggtaggctcgtcaaacagcagcacttctggctgcatggacagcgcacgggcgatggccacgcgctgcttctggccgccggaaagctggcggggcttggcgttgacgtagggggccatgcccaccttttccaggttgctcagggccgtcttgcgggcggtctccttgtcctggtgcagcacatagcgcaggccggcggtgcagttgtccagcacggtcatgttgttgaagaggttgaagctctggaacaccatgcccaccttggcgcggtaggcgcaggggtcagagcctttggccgtgatgtcctgcccatggaacagcacgctgccgtgggtgggggtctccagcaggttgatgcagcgcagcagcgtggattttccgctgccggaggcgccgatcacgcaggtaacatcgccgtggttgacggtaaagtcaacatcgcgcagcaccacgtgggtgccaaagcttttggagaggtggcgcacctcaatgatgggttcagacatgggatgcctctcctttcatatccagattctgggacttgtggtccgggtccggggcgttgtacatgccgctggtgtaggccagggtatcggtggtgttcaggtcgtagttctgggggccgtccagggccttctcccaggcacgcagcaggtagctggccagcagcgtcatcgacaggtagatgatcatgacgataacggcgctttcaaagtaggtgtacagcgcgccgaccacgctcttgtgcacaaagaacaggtcggtgatggagatgaccgacagcaccgaggtatccttgatgttgatgatgaagttgttgccgatctggggcacgatgttgcgcagggcctggggcaggatgacatgcagcatcgtctgccagtggttcatgccgatagccatggcaccctcggtctggcctgggtcgatggagacgatgccgccgcggaccgtctcggccatgtaagcaccggtgttgatggatacgatgaagaaaccggccgtccacatgcccattttaatgccgaacacctgcagcaggccgtagtagatgaaaacggcctgcacgatcatgggcgtgccgcggaacagctcaacatagcagcgcagcactacccgcaggatgcgcagcagcacccgcttccaggcggggtcgcgctgtttatcgatggggatcgtctgcaaagcgcccacggcgaaaccgatcaggcagccaaagaatgtgccgaccagtgccagcagcagggtagtgcctgcgccgcgcagatacgaaaagccgtatttctgcaacacattggcgcagtttgtcaaaaagtcttgcatggggattctcctttattcttcatgcaccgtaggggtagaaccgccgaaacccctgccgccgaaaaaagcggcaggggtatggatggcggggattacttgctcagaggttgtacgctgatggcttcgcccatcatggtgttgtagtcgtcagcggtcatggttgccagcacttcgttgatggcatccttcagggcggtgttgcccttcttcatggaaataccgatgttgatgtcctcatcgctgacctggaagtcgttgtcgccgccgccgaagtccagcagggtgaagtcaggataagcaaccagggccgcctggccggtgggacggtcggtgacgacgatgtcgcaggcgccgctgctcagggccaccagcatggagggggcagtttcctgggcgggcaggatgttggcatcgggaatctgggacaggcagttatcataccagatggtgcccagctggctggtagcggtggcaccggccagatcggccacgctggcggcggaagcatactggctgtccttcttggtcagggtgatgatggaagcgtagtagtacgggtcagagaagtcgacctgggcagcgcgctcagcggtgatggactgaccggcgatgacgcagtccacatcgccgctcatgacggcggggatcaggctgtcccagtccagcttgacaatctggacgttctggcccagggcgtcggcaatctttttggccatcataacgtcgtagccgtaggcgtagtcgctggagccgcggatggcaacagcgccgttggagtcatcgctctgggtccagttgtagggggcgtaagcgcactccatggcaacggtcagggtcgtggggtcgccgtcaccatcgggggcatcggcggcagcctcagcggcggcctcgccggaagcggtggaatcagcggcgctctcggccgcggtagagccgcaggcggtaaagctggcggccatggcagccaccaggcccagggccaaagtctttttcagtttcatgatgttctcctttattttcctgtataattccctctatgagcaggtccgcctttcccggcaggggagaggcagaaccaccttacgcaaaaagccccggctccttacggaaagccgggacttgaagccttggctataagcatccacggcgcagcgtgctgccgcgccattgcggcccatactcatgcataaatattacatcactatgcaggctttgtcaataggtattaagctcaggcagcagttttttcgctgtttttctcgctcttgctgtagctcttgacactgtgcagcacaatgttcaggcccagaacgatcagcatcacagccaggatcagctgcaggccgttggcgatgaacacagcaccccaggtggtctcgccagcggggatggtggtggaaacagcggcagagatggccttgaccatggcgatcaggcgctggaccagcgcggtgaaggtgacgcacagcatgatgaccagcggcgggaacagcatcttgttgttgcggccggtgaccttcaggaatacgcacagggtagccaggaccagggcgctcagcagctggttggcggaaccgaacagcggccagatattggcatagccaatctgggtcagcaggaagccgaaggccagagtgatgatggtggagaagtaaacgttgcagaacagcttgcgccagccctcagcgtgctccatatcatcggtgctgaacagctcctggaagctcatacggccgatacgggccacggcatccaggctggtcagggccagggcggaaacgcacatcgtcataaagacggtagcgatggaaacgggcacgccgaacatctcaaagaagccggcaacgccgcggctgaagatctggaacggggtaccggcggccggggtgccatcggcagcggcagcagcaccggcaacgcacagggccaggacagccagcaggctttccagcaccatggcgccgtaaccgaccttgagcatgtctttctcgttctcaacggtcttggaggaagtgccggaggaaaccaggctgtggaaaccggaaacggcgccgcaggccacggtaacaaacaggatggggaacatggtgcccagcttctcgttgttgaaaccggtgaagacgggcaggttcatggtgggatgagcgaccagcaggccgacaacggcaccggcgatcatgcagatgaacatgaaggtggtcatgtggtcacggggctgtttcagcagccacatgggcaggaccgcagcgaagaagatgtagacgaaggtgatgtagctccaggcagccttgcccagaatgatggggaagttcatgccgacaacgaaggacagcacgatgaagacgatgctgatgacggactctttccagccggtgaagtggaacttcttctgcagcaggccgaagatgacagcgaacaccatgaacatgatggagaccatgccggcagcgccgttggtgttggcggcatcagacaggctggtcacaccatcggtggtgacgtaagcgttgaaggtaccggcgaccatgtcagcaaaagcagcgataacgatgcagcagaacagccagcagaacagcaggaacagcttacggccggtcttgccgatgtacttctcgatcagcaggcccatggacttaccgtcattcttgacggaagcatacagggcgccgaagtcggtaacagcgccgaagaagacgccgccgatgagcacccacagcaggacgggcagccagccgaaagcggcagcctggatagcaccggtaacagggccggcacctgcgatggaagagaactgatggctgaaaacggtccagccatcggtgggcacgtagtccttgccatcctccagccgcacagccggagttttggcgttggggtcaacaccccaggttttagcgagccagcggccgtacccggcatacgcacataccaggacgacagctgcgatcagaacaatcacaagcgtattcatttgtataatctccctcatttcttacatatttttacaatcgcttgttctattactttaaaccgctgttcttcgtttgtcaacggattgttcatattttgtcaacatgttgggtatatagcaaatccgtcgaaaactattggtaaattttcgtcaccttcgacaatacaaaaattcattgacaaagcgaggcggtggttatagtataaaggaaagcgtttgcgcgaaaagccgccgctctatattctattatactataatataaaaggagacttccccatgaaacaatggttgaaagatgcggtattctacgagatctatccccagagtttttacgataccaacggggacggcatcggagattttcccggcatcattgccaaactggattacatcaaagacttaggctgcaatgcgctgtggatcaacccctgctacgactctccgtttaaagacgccggctacgacgtgcgcgactacaaaaaaattgcgccgcgctatggcaccaacgcggacgccgccgcgctgttcaaggccgcccacgagaagggcatccacgtgctgttcgacctggtgcccggccacaccagcgaggaacacgcctggttcaaggccagctgccggcccgagcacaacgaatactccgaccgcttcatctggaccgattcctgctttgcctccggcgacggcatgcccttcatcggcggcgagaccccgcgcaacggtacctacattttgaacttcttcaagtgccagcccgcgctgaactacggctacggcaagatcaaccaaccctggcaaaagcccaccaccgaccttgcctgcctggctaccgtggaggccatgaaggacgtcatgcggttctggctggacatgggctgtgatggtttccgtgtggatatggcttccagccttgtcaaaaacgacaccaagcacaaaaagtacacctgtgccatctggcgcgacatagccgccatgctgagcaaggagtaccccgaagccgccctggtggctgagtggaacggcccgcgcatgtcgctgaaaaacggcttcgatatggacttttatctggagtggcagggcaacggctacagctggctgatgcgcaactacgacggtgccaccgactccaacccgcacaacatcggcaaggcctacttctgcaaggactccggcaccggcatcgataagtttttggacgactacctgcccagctacaaggccacaaaaaaggacggcctgtggtgctttatcacctgcaaccacgataccatccgcccctcggccggtttgacggtggacgaactgcggctggcctacgccacgctgttcactctgcccggcgcaccgttcgtgtattacggcgatgagatcggcatgcgctacctgcccctgcccaccaaggagggcggctacttccgcaccggctcccgcacgccgatgcagtgggacggcaccgccaaccacggcttctccaccgccgcagcggatgcgctgtacctgccgttggataccgccgacgacgcccctacggtcgaagcccagcaggccgaccccaacagcctgctgcatgtcgtgaagagcctgctggccttccgccatgcccaccgggatctggactccgacgcttcgttcaaggtgctgtacgcgcccaaggccaagggcgactaccgcccgtttgcctggcagcgcggcaagctgacctgcgccgtcaaccccgccggggccgccgccgacctgccgctgaagctgaaggacggcacccgcgtgctgtacgccatcggcgaagccgccgtcaaggacggcgagctgcacctgggcgcccagagcttcgccgtgctggggtaaatcgaaatttgacgagtgatgaatatgaaaatccgagaagtgaaagaaaaaacaattcatgtcattattgctattataaaggaacagatggacatagactttgtccatcttgaaattgcatgataggtgtaatcatcaacgatacacagaccatcacatttgaggaagcggcagaagtcgcatcaaagagaaaaggaagagaagttagggcaataccgcacaattctaagtgccgatgcggcgagcgagaagtacaagctgctaagcaaaaagcgcagataatactggatgtattatcgagcatttttgcgacgcagattgtgcttcgcagccgcagcagcggtgcttaagctgtaaagcgggaattgtgcggtgttgccttagctcacattcctaagcgccgatacggcgagcaaggtgtgtcggctgccaagcgaaaagcacaggtaatactttgtgtattaccgagcatttttgcaacgcagatggcctgccgcagccgccggagcggtgcttttgtgacaacgtgaaaagaggatgtctcctatgaaactgaacgatttggtccagcacatcccccacaccgggacttcggacgcggagatctccgccatcacctacgattcccgcaaagcggcggccggttcgctgttcgtctgcctggtgggtgcctggctggacggccacacctacgccgccagcgcctacaaaaacggctgccgcgcctttttgtgcgagcatgcgctggatctgcctgccgatgccgcgcaaatcatcaccgcagacactcgcgccgcgctggcggtcatcggtgccgacttttacggcaatccggctgaccagctgcacatcatcggcatcaccggcaccaagggcaaaacgacgaccgccctgctgaccgccgccatcatgaccgaggccggcctgccctgtgcctacattggctcgaacggcgtggacattgcgggcgtgcacgaggctaccgccaatacgacgccggaaagtctggagctgcaccggctgttccgcaaaatgctggacgccaacgtgcaccatgtggtgctggaagtgagcagccaggccctgcgccacaaccgcgtggacggcatcccctttgaggtagtggccttcaccaatctgtctgaggaccacatcggccccggcgagcacccggatttcgaggactacaaaaatgcgaagcatcgtctgtttgtggactaccaagctcgcgaaatgatctacaatgccgacgacgacaccagcgaattcatgcgcatcggctttggcggccaccagaccagctacggcatcgagcgcgccgccgactaccacggcaccgcgctggcccagttccgcagtgagactgcgctgggcatcgactttttgtgcgagcatagcggcagttccaccgccgtgcgggtgctctcccccggcgagttcagcgcgtcggatgcgctgtgcgccattgcgttgtgcggggcctttggcgtaagcccggcccaggccgcccaaacgctggcccacaccccggtgcaggggcggtttgaagtcgtggagggactgcccggccggaccttcatcgtcgactactcccacaacggcctggcgctgaccagtgcgctgaagaccctgcgggcctataacccccacaagctgctctgcgtgttcggctcggtgggcgggcgtacccaggtgcgccgcagggagctggccgaggccgccggtgcgtttgcggattacagcatcatcaccagcgacaacccggactttgagccgccggaggatgttattaaagaaattgcctcccacatgccggagggtgccccctacacctgcatcaccgaccgccgcaatgccatccgcgccgccatcgggatggccgaggatggggacatcatcctgtttgccggcaaaggccacgaggattaccagctgatcgaaggcaaaaaagtgcattttgtggagcgggagatcatccaggagatttgccgggagaaacagtaaaagcaaacaaaacaagccctgcgcttttgatggcgcagggcttacttattttaagttattccgcgtggttcttctcggcgaaggcgatcattttactgtaggtttcttcgctcaggtcgtgctcgactttgcaggcgtccttggcggcggtgtcggggtcgacgcccagggcgataaagaaagcggtcagcttacgatggcggccgtagatgcggttggcgatctccataccgggggcttccagcttgatgaagccgtcgctgtccatcgagatatagccgttctcgcgcaggttcttcatagccacactgacactgggtttggagtaccccatagccaccgcaatgtcgatggaccgcacagagcctttttgctcctgcagcatcaaaattttttcgaggtaatcttctgccgactcgtgaatattcacaggtgtggcctcctttccgggtttacggaatttattttctttatcataccacgccatggatttttttgcaagcaaatgccggcaaagaactatggcaataccgcataattctaagtgccgatacggcgagcgaggtgcggcagc

SEQ ID NO: 7997 - DNA, 1269 bp, Unknown
  gut microbiota DNA sequence
gtacaacaccgcacagcgggcatccacttcccgtgcgggcagggcggcggccatggccagggcggcatcttccttttcttcggtggtaaaatccccctccagcgggaagtgctgcaaaattttttgcagcaggtcgtcgtagtagcgggcatacagcacaccgcggtcggtcaggtacactttgccgtagcgcttgcgcacaatgacatcgtgtttcatcaggcagcttaaaatgctggtaacggaaggcttggtcacgcccatggcctgggccactgccaggggggcgacctccggcatggttttggccaggtggtagatcgccagcagataccgcaggtttgtatcggtcagggtcaagggctttccctccttttacaacaaaaagggtgcgggcatccacccgcacccccgttaggactctttgggaatcttatttttcgtggcagcagctgccgtcacagccgtggcaactgccaccgcagctatggcatccgccgccgcagccgccgcccccgcaggagccgtcgcagcagccaaggccgccggtcttatgctcgtgaaccatgagccagcccgtaccgccgaaaacgatgatcgaaacaatgatcgtaggcaggttaaagttggttgccagaaattccatcataaaaaatcgctcctttctgaagagttggcagacattccttcagcaattacttggaggcaacagcctttttctcgtcaaacttgacttcgttgacgcccttgtacttgttgggacggaacagcaggtagatggtcagaacgacgatggcgattgcaacaaccgtgaagatgttgaaactgacctcaccagcgatcaggccgccgatctggtacacaaccagggaagcgcagtaagccagcaggcacatatagccgatggcgatagcggtccacttaccgttgttcatctcgcgcttgatggcgcccatagcagcgaagcagggagcgcacagcaggttgaagatcataaagctgtaagcggagatcccagtgaagctggcagcaacctcgggccagatctcgtcgccgttctcagacagctcgtcagcatagtgatacagaacaccgaaggtaccaacgacgttctccttggcgatcaggccggagatagaagcgacggttgcacgccagttgccgaagccctgcggaatgaagatccaggaaattgcgcttgcaacgatagccaggatggagttgtcctgatcctcgaccatcgtgaacgcgccgttctcgaagccgaag

SEQ ID NO: 7998 - DNA, 3658 bp, Unknown
  gut microbiota DNA sequence
caaggagtatgacctttgtcaagcacttttttcggtttttttgacaaagtttttattgtacttttgggcaaggtgtatattgtgtagattgggtgggattggcaccatttgtagggataaggggtggtaacgcaagcccccctcgcagagaggcagccaatcaatagcggctcttgcaatttcttctttattataatagtatataagcatcacctgtagaaagagggacccgaatgatcctggcattaaatatcggcaactccaacattacctttggcagttatacgccggatggtaagctggtgttttcctcacggctgtttgcggataccgcgttgagcagcgatgagcttctatataaaatggtaaacatgctggccttgtacggcgcggaaccgcaggagatcaccgccatcatcttttccagtgtggtgcccgcgctgacgccccgcatccgggaggctctgcgcaagatgtgcgaggccccggtcatggaagtaggccccggtctgaaaagcggtgtgcgtatccgcatggacaacccggcccagttgggcggagaactgctctgcgcggtggtcggcgcgctgcgccgggccgagccgccgctggtggtcgtcaacttcgataccgccactaccctgctggccgtggacgacaccggcgccctggtgggcggcgctatccttccagggccgcagtgctcgctggcatcactggtaaaaaataccgcccagctgccccaggtggagttggaagccaagccccgccgtctgctgggcacaaacaccgccgattgcctgcacagcggcatcgtgcacgggacctcggccatgctggacggtatggtagcacagttccgcgccgcgctgcatgccgacgccgcccctgtgatcgccaccggtactctgccctacagcgttcgcgattgctgcgtgaccgagatcacctaccgggaaacgctcatcctggacggcctgtttgccatctggcagcgcaatacccgccggtaagcatcccacaaaccaaacaaacaccgccgcccgaccaacaggcggcgtctttatttttgttgcaatatatgctatactgtaatttgtaatattatgtagtatagaaaggtcttatctatttccatgcaaaaactgaaaaatttcaactggaagaatttcttcctgcaagggatcctgccctttgcactggccatcactgccgcatttattgcgcggtatcagctggaactgtccgacggcgttacgccggactttctggccatgcagtggccgctgtacgccccgctgaacgccctgaccgccttctgcctgacactggtgttgtttgccatcctgggcaagtggagccgcgccaccggcatctccggtgcactgttcaccgtgatcgcactcatcaactactatacccgcgatctgcacggctcggccctgatgccccaggacatcctaaacctgggcaccgccgccgaggtcatgggcagctacacactgcaaattaccgccaccgtgcgcaccatcattctgtggtatctgccggtgctggcgattgcttttgtgcaggggcagctagtcaaggactgccccaagcgcgccagctggcgcgcccgcggtgtgcgggtactgggttgtaccgccggtgtgttctgcgtactctttttcggctactttgggccggtttcggtcaagcccaaaaccacctacggttgggcctggcagaatacctattataagtacggctacctggccggtaccatcgaggccgccagcctgatggccgaccccatcattgagccggagaactacagcgatgatgccgccgtcaccgcggccgccatggccgaggactttccctccgccacggcagaatccgccagcaccgactaccctgacatcattttggtgctgtccgagagcttctacgactttgacctcgtgaccgatttgcaggccgacaccgaggtcatgcccgttaccaagaacctgcccaacgctgtgtacggccacaccatcagcccccacgtaggcggcggcaccaattccagcgagtatgagatgctgtccagcaactcgctgatgctgatgccctccattacccccttcaactggctgaacctgcacaacgccaacagcctggtcagctacctgaaggacctgggctacagcacgctggctgcccacccctacacaaactccaactaccgccgcgactctgcctggctggcactgggcttcgacgagacccacttccaagacgacttccccaccaaggagtactacggcaaccgcccgtatcagaccgactcggcctcttaccgcgacttcgaaaagctgtacgaagccatgcccgaggacaagccgcggttcggcttcctggtatctatccagagccacggcgactacacaatgaacgatgcttcgctggatattgtacacgccgccaccgactacggcgagtacgacgagctgatggacgaatacctgagctgtatccacatgagcgacgacgccgtgcaggaactgtgcgactactttaccaaacagtacgaggagaccggccgcaaggtagtgctggcgtttgccggcgaccacgcccccagttttgtggaccacgtggctgacaagacccgcaccgagggcaacgacctgcaaattctggagcgcagcacgccgttcttcatttgggccaattacccgctggagaacatcgacgccgccaccagcactgccgacccgctgaaccgcatagacatggtgatgctggcccccacgattgcccagcaggccggtctgccgctgacgggctactacaaatacctgctggctatgaagcagcagacccccgtggtgaccgccgccaacgactacatgaaggtggacggcacctacggcacctacggcgaggacgaaagcctggacgcctgggtgaaggggtatctggcactggaatataacaatattggtgcccacgccaagcgtgtgcagtcgatttttgggcagtaattcctgcccaggatgtgaaaaatacaaggaggcaccgctatgctgctgcgacgccggaaatatgaaagccgccgtggttttaccctggtggagctggtcgttgttctggttatcctggccattttagccagtgtggccgtgccggccttttcccgccagttggagaccggacgggagagaaaagcagtcaccgaggcgcaggcctgcgtgacggccgccaccgggctgggcgcacagaagtataccgaagcgcggacggcttacatccaggacagcaataaaaaaatcgataccacgctggccgcatgggccggtcaggtccgggacgagcgccccaccgttacgggcacactggcccagcgcgagggcaccggtgaatacctgctgaccccgcagaacacgcccgatggtactgccgccggtgcagccgaggtcaaggcagccgccggtgtggacggcacggtactgaacttctggtgtaacaccaacggacagatcgtgtaccttttatataggagtgccgatgatattctggtggcgtatgcgaatcgggcggcttccggcagcagcagcgtggtgattcccaccgccaatgtgccgacggctgtgcccgacccctaccccgacgaagaagccggacagtg

SEQ ID NO: 7999 - DNA, 166 bp, Unknown
  gut microbiota DNA sequence
cccgcaacacccgatcctgggaaaaccgtagagaacgaacgtaaaacttcgtagcctctcacatcatcattaaacaaaaaccgccgcgcagtaaacactgaactgcaccccatttgttagacagtatggtatactatctaataagtggggtgtttttctatgccaa

SEQ ID NO: 8000 - DNA, 146 bp, Unknown
  gut microbiota DNA sequence
cgtgaggaacctgcctcaaagagggggacaacagttggaaacgactgctaataccgcataagcccacgggtcggcatcgaccagagggaaaaggagcaatccgctttgagatggcctcgcgtccgattagctagttggtgaggtaa

SEQ ID NO: 8001 - DNA, 332 bp, Unknown
  gut microbiota DNA sequence
agtttgccggacacatggaactattcggtacgggggttatcttcgattacgccggatggcgtagatggagtgcttacggctctgaaggagctggagcgtcttgggtatctggaaaggaaccagcagcgtgaaagtaacggtcggatgggcagagctgagtatgtgatttatgagatgccaaggaaaaagccgtgttcggaatcaccgtgtacggaaaagccgtatgcggtaaatccggatacggacacaccggttacggaaaatcccgcgcaattaagtactaatagaacaagtactgaaacaatcaataaaagagagaagaaggaaatcca

SEQ ID NO: 8002 - DNA, 317 bp, Unknown
  gut microbiota DNA sequence
tacttgcccggcagctggaagatggtgtggtgcacatgccctgccgccgcgtggtccagcaggaagtaatcgccgcgccgggcaatgatctgcatcgggtgggcggcatccacggcgttgtgcagctcgtccgcatgcacaccggcagcgttcaccacaaggcgcgtctcaaagctgcccttgtcggtctccacgcgccagccgccctcgatgggggcaaagccggtgacggtggtatcaaactggaactttacgccattttttgcggcgttctcggcaaaagcataggtcaggccaaaggggcagacgatgccgcc

SEQ ID NO: 8003 - DNA, 2606 bp, Unknown
  gut microbiota DNA sequence
aggcgggaattgtgcggtgttgcctttaatcaaaggcaggacgcaatggtcctgcctttttgttatgctttgtagggaccgatgcttgcatcggcccgtggggcatcgacctatatttccattgtttacaaaaggagaaaagtacgatataataaaagatacaaatttgtcacgaaagcaggtcacaaaccatgctcatcagtctgatcgtaccttgttataatgaggaagaggcgatgcctctgttttataaagaggccagccgtgtggcggccgagatgaaaaccagccacggcgcggatttcgagttcatctttgtggatgacggctcccgcgatggtaccctgcgcgtggcccgcgagctgcacgcccaggatgaccgcgtgcggtacgtttcgttcagccgcaattttggcaaggaggctggcatctatgcgggcctgaaagccgctaagggtgactacattgccaccatggatgccgatttgcaggacccgcctacgctgctgccccagatgctggatacgctgctgaccggcgactacgattgtgccgccacccgccgcaccacccgcaagggcgagccgctgctgcgcagctggttcgcccgcaagttctaccagatcatcaacaagatgtcggacacggaaattgtcgacggcgcgcgtgatttccgcctgatgagccgcaaaatgaccgacgccgtgctcagcatggccgagtataaccgcttcagcaagggtattttcagctgggtcggcttcaagaccaagtggttcgattacgagaacatcgagcgcgtggccggcaccaccaagtggaacttctggggactctttaaatactccatcgagggcatcgtcggcttctccaccacgccgctgctcatcgccgccggagtgggcgtgctgttctgcatcctggcgttcatcggcattattttcgtaattgtccgtgcgctgatgtttggtgacccaacctccggctggcccagcatggtctgcatcatcctgctgtgcagcggtgtgcagctgttctgcaccggcatcgtgggcgagtacctggccaagacttacctggaagtcaagcaccgccccatctacattgtggccgagaccgaggaagatcaataacgcttatgcgtgatatgacaaagggtgccccgctggggcacctgttcttttatgcggtgccgctgctgctgggtaactggctgcagctggcctataatgcggtggattccatcatcgcgggccgcttcatcgggcaggacgccctggcggccgagggcattgccggcccggtgatgaacctggtcatcctggccgtcagcgggctatgcatcggcgccggtgtgctgatgagcgaggccttcggcgcgaaaaatgaggaacgcttaaaggaaacgttggctacgaccctgctgttcggcgcagcgctctgctgtgccgtggcactgctgggcgtggccgccgcgccgctgattttgcacagcctggcggtgcccgatgaaattttgcatagtaccggcatttatctgcgcatcacgtttttgggcgcgccgtttacgtttttctataacgcgctggcggcgggcctgaaaagtgtgggtgactccaaaacgccgctcaaatttctggcgttttccgccgtgctcaacgccgtgctggacatcgtgcttatcggcggactggggtttggtatcgtttgcagcgccgtcaccaccgtggtggccgaggccgccagcgccatcatggccgcctggtacatgacgcgccatgtgccgcagctttgcccggcgcacagccagtggcgcatccgcccggcgctgctgggtcgcattttgcagtatggcgctgtcacagccttacagcaggcggtacagcctgtctgcaaggtgctgatccagggacaggtcaacgcgctgggcgtgcaggccatcgccgcgttcaacgctgtcacccgcgtggatgacttcgcctttaccccgcagcaaagtattgccaccgccattaccacttacattgcccagaaccgcggcgccaaccaaaaggaacgcatccgccccggcttccgcgtgggcatccggttggagttgtgctactggctgctggtgggcagcctgacctggctgctgcgtgcgcctgtcgtcagcctgtttgtggcaggggagggtgccgccgagatcgtgaccctgggcagccaatacctaggctatatggcgctgttctacgccctgcctgcgctgaccaatgccttccagggcttctaccgcggcatgggcaagatgaccactaccctcatcggcacctgcctgcaggccggcctgcgcgccctcggagctgctctgctggccccccgcatcggcctgcccggtatcgcctacgcctgtgccttcggttggtgcgtcatgctctgcttcgagatgccgtactacttttatacttgcaaaaagcaacagtcataaaaattacagcccctttattgtcatctggtacctgacaataaaggggctgttttacttgaccttacatgttcatctacaattgtatcgtaaatgaaacagccgcttttgagtgaactgcaccccatttgttagacagtat

SEQ ID NO: 8004 - DNA, 932 bp, Unknown
  gut microbiota DNA sequence
acgacgccttcttccaccatccggtcaaattgctgggcataagtagctgcctcgcaggctttgaaggtcacattgttgtggctgtattccagcagtacatccgggttggagtacacttcgttcttgcgttcgttgtgccgttcccgcaccgagatggcatttttacggtagcgctcattgcgcaccacggtccgatggattttgctgataggcgactcctttcttgggtacggttctgctgcggatggggtacgcagatgctttgcaaagcatctgacccactatgacactttccggcgctgccggcaaagtgccagtgggcccgctgcggcgggagggattgggatacggctgccaaccaaaaccgctgtgccatcttcccggttgggccgccgtcgtagcggttactcgtctgtggttgcctgtggaagccaggcaccacagccttcgtccatcctttgcaaaacgcggggtgtggaattctttctctatctctcttttagttagatatatcattctatctttatcgtgtcggtttttccgacgggtcggtgtcggcaaatccgtcaactgcctgtccgtttttcctacaggtcgtgccggattttccgacgggtggttacagctcgttgggttccttgggccggggcagattgaggtaataccgccgtgcctttccatttgactgtcccggcacgggctccagcaagccgcagcgttccagagcggcgaacaatccggcggctttctcccgctggcagtgcagcagtctcccggcactggcccgtgaaaggctcacacagggcctgccgttggctttccagcgcccggtggtatcctgggccgacaaccgtaacaaccccaacaaatggccgtacagcagcttgctttcgccggggagttcccggtaaggttcttccgacaggagactg

SEQ ID NO: 8005 - DNA, 3412 bp, Unknown
  gut microbiota DNA sequence
agccgatgtagtctttggagaatagctcgccgttctcttctggtgcggtggtttcggcaggttcttccagtgtggtggtttcggcggtcgactcggtgggcgttggtgcgggggtatgggcgggttcctcagcgatgggagattctgccggggtgggggttggttctggggtggtatcggttttagaggtacgtatgaccgttaacagcacgaagaaaccgaaaagaactgcggcagcaagaataatcttccaaaggggacggtttggctcattcatcgaatacacctcgtttgcaatgatcttttattttacctgattctaccacacggcaggggcaattacaatgtgtctgtgaaagtcccctgccgccttgcaggatttgggcgtatcctctataataaatattggatgtgagacataatgcttatcataaacgaggttttactttgaaatataacacgatcatcagcggtcagtttgtgagcaggcccaaccgcttcattgcgcaggtgcaagtagacggtgcgatgcagaccgtccacgtaaaaaacaccgggcgctgcaaagaattgctgctgcccggtgcggatgtgcggctggaagtttgcgataacccgaaccacaaaaccaaatatgatctggtggcagtgtacaagcccagcttggggtgggtcaacatcgacagccaggcccccaacaaggtggtgcaggagtggctgcaaacggaagggtatgacctggtgcggccggagtatacctacggcggctcccgcattgacttctacatggaaaaaggcgaagaaaagtacatgctggaagtgaaaggctgtacgctggaagtggacggcatcggctatttcccggatgcccctaccctacgcggcgtcaagcacctgcacgagttggcaaaggcggcgcagcagggttaccactgtgcggtagcatttgtcatccagatggaaggcgtggccgaagtacgtcccaacaccgcgacccacccgcaatttgccgaagcactggcacaggcccgggcggctgggaccaaggtgctgtttctgctgtgccgcgtggaaccggacgggttggccatcacgcaggcacgggaatggaaaaactgaaattttacaggcaaaggctcgcttcggcgggcctttatcttttattgcatgggcaggcaaagctgcgcctgcgccccgatgccggtgttggcaagcaccagtttgccgccgtaggcctgggccacgctgcgggccaggtacagccccaatccctggtggccgttgccagggcgggcggcgtcggtgtagaggaactgcccggccttgtgcagggcttcgggcgtgaagcctgggccggtatcggtgacagtgaaaaccagcgtgtcctctggcttgctgatggtcagcgtgacggtgccaccggcgggagtatagcgcacggcgttgtccagcatgttttcaagtgcacggctgagttccggggcggcgcagagaaactggccctgccattgctcctgcaaaacaaagtggagcttcgccgggcggcagagggcgttggccgtatccgccagcgcggcaacaaaggcatggctgtcagtatgctggcgggcggcgggcaccgtgcccacactgcgcagggcggcaaggtactgctgggcgcggtcccctgcccgcaggatggcgtccagttcgggagcggtggtgtcggcgctttcggccagtagctcagcgttgccctggatgatggtgagcggcgtttttaaatcgtgcgccagtgcggccacctgctcggtgcgctgctgctccagctgccactggcgctgcaggctgtcggtaagctgctggcccatagtctgcagggcttgcagcgtggcagaaaattcccggatgcgcgcgtggtctacgtcaacagcttcggggtgctgggcggcgatttggcgcgtcgcctcgtcgatgcgggaggtctctgccgtaaaggtacgcacggtacggtgggtggttacggccagccacgccaacatcaaaacgaccagcaagataatgtaacaggtttgaaaatccggcaggcgttcccgcagggccgggtcggcatagggcacggcgtagtcgtactgcaaaaggcaggtggcgccgtcagccatggtgacgatgtactgatactgcatcatccccaggttgccgctgccgccgtgcaggtcgttgagcgcggttttcagctggtgggcgctcatattggtggtggttacgcgctctgcatctgtgttggcatcacagacgacggcatagcggcaaagaaaactgattgcggatgggtcaaaggtatccgccgtcatggaagcgaccgtttcacgcgcctcggcacaggcttgtgccgaggctgtggcagacagcagaaagccgttatcgatcagctgcataaaaatgccccaccaaaggaccagaatcagtgcgcatcccccgccgcacaggcagaggtagcgcagcagcacgctgcgcaaagaagtcaggcgtcgacggcgttccataaatatccaactccccatacggttttcagcacggtttccgggctggccagcccggcggtgcgcagcttggcgcggatgtttttgatgtgctgggtaatggcggtgtcatcggccgtgccatcgtagccgaacacagcctcgtagatctgctctttgccaaatgtctgcccggcgtgcagggcaagaaactcgcagatggcatactcggacttggtgaacggcagctgcgtgccgcccacggcggcagattttgcggccagatcaaagcagacgccgccgcgcaccagccgatgctgcggggcacggttttgccgccgcaggtgggcattgacacgggcgcgcagctcagcaaggcggaacggtttgacgaggtagtcatcggccccgatgccgagcccggtcaggacggatggctcgtcggtgcgggcggtcaggaacaaaatgggtgcttctgtctgggcgcggatgcggcggcagacggcaaagccatcctcgccgggcatcatgatgtccaacagaatgcagtctgcccagcggcagagcgagctggtgacatcggcacccgtgcagcgggtctcaaccgtatggccgtcccgctcaagtgctgttttcaataaggtacacaggtcgcggtcatcatcgaccgccagaatgttggccataagaacccctcactgtgtgagcgtgtagaaaagacaggatgctgcgtacaaaaggtagatgtgcgcgggataaaaccagtaaaacagcagtttgtgcccgctgccgcgctggccgttgtaaagtgccatgaggactacggcaaagacgctgaaccactcgtaataggtggtgaacatctgcgagagggcaaaatccggcgtgccgtgcagctgcaaatagaccat

SEQ ID NO: 8006 - DNA, 570 bp, Unknown
  gut microbiota DNA sequence
ccatcactggcggcatgctcaatcttcacgatgattcacaaggtaggtaacgccgcgcttaatgtaaggccagaaaaaccagagtgcaaaagcaatccaagaaatgcgcataaacaatgtgcagatagttataaccgtcgtcgcgttccataaaggcagcagcagtaatgcaagtgcacaaattgcgattaatcctacattggaaagaaccactgttataattgctcttttcatcgacatcacctcaatcagattatacaggagtttcaaactatgcgcaagcgtatattctcaatttttcttgctgttgcaatgattttctgcattattcctttatctgcctatgcagatgagcaccagcacacttttgaaaataaacacggctatgatttatcaaatttgcccgaggggtatagtatcccttgtaaaatttatgaatcgccttgttctggtgaatgtggctattctctgtattcttgggatgtattcggactatctggtcagtttgttgataaaactggtacgtctggccttgtcgtttatgtaggcgtctattgtcctatctattac

SEQ ID NO: 8007 - DNA, 196 bp, Unknown
  gut microbiota DNA sequence
cagccgcggtaaaacgtaggtcacaagcgttgtccggaattactgggtgtaaagggagcgcaggcgggaagacaagttggaagtgaaatccatgggctcaacccatgaactgctttcaaaactgtttttcttgagtagtgcagaggtaggcggaattcccggtgtagcggtggaatgcgtagatatcgggaggaac

SEQ ID NO: 8008 - DNA, 270 bp, Unknown
  gut microbiota DNA sequence
cccgcctgcgctccctttacacccagtaattccggacaacgcttgtgacctacgttttaccgcggctgctggcacgtagttagccgtcacttccttgttgagtaccgtcattatcttcctcaacaacaggagtttacaatccgaagaccttcttcctccacgcggcgtcgctgcatcagggtttcccccattgtgcaatattccccactgctgcctcccgtaggagtctgggccgtgtctcagtcccaatgtggccgttcaacctctcag

SEQ ID NO: 8009 - DNA, 1753 bp, Unknown
  gut microbiota DNA sequence
catactgtctaacaaatggggtgcagttcagacacggcaaggggcctgtttttttatggacctggagggattcgaacccttgacctctcggatgcgaaccgaacgctctcccaactgagctacaggcccatatattcggatgacttatttattttatgcctttgcccacaaattgtcaagggatttcgcgcaaaatcttgttttacggcggtgcagcccgccaaaaactatttctgttttccgctcaggtacaaaaacaagggtttctctgtattttcgccttgcccttgcaataaaagttgcaatacggtatactatgcaaatacaggagggatcaccatgcgtttatttgatgtcctcggcccggtcatgacgggaccgtccagcagccatacggccggtgcggttcgcattggcagtacggcacgccgcctgctgggggagcagcccgcccaggcggagatcctactctacggcagctttgccgccaccggccgcggccatggcaccgaccgtgccctcgtggccggtcttttgggcatgcagcccgatgatgaccgcatccccaacagcttcgccctggccaaggccagcggcctgcactataaaatcggctccatcaacctgcgcggcgcccatcccaacacggcggtactgcggctggtcggcgtatcaggccgcaagctggaggtcgtcggcgcgtccatcggcggcgggcgtatcaatatctgccagattgatggcatcaccaccaactttggcggcgaccacaacaccctcatcgtccacaaccaggatacccccggtcacgtggccaccgtgtccgaatgcctgagcgcccacggcgtcaacattgctaccatgcagctctaccgttccgcagcgggcggctacgccgtcatggtgctggaatgtgacgagcctatccccgaagaaattgccggggaactgcgcagccagcccggcatcgtcaaagttaccattttaaatttgtaagggggcatctgtatgtcattctcctccatccgcgaaatgctgcaagcctgccaggagtcccggcagcccctgtacgaagtaattttggaaagcgacctggccgaaagcggcctgacccgcgccgaaagcgaggccgagatgcaccgcctctggtcggtcatgcgcgccaccagcgacggctactgcggtgctgatcgttcgatgagcggttttgtcggcggcgatgcggccaaggtggagcaggctgccgcccgggggacactctatgccagcggctactttgcgtccgtcatggccgaggcactcaaaaccgccgagtgcaacgcctgcatgaagcgcatcgtagctgcacccaccgcaggcagctgcggcgtactgcctgcggtgctgctgccgctctggcgcaccggctcggctgatgaagaagctgtctgccgcgccttgtatgtcgccgccggtttcggccaggtggtcgccagccgcgccaccttagcaggggccgagggcggctgccaggccgaggtgggcgccgccagcgccatggccgccgcagccctcgtcgacttaaagggcggcacggccgagcagtgtgccgaagctttcgccatggccctgaccaacctcgagggccttgtctgcgaccccgttgcaggccttgtcgagattccctgcgtcaagcgcaatgtcatcggtgcgatgaacgctgtctccgccgccgatatggcgctggccggggtcgtcggccacatccccgccg

SEQ ID NO: 8010 - DNA, 9684 bp, Unknown
  gut microbiota DNA sequence
aggatttgtgcggtactgccttttacttttttccgctttgtgttatactagtgcaaacgtaaatttataggaggattcctttatgaatgatccgcgttgggcgtccatcgacgcctttgccgaagaaaaccgcgacaacatcctgcgggacatcacccgtctggtggctgttcccagtgtcgagggcgaagctgcccccggtgccccgttcggccccggccccaaggccgcgctggccaaggcactggaaattgccgaggaactgggcctttccacctgcaacgccgacagctacatcggctgggctgagaccggcactatcgctgacgaccagaagttcctggccaccatcacccacaccgatgtagtgcccgagggcaacggctgggacgccgacccctacaccgtccgcgtgcgggatggctggctgttgggccgcggcgtggccgatgacaaaggccccagcatcctgtgcctgtatgcgctgaagtatctgaaagacagcggcgtgcagctgaagtaccccgtacgcgccctgcttggcgccaacgaggagaccaacatgcacgatgtggactactacgccgagcattaccctatgcccgctttctgcttcactccggatgccgagttcccggtctgcaacggcgagaagggcggcttcaacggcgagatcgtcagccccaagctggacggcatcatcaccgcctttgagggcggcgtggctcacaacgccgtgccggaccgcgcttcctgcactgtgcaggtcgccgccggcgccctggtccagaccgaaggcgtgaccttcgaggcaggggagggtggctccaccatcatccgcggctggggtaagagcggacacgccgccatgcccgaaggcaccgtcaacgccatcagcctgatcgtggactgcctgctcaagagcggcgtctgcaccccgcaggaggatgcctacctgcaggtgctgcacaccctgcacgcctccaccgacggcagtgccctgggcattgccgcagacgacggcctgttcgacccgctgaccattatcggcggcacgatcgagatgaaggacggcgttatccgccagagcttcgattgccgctatcccaccaataccgaccccgagaagatgaccgccatcatgacccaggtctgcggcgacgctgcccacctggaggacctgtccagccgggtgccgttctacatcgcagccgacagcccggctatccagacgctgatcaccacctacaacgatgtgaccggtgagggcaagaccccctttaccatgggcggcggcacctacgcccgccacttcccctatgcggtcagcttcggccccgagcacaccgacctgcccctgccggaattcgccggcccgatgcacggtgccaacgagggtgccaacttcgataagctgatcgaagcgctgaagatctatatcctcgccctgctgcgcctgcaggagattgagctgtaattgacttatatttaaataggtaaccaggcggtcctgttttggggccgtctgttttggtatggaaaaattgtcataaatttgacgttataaaattcacaattcctgcaagaatcgtacaaattctgcaacaaagagccaacgttttgcataaattgctctttttctggcagattggccgaagtgtaccgaatcgccttgacttgctttttaaaggcggttacaatgaaatcgtattattgcccgtttcgcggggagagaacgccgttaaacccgtgcgtttccgcctggtgggcacaaaaatcagggcacagcagggacgtatacccgtccgctgtgccaaaccagaatgggggaaatagcttgttcaaatccctgaaacgctccgccaaaggcgcgaatgtgccccatgcgaaagcgactgccgagctggccaccgtcaagatgcctacgcctgagcatgtcattattcccatgtcgatgcacatcggtgccccggccgagcccgtcgtcaaaaaaggcgacaccgttatggttggtactctcatcggcaaggccggcggctttgtcagtgccagcatttattccagcgtatccggcacggtacaggatgttgccccgatgcgcatggtcaacggcagcatgaccactgccgttgccatcaagaccgacggcgagcagaccatcgacccggcctgcgtaccaccgacggtcaccgacaaacccagcctgatggctgccgtgcagaactgcggcctggtgggcgtaggcggcgccggtttcccggcccatgtcaagctggctgccaacaccatcgatacgctgctcatcaacgcagccgagtgtgagccttacctgaccactgactgccgcgaaatgcttgagtgcagcgataccatcatcttcggtatcgaagccgtcatgaagtactgcgagatcccgcactgcatcatcggtatcgagcgcaataagccggagtgcatcgacctgctctgctctctcgtgcgcaatatgaagggtgtcgaggtcaagccgctgcccatgcgttacccgcaaggcgctgagaaaacgctggtggagacctgcaccggccgtgaggtgccccaggtgggtcccaccggcaaacccggtctgcccgccgacgccggctgcgtgattatgaacgtgaccagtgtatccaccctgggcaagtacctgaaaactggtattcctctggtatccaagcgtgtcaccgtcgagggcgatgccattgccaagccgcagaatatcgaggtgcccatcggcacgctgtaccgtgatgtgattgaagcctgcggcggcatcaaagagggtgtcgaactgggcaaaatcatcttcggcggccctatgatgggcggcgctgcccccagcgcggactaccccgtgctgaagcagaacaacggccttttgctgttcagcaagcaggcagctgtcctgccggagccttcggcctgcatccgctgcggccgctgcattgaggcctgccccatgggcctggaacctgtggaggcggttgcggccttcaacaacaaggattttgacaccctgaaagcccgttgcgtcgacctctgcgttgcctgcggcagctgtacctatgcctgcccggccaagcgccccgtcagccagacaatgacgcttgccaaggcatggtacctgggcgaactgcggaaaggaggcaaatgatttatggaagatcgtctgcttgttactgcctcgccgcatatccgtgaccattccaccacccgcggtctgatgggcaatgttgtcattgcgctgctgcccgccgtgctggcttcggcactgattttcggcgcacgggccctgctgctggtggttgtcaccacctttgcctgtgtggcatttgagtacatttatgagcgtctgctccacaagaccaacacggtaggtgacctctccgccgtggtcaccggtatcatcctggcattgaacatgccggtgggcatgccgctctggattgccgttgtgggtgcctttgtggctatcgttattaccaagcagctgtttggcggcttgggctataactttgccaaccccgcgctggtgggccgtatcgtcctgttcctgggctttacctcccgcatgactgcttacgtctacccggatatggcagtggatgccctggcttccgccacgccgctggcctccagtgtggaccgtcatgccgtcagcctgctggatatgttcctgggcctgcacggcggcatgatgggcgaggtctgcgtgctggccatcctgctgggctttgcctacctggttgctacaaagaccatccaggccaccatccccgtcaccatcgtggccaccgtctttatcctgaccaccctgaacaccggcgacccctacgctgccttgatcgagtgcatgtcaggcggcctgctgttcggctctgtctttatggcgaccgactacgtgaccagcccgttcaccactaagggcaagctgttctatggcgttttcatcggcctcatcaccttcctcatccgccacttcggctcgatgaatgaaggcatgagctatgccatcctgctgggcaacctgatgactccgtggttcaacgcctggggtcaccagaccccgctgggctataagaagcccaaaaaggccaagaaggccgctgaggaagggggcaaagcctgatggcaaacgagaaaaataccgaaaaccagagcgcttttaaagagctggtcctgccggtcatcgtgctggtggctatctgcctgatctgcagcgctttgctggccgtgctgaacgacatcacggcccccattatcgaggaaaataccaaggcggaaacgctggccgcctatgtctctgtcctgccggagggcaccacgtccgacgacatgaccgaggttgagaacctgaccaccgatggtgtgctgggcgctgtcaccaccgctaacggcgatgtggccgtcaaggctgctgcctccggctactccggcaaggacgtcaccgtctacgtcgcttttgacgccgagggcgctgtctccaacatcagcatcgacgcttccacccagaccaccggcattggctccaaggtggccgatgacagctttgcttccggctttgtgggctggaacggcggtgaagtctccaacggcagccccgtggatgccctgtccggcgccacctattccagcaacgcagtgttcaacgccgtcaacgcggcaatcgactgctacaacaatgagatcaagggggtgctgtaaagatgaacgagaaaccgagcaaatggaaagtctttacggcgggcatcattcgtgagaaccccgtcctgcgcctggtgctgggctgctgctccgcactggctgttaccaccaccgtttccggcgctgtcggcatgggtcttgccatgacctttgttctgatctgctccaatatcgttatctcggctctgcgcaaggtcatcccggccaaggtgcatctgccgtgctatattgtcatcatcgccaccttcgttaccgtggtgcagatggtgctgcaggctttcgtgcccgccctgtacaaatccctgggtgtgtacctggccctgatcgtcgttaactgcatcatcctcggccgtgccgagatgttcgcctgcaaaaacaccgttgtcgactccgctctggacggcctgggcatgggcatcggctacatcctgaccatgctgctgatgtcctccatccgtgagatcatcggcaacggcacctggctgggcatcaccatcatccccgacagtgtcgacaagatgaccgtgatgaactccgcacccggcggcttcttcgtcttcggctgcctgatggctggctgtgtctggctggaacgcaagctcaacaagcccatcgagcgcaagagctgcggcgatgtgatgctggaaaagatcgacgccgccaaagaagagcagaaagggggcgctgaggaatgagtgcacatatcgcaacctttgccacgatcttcttcagcatgatcctggtcaacaactacgtcctggttcagttcctgggcatctgcccgttcctgggcgtttccaaaaagctggattcctccgccggcatgggcgcggccgttatcgctgttatggtcattgccactgccgttaccttccccatgcagatcctgctgctggataagtttaatctcggctatctgcagaccattgtcttcattctggtcatcgccgttctggtccagctcatcgagatcgtgctgaaaaagtacgttccggccctgtaccagagcctgggcgtctacctgcccctgatcaccaccaactgctgcgtgctgggcgttaccatcctggccgtgcaggactactccgctgttgtgaccgagttcggtttcggcatggcctatgccgaggctctcgtctgcgcagccggtgccggtgtgggcttcctggtggctatgctgctgttctgcggtgtgcgtcagcgcgtcgaggcctccaacccgccggaaagcttcaagggcctgcccatcacgctggtttccgccgctatcacctcgctcagcttcatgggctttggtggtctggtcgaaaacatcatcaacgcgattctgtaagaaaggggaatggagagaatgaaccctatcgtattagctatcgtggtactggtggtgctgggtctggccggcggcgtcattctggtgcttgcttccaaattcatggctgtgtatgaggacccccgtattgcacagatcaccgagtgcctggccggtgccaactgcggcggctgcggctatgctggctgtgccgactacgccaaggccatcgtcatggacggtgcccctacctttaaatgtgcccccggtggtgacaaggcggccgacgccatcaacaccatcatgggcaacgataccgatgaccgccccagcctgcgtgctacggtcatctgcgctggcggcgaaaactgcggcaagcgctttgactatcagggcatccagacctgtgccgctgcggcagctctggctggcggccccagtgcctgcgcctacggctgcttaggcctgggtgactgcacccgtgcctgcaaattcgatgccatccatgtcatcaatggtgtggcggtagtcgaccgcaaaaagtgcaccggctgcactgcctgcaccgctgtctgcccgcgcaaggtcatccagatgaagcctatcgccccccagcctgccgttaagtgcagcagcaaggacaagggtgctgtggtcaacaagacctgcaaggtcggctgcattgcctgcggcctgtgcgtgcgcaactgcccgaatcaggccatcttcctgaaagacaatgtggctgtcatcgactacactaagtgcaatggctgcggtacctgcgtaagtaagtgccccaagaaggccatccagtgggtcgaaggcgccccgcgcgccatggacgcttccgtgcccgagcacgaagtcctgaagacccgcgtataatcactgcagcccgtccccgccgcaaggcggggatttttgttcatctaagtatgatgccccatcaaacagcctcctctgtgaggaggctcctgccgcaggcaggtgggggagagaaagcattttattgcctcctaaatatttacatttttctcaaaataattttataaaaaccgagacaaattcctaaaagtatgctatactatacccatcggcaaaaacttatcaatctcacaacctcaccgattcaacaatttcaatctcatcaattcccaaattttcattctcacaattccaattttcatttacgggaggaacccactatggaaatcacaaaagatattgtttaccttggtgtcaatgatcacgcagtggatctctttgaaagccaatatagcgtccctaacggcatggcctacaactcctatctgatcatggacgaccagaccgttgtgatggacaccgttgacgcccactttactgacgagtggatcaccaagatcgccgccgcactgggtgatcgtgcacctgactacctggttgtccagcacatggagcctgaccacgccggttccatcgatgcctttgcccaggcataccccaccactaaaattgtatcttccgccaaggcctttgtcatgatgcagcagttcttcggcacagactatgctgaccgccgcatcgtcgtcaaggaaggcgacactctgcccctgggccatcacaccctgcacttcgtcaccgcccccatggtccactggccggaagtcatcatgacctacgacgatgcagacaaagttctgttcagcgctgatgccttcggcaagttcggcgcactggacgtggaggaagagtggctgcccgaagcccgccgctatttcatcggcatcgtgggcaagtacggtgtgcaggtgcaggctgtgctgaaaaaggctgctggtctggacatcgagaccatctgctcgctgcacggccccatcctgcataaggagcagctggccgacgtgctggctgcctatgatacctggagcacctaccgccccgagaccgacggaatcctggtggcctatacctccatctacggccataccgccgacgctgccgagcagctggccgaggaactgcgcaccaagggccagcaggtcgttgtgatggacctggcccgctgcgatatggccgaggccgtcgcccaggcattccgcttcagcaagctggtgctggcaacccccacctataacggcgacgtcttcccgttcaccaagaccttcatcgagcatctgaccgagcgcaactaccagaaccgtaccgtcgccctgatggagaatggttcctgggcgcccaccgctgcccgcgtcatgcgcaagatgttcgaggccagcaagaacctgaccatcctggacgagaccgtcaccgtcaagggctcgctggatgatgcttccaccgcccagctccacgccctggccgatgccctgagcaagtgattttcctgtaaaatagcatccgtgcccccagccgttttgccgcggccgggggctttttgcatgtaaatacacataacagcgcggcaaattccaggctgtaaatttgtgtcagcagggggttgacaaaacggatgcaatgctttataataatcagcgttgaccaaccgaatatggatgattagctcagctggttagagcgctgcgttcacatcgcagaggtcgagggttcgagtcccccatcctccaccacaaacctgacggcaaatatgctgtcaggtttttttattataaaaaattatttttcatgtacgaaaatatacgcgctgcccactattctgacggtttctaccaggcttcgacacgcaaaagagaacatatcttgcaatagtatattcatttcgcatattttatgccatcaacgtataaaaacgtgtgcggtatgtgcattgattctcacgccactatctcctatagttttagtaagtaactattttccggggaatggccgcataactgtcatccccgcatcaaacaataggggagaaccgctacgatgaaatctgtccaagaggctcctttggcccactatgtgcgcgaatactcggcactgcccgggctgcagcaggcccaccgcgtggagtacaccctgcgccgcagcgataccatgctctgcttcagcgcccgccgcagcagcgaggccgcgcccgttagctactacaccgccgccctggaggaagtcccggcctgccggctgctatgctatctgtacgagaactccattgggccggagcagctgcgcgatgttttatcggatttctgcggcaggacgttgtaactatgagcagactactatggaatgaccggggcaccccggacaggaaaaagggaagggataccatgggatttacaggctcatttgcacctgtcactacactgtttgcggtgcagtcccatttggatcgcagcagcatacatctttttgcccagacgcacccagaggtccgtgcgctggcagtagtctccaccgggcgggaggtgctgcagctattgcagaacgggctgaacccgcaggtcatcgtgctggatatgcagctgcgcgaccccggcatccagacccttatctgcgggatacgcgccatgcagctggtgcccaaaccccggctgctgctctcggcacccacgccggaacagacctctggcgaagatgccttgttgacatttcgcggccaagaggttattcttagaccatacgagatgcgcacgctgtttgagcgtgtctacctg

SEQ ID NO: 8011 - DNA, 40352 bp, Unknown
  gut microbiota DNA sequence
gatgatcctttttgcctggtcggatgaacgggatctgcccatcggcatcctgtaccagatggccgccaaggaccagccggtggacgagcgtgccatcacagcagccgtcggtcggctctcccgtgcgatgcaaaagcagggcacaccgctgtatcagcggctttgtgtgcgctttggcctgccgcaggacgctgtactgtccaacggcaaactgctgaaaagcatgctggagtatatccgggaactggaaacatattaaagaaaggggcgtaaccgcatgctgcaggacgatgaatcgttggctttggcgctgcgcggcggtttgcgcggccgtttccagggcaccttcaaccaactggaaaacgctgtcgaagtcctggacgactacatgctccaacacctgaaccctgcagaatacgccgacctgcgcaccatgatgcgagagatcaactggcagctggcctacctgcgccgcctgggtgaccacgccgccgatgctgccgcggcccccgtattgcagatgctgcgtgtgcccgcccccctggaactgctgagtcagctgcacgagacggtcgagctgtttaacgagttgacggtgggcggcacccgcgcggtccacgcccggttggagaccgcccccggcctggacgttttccccacgatgggagaccccgccctgctggatgggctgctggtcaacctgtttaccaactccattcaggccgtgccggaaccggacgccgtggagatcacccttacctgcacgcagaaccagcttttgtaccgcgataacgggcccggcctgccgcaggatgcccgccgcctgctgttggagggcgtctggacctcggagctgctggctaaaggcggcctgggcctgccgctgatccgagcctactgtaccgccatgggctggcagatcagccagccggaaggggagcgcggcctgctgttcaccctgcccacctgccaggccgaagcccttggcacgttgcatctgtctgctccggacacaggcagcacccggcgtcgccgccgcttgtacgagagcgaactccgcctttacctttccgccccggaggagccttccgacacttaaggcaataccgcacaattctaagtgccgatacggcgagcgaggcacggcagctgctaagccaaaagcgcagataatactttgtgtattatcgagcattttggcaacgcagatgccgtgccgcagccgccgaagcggtgcttaagccgtaaggcgggaattgtgcggtgttgccttaatatcttactggtttcattgcaacaaatcctgcgtgttttctgcccgccgttcctgcggccggggcagaagatgcgctttttttatttcatggctttactttacggccaaattattgtaaaatagtacccaaataaaacaatggtttactgtgcctgtgtgcggtaaacgcaagaggtgtgtattatggcaattcagtataaacgtatcctgctgaaagtcagcggcgaggctctctccggtcccaagggcaccggctttgatgaggagaccatcgcttccatctgcgccggcatcaaggccgcccacgacctgggcgcccagatcggcatcgtggtcggcggcggcaacttctggcgcggccgttccagcggtaagatggaccgcatggacgctgacaagatcggcatgctggctaccgtgatgaacgcgctggccgtcaaggatgccctgcgccagcagggtgtgcccgccgtggtcatgaccagttccttcatgccccaggtggccgaggtgttcaccagcgacaaggccatcgccgcgctggaatccggtaagatcgtcgtcttcggcggcggcaccggcaaccccatcttctccaccgataccgccagcgccctgcgtgcattggagatcggtgcagacgccatgttcaaggccaccatggtggacggcgtctatgacaaggacccccacaagtacgccgacgctgtgcgctacgacacgctgaccttcacccgcgtgctggatgagcgcctggccgtcatggactctaccgccgccaccctctgccgcgacaacggcctgcctatcctggtcttcgacctgggcgagcccgccaacattgccaaggccctgcagggcgaggtcgtcggcacgctggtcaaagagtaagccggaatttttacaaggtaagcagaaaaattcataatatccccctatactaatacaggaataaggagaattacctatgagcagtactaccaaaccctatgaagaaaaaatgagtgccagcgtcaaccatctggtccacgagctggccgccatccgcgccggccgcgccaaccccgccatcctggacaaggtcgccgtggactactacggcagccccacgcccatcaaccagatcgccgctgtggctgtggccgaggcccgcatcctgaccatcactccctgggaccgtcagatgctcaagcccatctccaaggccctccagaccagcgacatcggcattaaccccatcgatgacggccaggtcatccgcctggtttttcccgcacccaccgaggagcgccgtaagcagctgaccaaggaggtccagaagcagggcgaggaggccaaggtcgccgtccgtaacgtccgccgcgacgccatggataagttcaaggccatgaagaaggccggtgagctgaccgaggacgaccagaagaagctggaagaagagacccaaaagctgaccgacaagtacgtcaaacagatcgacgagacctgcgccgccaaaaacaaagaaatcatggaagtctgatcctcacacatcagccctccaaccatgcctgtgcgggtatgcctgatggtatgcccgcataggctgttattaaatctatccgtgaaagggaacaccgtatgaagacccgcgttatcaccgctgttgttggcctggctgttttggccgctgtgctggcattttttgataccattgtttttgattttgtcctcagcgccatctgcctgctggccatccacgaggtgttcagcgctatgggctttggcaaaaagcaatggtatctgtacgccgcggctgtgccgtttacgctgctggtcatgcttaccagcagccagtctgtccgtgccctgatcctgccgttctgctttttgctggtgctgttcctcaatgtgtgccagattgcccacgtgcagacgttggatttcggcaagctttcgggctatgtgtacttctccggggtcatcgtgttctgcttctactcgctgatccacctcaagcgctgcctgccctttgcgcagtatcgctatgatgccatctactttatcctgctgatcctctgcttcgcctggggcggtgacacggccgcttactttgcaggccgggccttcggcaagcacaagctggcccccatcgtcagtccccacaaaacggtggagggggccatcggcggcatctttggcagcgtgctggcgggcgtggtgctcacactggtctactcgttcctgtcggccagccacaacgtcatcaccattcaggtgcagccccgccactatgccatcctggtggtcatgggcgctatcgcctcggtgctgggcatcctgggcgatttgttcgcctcgtcggtcaagcgtcaggtcggcatcaaggattacggcaccatctttccggggcacggcggcatcctggaccgctttgacagtgtgatgttcattgccccgttcgtttccatcgcagtgcgctatttcttctatgttctgtaaaaaaggacgtgtcaacatgaataaaaccattacgctgctgggttctaccggctctatcggcacccagagcctggacgtagcccgcatgcacggctattccgtgtttggtctggccgccaattccagcgtggataaactgctggagcagatcaacgagttccaccccaaatacgtagctgtggtaaaccccgatgcttatgcaaagctttctgccgcgctggccggtcaggccgatgcccccaagctgctgcagggtgccgagggtctgcgcgagctggccgccatggacggccccgacgtggttctgaacgctgtcgtcggcatcgcgggtctgcctgcctcgctggctgccattgagagcggccacgacctggccctcgccaataaagagagccttgttaccggcggccacctggtcaccgatgccgtcaaaaaatacggcgtcaaactgctgcctgtggacagcgaacacagcgccatattccagtgcctgcaggacgcccccagcgccaaaacgctggagaagattctgcttacggcctccggcggccccttcttcggcatgaagaccgaggagctgcgcaccaagaccaagtccgatgccctcaagcatcccaactggaacatgggtgccaagatcaccatcgactccgccaccctgatgaacaagggcctggagctgatcgaagccgcctggctgttcggcctgcccgaggataaaattcagatcgttgtccagcgggagagcatcatccattcggccgtgcagtttgccgaccattccatcattgcccagctgggcgtgccggatatgcgtatccccatccagtacgcgctgacctggcccgaccgcctgcccagccccgtgccggagctggacttcaccgcgctaaccaagctcagcatcgcccaagcggacgatgagaccttccgctgcctggccgcctgcaaaaaggccatccgcaagggcggcttggccccctgcgccgccaacggtgccaacgaggccgccgtagcccacttcctgcgggatgagatctgctttttggacatcggccgtctggttgagggcatcgttgacagcgacagcttcggcggcgactatactttgtctgacgtttatgaatgtgaccgtatggcgcgtgcctatgtggaagcgcacatttgattttgtgaggtgtctatgactgcattgctgaccgggctggtatcactgctcgtgtttggagcggtcattttggtacatgaactggggcattttcttgccgcccgccactgcggcatccatgtcgaggaattttccatcggtttcggccccaaaatttttcagcgcagaaggggaagtaccacctataccctgcgcctgttcccgctgggcggctacaacctgttcagccccctgccggaggacaacgaggacgcggacgcagaggaaaccgccgcgcctgcgccgcagcccgcccccaagcagccacgcaggcgcagcctgtttccggtcgttgtgcaggaccagccctttgaggaagccaccgcctggcagcgttttaccgtaacgctgagcggtgcgatgatgaactttgtactgggctttgtggtgttgctggtgctggttattacaagcggtaagctgggcagcaccaccgtggcccagtttaccgacaacgcccaaagctgcgccgacggcctgtgggaaggggacaccatcctgaaagtagacggccaggtctgccgcaccatcggtgacctttccggctgttttgacggcaccacccaaacccacgatttcaccgtcctgcggaatggccaggtcgtgcacttgccgggtgttacggtaggtccttctaccgatgccgacggcaacaccatcgctattgatttccgtgtagcagcgctctccaaaacgccgcggcatgtgttacagcgcacgggcacgctgttccgctattacagcaccgccatcctgggcggcttctggcagctcgccaccgggcaggtgggggtcgaggagctttccggccccatcggcaccgccaccaccattggccaggccatgcagtacggctggcaggatgtgttctcgctgctcgcgcttatcaccatcaatatcggcatttttaacctgctgcccatcccggcactggacggttgcaagctgatcttcctgcttattgaagctattttcggccgcgccgcgccgcaaaaattgcagatggtggtcaacaccgccgggatggcgctgcttttgtggctgatggtgctggtgaccatgcaggacatcacccgattcttgtaaggagaaaaaaagatgacacgtcaactgaaaagagaagtcaaaatcggcaatattaaaattggcggtaccaaccccatcgccgtacagacgatgctgaacgtccctgtcaaggatattgcgggcaacgtagcccaggccaagcgcgtagccgctgcaggctgccagatcgtccgcgtcacagtgcccagtccgtcggacgccgccgtggtggccgccattaaagaggccgtcgacatccccgtcgtggccgacatccattttgactaccgcgccgcgctggccgcgctggatgccggtgccgataaaattcgcatcaaccccggcaacatcggcgacgacgaccgcgtcaaggctgtggccgatgcctgcaaccagaagggcgtgcccatccgtatcggtgtcaatggcggcagcctcgaaaagcacatcctggccaagtatggtgcccccgtgcccgaggccatggtcgagagcgctctctaccatgtacgcctgctggaaaagcacgacttccataacatcgtcatctccatcaagtccagcaacgtgcctcgcatgatggccgcgtaccgcctgctggccagccagaccgattacccgctgcatgtcggcgtcaccgaggccggcggcaaccgtatgggtctcattaagtccggcatgggcattggcggcctgctgctggaaggtctgggcgataccctgcgcgtcagcctgaccgacgagccggagaacgaagtttacgccggttacgatattctgcgcgctgtcggctacgccgtggccggaccggagatcatcagctgccccacctgcggccgcacccagtacccgatgatcgagatcgccaacgaggtcgaaaagcgcctgcgggatgaaggcttcaaaaagccgctgaaaattgccatcatgggctgtgtcgtcaatggccccggcgaagcctccgatgccgacatcggcattgcaggcggcaaggacgaagccctgctcttcatccgcggcgaaaaagtccgcatgctgaaaggcgacatcgtcggccagctgctggatgagatccataaaatgtaaccacatgcttggcctcctctgtgggggaggcttcaaagagtacgaggtacacgattgaaaccctttgttacccaggtatggccgcagtttacggccgatcaacaattctgcgatgccttcggcagcgtcattgtagactgtgtcgagctgcatcgcaccacccgccaggtggtcctccgcctgcgcagctctgaacccttggatcaggcgctgtgcgggcgtctttgtgcttccctgcaggaggtgttcgccgggtacgagctgcatctgcaaaactactttgcctaccccaacatcacgcccgaagccgtgcgcctgatgatcgaggagctgaaagaaaaaggcatgccggtcaacggttttcttgataaaagccagcctgtcgccttcggcagcgacggcatcacggtgcgcgtcaacgcaggccgcgccatcctcgaaagcgtcgaactgccccgtgtcctggccgagctgatccgggagcgtaccggcagcctgcccatcatccgcctggcggataccggcaaggcccgcaccgatgaggaactggaacaatatttgcaggaaaagacccccgttgtcaagtttgaggccaaggagaccccgccggacttcacaatcgagggcctggcccttacggacaagcctgtcaagctgttctacggcaaaaacttcaaacctaccgagacacgccgcctcaatgacctgggcgacggcggcaaggtcaccatctggggcgatgttttcgccaccgaggtcaagggcagccgccgcaaaatttatttcacttccatcaccgactattccggctccgtcaacctcaaagtgctgggggacgaggacgccgacatgtccaagtgggagaacctcaagcccggcacgaccctcatcgtgcgcggcaactatatgtacgataagtacgagcatgactatgtcgtgcttccttacgatgttctgcaggtcgagcgccagcagcgccaggataccgcccccgagggccacaagcgcgtggagctgcacctgcacaccaagtccagttcgatggacgccttcaatgatcccggcaagatcgtgcgcctggctcaccgcatgggtcaccgtgctattgccatcactgaccacggcgtctgccagggctaccccgaagccatgctggccaccgatgccatccacgagaccgaccccaacttcaagctgatctacggctgtgaggcttacttcgtggacgacatgatccccgccgtctacggcaatacccagatggaactgcccggcaccttcgtcgtgtttgacaccgagaccacgggcctcgattccaacgtcgagcgcctgaccgagatcggcgccgtctatgtcgagaacggcaagatcaacgaggaaaagaagttctgcactttcgtcaaccccggcaagcccatcccgcaaaaggtggtggacctgaccggcatcaacgatgccatggtcgccgatgcccccagccccgaagaagctattcgcgcctttaaggagttctgtggcaataacattctcgttgcccacaatgctcacagctttgatatgctcttcatccgcaaagcgggggagaaggccggtgtcagctgggatgaaaacacctatattgacaccctacccatgggtcaggcgttgttcccgggcctgcgcaactacaagctggacaccatcaacaagcatctggagatcccgcctttcaaccaccaccgcgcggtcgatgacgccatggcgctggcccgcatcttcgaggtcatgctgtctgatctggaagaaaaggacatccacaccgttgaggccatcaacaccggccttggcggcaacaaagaggtgcttaagaaaaagtactaccacctgatcattctcgtgcagaaccaggttggtctgaaaaacctgtaccgcatcgtcagcgcggcccacacccagtatttctttaaaaagccgcgcgtgccccgcagtttgttgaacaaataccgcgagggcctgttgctttcgcccgcctgcgaagctggcgagctgtaccgcgccatcgtggccggccagccctacgagcagctgctgcgcattgctgactattacgactatctcgaagtccagccgcttggcaataacgagttcatggtccgcaacggccaggtggagtccatcgacacgatcaaggacttcaaccgcactgtcatcaaactgggcgaggacctgcacaagcccgtcgtcgcaaccggcgactcccacttccaggagccggaggactggatctaccgcgctgtcctgcaggcgggcaacggcttcaaggatgccgacaaccaggccccgctgtactaccgcaccaccccggacatgctggacgatttcagctacctgcctgaggataaggcctacgagatcgtggtgaccaaccccaataagatcgccgccaccatcgataacaacctgcgcgccatccccaaaggcacctacccgcccagcatccccggcgccgaggaagaactgcgtaccgacacctggagccacgcagcccgcgactacggcacacccgtacccgatgtgctgcaaaaacgcctgaagaaggagctggactccatctgcggccacggctacgccgttttgtacgtcatcgccgtgcgtctggtggcctactccaacgcgggcggttaccaggtcggcagccgtggttccgttggatcttccgccgtagcgcacttttccggcatttccgaggtcaactcgatgccgccgcactatctgtgccccaactgcaagcacagtgagtggatcgacgacggcatccacttcgacggcttcgacctgcccgataaggattgcccggtctgcggcaagccgatgctcgtcgacggccatgacattcccttcgagacgttcctgggcttctatggcgacaaagagcctgatatcgacctgaacttttccggcatgtaccaatcccacgttcatcgttataccgaggaattgtttggaaaggaaaacgtctttaaggccggcacggtatccggtctgcaggacaagactgccttcggttacgtcaaaaagtatctcgaagagcgcagcaagaccgtcaaccgtgccgaggaaaatcgcctggtcatcggctgcaccggcgtcaagcgcaccaccggccagcaccccggcggcatggtcgtcgtgccggacaccttcgacatctacgatttctgcgccatccagcaccccgccgacgacgtcaaaggcggtctgctgaccacccactttgaatttaagtacctgcacgatacgctgctcaagctggacgagctgggccacgatgtgcctaccttctacaagttcttcgaggaatactccggcatccccatcgactcggtgccgatgaacgaccccaaggtctacagcctgctcaccagccctgaggccctcggcgtgaccgaggaacagatcggctccaagaccggcaccttcggcatccccgaaatgggcaccaacttcgtgcgccagatgctgctggatgcccagcccaaaaacttttctgagctgatccagatctccggcctgtcccacggcaccgatgtctggaccggcaacgccgacgaactcatccgttccggtacctgcacgattgccgaagtcatcggctgccgtgacagtatcatgctgtacctgctgcgcaaaggcctggaaccgaagatggccttcgacatcatggaggccgtgcgtaaaggcaaggtcgccaagggtggcttcaagcccggctgggaggaagccatgaaggaacacgatgtgcccgattggtacatcgaatcctgccgcaagatcaaatatatgttccccaaggcccacgcggtagcctacctgatggcggccatacgcctgatgtggttcaaggtctaccacccggccatcttctacgcggtctacttcacagtccgcggcgccgatattgactacgaggccgccgtcggcggtgtgcgcgtagccaagcagcacttgaaggacaacgagaagattcccaaggaagagcgtactgccaaggacgatgacgctctggtcagcctgcagctggaaaacgagatgctgcagcgcggctgccagttcctgcccatcgaactgggcaagagctacgccagcaagtacgtggtcgaggatggcaaggtccgtctgcctttcaccgcactgcgcggcctgggtgatgccgctgccgttgcgctggaagaggccaccatccacggccagcagtacatctcggttgaggagttgcagcaggccagcggcgtggcgaactcagtattcgataagctgcgctctgtgggtgctttgggcagcctgcccgagacgagccaggtcgacctgttcagcctgatgtaaagactgcctaatttcatttgtaaaagattgtgctttcccttgctgacggggtgaaaaaagggtataatagtaccgtcctaaaattacggaaagtcaggagctattcaatgtctgatttttatacctaccgcaatgaagtagccggcaaaaagcgcaaacgcagcctgatgctggcactgctcattgttttagctgcagcctgcgccggtgtcggctggttctggatgcagcgcgatgttcagcccgccgagggtgaagccgccgctgccgagcctgtctccacttcagaaagtaccgaggccgagtccgaagcccccgttgaagcggccgctcccgctgagcctgtcagtacaggagatggcccggcccgcatcgtgcaggccgtcgataccgccgtgtgggatacctccacggccgtcgagcaaaccatcgataccgaatacctcaacaccgaccaccgcatggtagctgtccccatgctgggcaccgtaacgtcctcctactttgataccgccaccttcgcgggcgacagtatcgcttcaggcctgggcatctacgataccggctacaaaaatgcccactatgccacctatgtcagcgcaggcgtgcagaccttcgtcaataacgtcagcgtgaagaatgccgtcaccggagccaccgagacccctatggagaccatcgtggccagccagccggattacctgtatatcctggtgggcaccaacaacctggtcgtgcagggtagcgaggagagcttcatcgcttactacgagcgtctgatcgacatgctgcgcgagcagcttaaccccggcgttgccttctatatccagtccattcccggcgtgcaggaggatgtcgtccaaagcaagcccggcctggataacgcccgcattgccaccgccaacgacctgctggccaatatggcgctgcgcaagggctgctacttcgtcaatgtgcgcgaggtgctgaccaatcccgccgacggcagccagtacgatgactacgccaccaaggacggcgtacacttcaacgccgcaggctaccaggcctgggcagactacctggccactcacacggtgtggaaccgccgcagccagtacctcggccagaacccctactatatctacggcgcataactttaacaaaacccatacaaggtgtaaaaagcaccttgtatgggtcttttttatacacccgtacaagaaaagctgctgatttgtgtcgattttatacaaatacaaaacaactcccaacaaatttttagcagattattacaagaaagccttgaaatttatgtacgaaacaggtaatatagagttagtaaatattcggggctgtccatttagggctgttccaaaaggggagattacgttgaagcaacgcaagcaagcgcccaatagttctgatctgcccgtttacctgttcaagcagggcaacaatcaggaggcgtaccgctactttggcgcgcatttggaagtgcaggacggtgtccccggcgcggttttccgtgtctgggcgccccatgcaaaagcagttgctgttgtaggtgatttcaacagctgggttcccggcgaacacacgatgcacaaagtgaccgatggcatctgggaactgttcattccgggtatcaaggaatacgatatttataagtactgcatcaccaccgcgtccgatgaactgatctacaaatccgacccttacgcattccataccgagacccgtccctccaacggcagcaaagtctacgatattgagggctacgcctggggtgacgaccactggaccaaagagtcagccaagcgggatgtcatcaacagcccgatgtccatctacgagatgcaggctggcagctggaagatgaaggatgctgagaacggcaccccgtacaactacgcagagctggccgacgagctgattccctacataaaagatatgggctacacccatgttgaactgctgcccatcaccgagtatccgttcgatggcagctggggctatcaggtcacgggctattttgcccccaccagccgctatggcaccccaaaggacttcatgacctttgtggacaagctccaccaggcaggcatcggcgtcattctggattgggttcctgcccattttccgaaggacggttacggcctgtacatgttcgacggcgccccatgctacgaggaccccaatccccgccgcggcgaacacaaagagtggggtaccatggtcttcaactacggcatgaaggaagttgaaagcttcctgatctccagcgccatgttctgggtggacaaatatcacgtcgacggcctgcgcgtagacgccgtggccagcatgctgtatctggactacaaccgcaaggacggcgagtgggagcagaactgcaagggcggtaaggaaaacctggaagccattgctttcctgcaaaagctgaatactgccatcctgggcaagtatccccataagatgatgattgccgaggaatccaccgcctggccgctggtcaccaaaccggccgccgatgggggattgggcttcaacttcaagtggaacatgggctggatgaacgatatgctcagctacatgaagaccgacccgctcttccgtgctggcaaccatggcaaggtcactttcagcttcttctacgctttcagcgagaattttgtgttgcccatcagccacgacgaagtcgtccacggcaagtgcagcctcatcaataagatgcccggcgattacgagcagaagtttgccaatctgcgcacattctacggctacatggccgcgcaccccggcaaaaagctgcttttcatgggccaggaattcggccagttcatcgagtgggacgagaaaaagcccctggactggatgctgcttagctacgacaagcaccgtcagctgcaggactatgtcaaggatctgaaccacctgtaccgcgacacacccgccctgtggcaggtcgattacagctgggagggtttccagtggatcgtgcccgatgacagcaagcagagtgtgatcgcgttcctgcgccgtgatgctgcgggcaagatgctgctggtcgtctgcaacttcaatcctgtgctgcgccagggctaccagatgggcgtgcccaaccccggcagctacaaagaaatcctgaattccgatgacaagaaatacggcggctccggtgtcaccaacggcaccgtcaaggcagaaaagggcgagatgcacggcttcgagcagcatatttcgctgacactgccgccgttgtctaccgtatacttccaggtgcctgctgcccgcaagccccgcgctaaaaaagccgccgaggcagcggacgctgcagccaagcccgtgaagaaaaccgccgctaaagcaaagaaagcggccccggcagcggaaaccgctgccaccgcctccaagcgccgcgggcgccccgctaaggccaaaacgccggtttaaccgtgcgagatggataaacaccactgttcaacaatggcgtaaagccagaatgttaaggggagaaatcttatggcaaaagaaatgatcgcaatgatcctggcaggcggtcagggctcgcgtctgtacgcgctgacccaaaagctcgccaaacctgcagtaccgttcggcggtaaatatcgtatcatcgatttcccgctgtccaactgcgttaactccgacattgataccgtcggtatccttacccagtatcagcccctcgtcttgaacgagtacatcggcaatggccagccctgggacctggaccgtctgcatggcggcgtccatgttctgccgccgtatcagcaggcttctggctctgactggtacaagggcacagccaacgctatctatcagaacatttccttcattgatcgttatgatcccaagtacgtcatcatcctgtccggcgaccagatctgcaagcaggattactccgacttcctgcgtttccataaggaaaaggacgccgagttctccgtcgctgttatggaagtgccctggaatgaggcttcccgcttcggactgatggtcaccgacgagaacgacaagatcagcgagttccaggagaagccgaagaacccgaagtccaacctggcttccatgggtatctacatcttcaactgggatgtgctgaagaaatacctcaccgaggacgaagccgatcccaactccgagaacgactttggcaagaacgtcatccccaacctgctgaaagacggccgccgtatgtatgcctatcatttcagcggctactggaaggatgtcggcaccatctccagcctgtggcaggccaacatggaggttttggaccccagtcattccggcatcaacctgtttgatgagaactggaagatctactcccgtaactccggcaagccctgccagcagatcggcagcgatgcaaccatcgtcaactccatgatctccgaaggctgcaaagtcaacggcacggtcaacaactccatcctcttcccgggcgttgtcgtcgagaagggtgctaccgttgaggctgccgtgattatgggcggcaccgtcatcaaggcgggcgcttccgtcaagcactgcattgtggccgaaaatgtcaaggttgaagagggtgctaccgtcggcgctatgcccgaaggcagcctgaacattgaggaacccggcgatgttgccacggtcggttccggtgtcgtcatcggcaagggtgctaccgtcggccccaaggcaatggtttccagtgatgtaaaggatggtgaggaacaatggtaaacagcaacgtcaacgcactcggcgtcattttcgccaatacctatgataacctcgttcccgagctggtggcggagcgctccatggcctccatccccttcggcggacgttatcgcctgatcgacttcacgctgtccagcatggccaatgccggcatcgacaacgtgtctgtcattgttcgtaaaaactaccactccttgatggaccatttgggtgccggtcgtgaatgggacctgacccgtaagcgcggcggcttgaatattgtcccgccttttgcagagcgtagcgtcaagatgtactccggccgtgtcgatgctctggacagcattctgaactggctggaagcccagaaagaacgctatgtcattctttctgactcctacattgccatgaacttcgacttcggcaacttgatcgatgcccacgttgcatccggcgctgacgtcaccatggtctacaaccgcgcccccatccctgagggtgcccgcagcgataactacaccatccgcatcgatgagaccggccgtgtgcaggagatcctgtccaacgactaccgtatgggtgagcagaacctcgccatgaacatctacgtcattgagcgcgagagcctgatccacctgatccacgatgcagccgtccgcggtcttgtctacttcgagcgcgacatcctggcccgcaacctgaagctgctcaacgtccaggcttacgagttcaagggctatgccgcccgtgtctctgacatgaagagctactttgacgagaacatgcgtctgctgcaggatggcagcatggacgccctgttcggaccggctcccatctacaccaagatccgtgacgataaccccacccgctatgtggcaggcagctccgtcaagaacagcctgctggctgatggctgcgtcatcgagggcaccgtcgagaactgcgtgctgttccgcggctgccaggtcaagaagggtgctgtcgtcaaaaactgcgtcctgatgcaggataccgttgtggagaccgattgcggtgtagagtatgtggtcacggacaagaatgtccacatcaccgcaggcaaaaagctggccggcaccgataccttcccggtattcgtcgccaagaaccacagcgtataacagctcatagaggttgtactccctctccccggaggcagcttttgatgagaggacgggggagatcagaccttccccgtcctcatatttttgtgaacccaccccatggaggtgcttatgagaatcttatatgcagccagcgaggctgctccctttgccaagtccggcggcctggccgacgtggccggtgcactgcccaaggctttggtcaaggacggcatcgacgcccgtgttgtcatgccgctgtacggtgacctgaaattcaaggatagcctgacctatatcaccaacttcagcgtgccggtcggctggcgcagccagtactgcggcctcttcaaggccgagcgcgacggtgttgtctactacttcatcgataatgagtactatttcaagcgcagcggcctgtacggcttctatgatgacggcgagcgcttcgccttcttctcccgtgccatcctcgaaatgctgttctacaccgatttcgagcctgacatcatcaactgcaacgactggcagacggccctgacccccgtttacctgaacctgtactaccgtcacctggataagttcagccgtatcaaaacggtctttaccatccacaacattgcctaccagggcaagtacggtctggacattctcgaggatacctgcggcatcggcgcccgcgacgcccatgttgtggaatatgacggctgtgccaacttcatgaagggcgcgatcgaaaccgccgacaaggtcaccaccgtcagccccacctatgcccaggagatcctggacccgtggttcagccatggtctggacggcctgctgcgccagaagcagtataagctctgcggtatcctgaacggcatcgacgtggatgtctttaaccccgccaccgaccccgacatcgtcaagaactatgatgccgacaccttccaggatggcaaggccgcctgcaaagctgccctgcaggacaagttcggcctgcataaggacggcagccccgtcatggccatggtcacccgtctggtcggccacaaaggcgttgacctcgtccaggctatctccgaaggcctgctgcagcagggcatcgagctggtcatcctcggctccggcgaaagccagtacgagaacttcttcaacgagctgtgcgcccgcaatccgggccgcgtgggcgtctacatcggcttcaacgccaaactggcccaggagatttactccggtgctgacattttcctgatgccttcccgctccgagccctgcggtctggcccagatggtctcctgccgctacggtaccatccccgttgtccgcgagaccggcggcctgcgtgactccatccacgattccggcgacggcttcggcaacggcttcacctttgccaactacaacgcccacgagctgtatgaggcctgctggcgcgccaaggaaggctactggcagaaggacggttggcccgtgctggtccaccgtgccatggagtgcgacttcagctggtccaactccgccaagagctacgagggtctgtacaacgaagttgtgaacctctggtaacaatttcatagtttttttaagccgacaggtccgcctgtcggcttttttatgttatggcaacaccgcacaattcccgcctgacggcttaagcaccgctccggcatctgccgcacctcgctcgccgtatcggcacttagaattatgcggtattgccttatatgtatcggctaattgtaggggccgatgcccgcataggcccgcaaacccgcccctgcatagaacttttccccgctttcttgcaattatcacaaatatggtgtaaggtaatgtaggttatgataaaacaacgtcgaaagaaggggagtaccatgcacaaactcgctgccggtgcagcggcggcgtcctgcctgcttttgtgcagctgcgctgcaaccgtcaccctccccgtagtcgaccttgccacctcagagaccgccgctacgcagaaatcctcctccatgggcctggtcctgccgcaggcagatacttcaattccagtctggcttgcctacgccgccttgcaggctacgccggaaaatgcctttttcctgcccggcaccgtgcagctgaacgtagaaaacatcctgcaaaccccggagctccccaacggatgtgagatcacctctgctgccgtcgtgctgaactacttaggcttcggcatcgataaagtcaccttggccgaaaactacctgcccatgcacatcccgtactgggaggccgacccagaggtcgaattcatgggcagccctgccgatgagctttctttctactgcctgcccggcgccatcaccactgccgtcaacacctatctggatgagcaaggcagcacttacagcgcgctggacattaccggcgctgagctcgcccggctggagatgtacctggcccagggcacgccggtgctggtgtgggccacatgcgcctttacagaaccactttataattacacctttacactggccgatggcagctggccttactccaactctcattgtctggtgcttaccggctacgacgaggacaactattactttgccgaccccatgcaggagatcaccgagatcggccgcgataccttcgccctgcggtacgaggaactgggctgccacgccgtcgttatcacccaataaagtgtccgcataaaataacagctgaccgtctgcctgcacaaggcaaatgaccagctgttttattttattgcgatggcaaagtcttccaattataaaattataactgtccgctcaactcatacaaccggcggctggcagcttcggggtcttgggcagcaaaaatggcgcttaccaccgccacgcctgcaagaccacggccctgcagctgtaaaatgttgctttcctcaatgccgcctatggccaccaccggaatgttcaccgccgccgtcacggcacgcatcgtctcggccgtcaccgggtgggcatctagcttggtgcccgtcacaaaggccgcaccgcagcccaggtaatcggcaccatccgcctgggctgccaaagcttcggcggcattgtgggccgaaacacccaaaattttatccgggcccaacagcgcacgggcacgacgggcggccatatcgctctggcccacatgcacgccgtcggcaccggcggccagggccacctccacgttgtcatccaccacaaagggcacatgccgcgcgtggcataatttagccagggcgcgggcttcttccagcagagcggcaggggaaagttccttctcccgcagctgtacaaaggtcgcgccgccatccagcgcggcggccaccgtatccagcagggtgcgcccccgcaggcggcggctgtcggttacggcgtacaaacgcagttgctgcggcaaaactttcatcatggattccccctgtgttcaatgtattttcactatacgccgcgccggacaaaaaagcaagcccttgacaaactttttgtaaaggtgtatcatgcaagacaaagaacaggggagccggacacccggctgagaggaaattgcatttcgaccctttgacctgatgtggatcatgccaccgtaggaaggactttaccaaacgtcttttttgcagggctgcccatcggtaccctgcttttatttttgcttttgggaaaggaaggatctgaccgttccagaaacgcgggtcgagggggagcgccctgggccgtgagcagcgtcagcgatgggaagccgtgttccggcgtgagaggaagccagcaagcttcgaccgaacgataagccctttttgtaaggggcttattgtgcccgtgcgggcggctggcgtatttctggcggcagtccttccgctttttttcgttatggtacaaaagaaaaaaggagttccaaaatgaaatccaacaccaaaaaacttgccctggctggcgtactgtgcgccgtggccgttgtcggcagcatgttctcgttccccgtattcggcagcaaatgcgcgccggtgcagcacatggtcaatgtgctgtgtgccgtgctgcttggtccctggtacggcgtggccgtggcctttgtggcaagcctgctgcgcaacctgctgggtctgggcagcctgatggctttccctggcagcatgtgcggcgcattgttgtgcggcatcgtctaccataaaaccaagaacctgctggccacgctttgcggtgaagttttcggcaccggcatcatcggcggtctgctggcctggcctgtggctgtgttcctgatgggcaaagccgccggtgacattgctttctacgcctacatcgtcccattcctcgtctccaccgtcggtggttccatcatcgccggcgtggtgctgatcgcactggaaaagaacagcaccctcaaaaaaatgcaggcaagccttgcccgctgaaacaggtgaccccatgacccgattcgaagcccttgcagccatccgcgcccgcaagccgctgctgcactgtatctccaacctggtcaccgccaacgattgcgccaacctggccctggccgtcggtgccagccccatcatggctcaggctccccaggagatggccgacatcgccgtgctggccagtgccgtagtgctgaacaccggcacccccgacgaagccaaattcactgctgcccggctagccggtgccgccgccaaccgccgcggtatcccggtagtgctggaccccgtcggtgtaggggctagcccctggcggctggagaatatccgccagcttttgcagaaagttcaccccgtcatcctgcgggccaactacggcgaggccgccgctctattgggcctttctgctgctgagcacggcgtggacagcctgaccgtccccatcgatgccgccgcctgcgcccaagcactggcgcaaaagctgggcacagtcgtggtgctctccggggccgaggatctcgtcaccgacggcaccgccctgcacaccgtctccggcggcagcgacctgatgcgccgtgtcaccggtgcgggctgcatgctaacggtactctgcggtgcttttgccgctgtgcagccgcaagcccccttacaggccgccgtacaggccgccgaattttggaaagtctgtgccgccgcagcagaaccccaggcccacggcccggccagtttccgggtcgccctgctggatgctgccgcacaaatcgtataactttattttgcaagtcattgtaaatcacaaaaaagaggaagccgaactacaccatccggcttcctcttcttattttgcaaaggatgtaaatgatttcgtcagaatcactggcagctttctccctctgcccgcaggtggttgtctacccatttgataagcagctccagcgccactgtgttctggccgccttcgggcacaatcaggtccgccttgcgcttgctgggctccacaaactgctcgtgcatcggctttacggtggtcaagtactgggtcaccacgctgtccaatgtgcggccgcgctccttaacgtcgcgcacgatgcggcgcaaaatacgcacgtcggcatcggtatccacaaacaccttcatatccatcagatcgcacaactcaggggagtcaaagatcaagataccttccacgatgatgaccggtgcggggcgcaccagcacagtctcgttgctgcggttgtggatggtgtagtcatacacgggcacctgcaccgggtggccggcgcgcagttcacgcaggtgggccaccatcagcggggtatcgaagctgtccgggtggtcgtagttcagcttgcagcgctcctcgtagggcagttcgtcatggcgcttgtagtagctgtcatggttgatgacgctgacctcgtctatgccaaagtggtcgcgcaggcgttcggtcaggggcgttttgccgctgccggtaccaccggcgatgccaatgataatggtgttcatatcctctttgctccttttatacttccagctcgattttgcggcccgtcggctcataggcccggtattttacgccggtcatattgaacatgcggcggctggcgatgctggcatgtgtatcatggtatttgtccgaaaggtagatcagttccttgataccgctctggatgatggccttggcgcattcgttgcaggggaacagcgtcacatacatccgcgcccctttcaggtcgtggttggggctgttcaggatggcgttcagctcggagtggcagacgtacatatacttggtctccaggtcctcgccctcgcgctcccagggcatgtcgtcatcgttgcagccgatgggcatgccgttgtagcccaaggacaggatcttgttctccgggctgacgatgcaggcgccgacctggctgttgttatccttcgagcgcatggccgaaagcatggcaatgcccataaagtattcgtcccagctgatataatcctctcgtttcacagtgctcacgtccttttgtatggatttctttacaaatattatactgtgatgcttggcaccacgcaagttatttgtgcaaatatttcaggcgggtggcctcaccgccccgcaggtggcgctcagccttgtttttctgcaccacggcctgcacctcggcccaaaggccggggcttgtgcggcgcaggcgggcctggtctttccagatggtgcttttgcttacgccaaacaccaccgcagccgcccgcaccgtggcgccggtaccggcaatgtaacgccccaccgctatggcgcgttcttctgggtcacctttcatagcttgccctccccacatagagattttctgtcaaatcctatgtgaaaaggccgcaggatatgctatgccatacccatcaacagaggaaatagcaaaacagccccgggcgctgcatccgtccggggctgtcatttaatagcttcgttccagataatccaggttggtccagccaaactggccctgatactgcaccagcacccaggcgggggccgtattggaagaaccgtagatgcgcagggaagtgtactccgggatctttcctacaatagcatactctgtgcctggcccggcgcgcagattcaagcggccgccctcggtgataacgcgggcataggagaaggtgcgcgtgtcgggcacggtgatgtcctccggcaggtcgtccagaggatcaggcttcgtcacaccggggatcgtgtactggtgccatccgtcgtccagcttgacccaggcggtgccgccgtcccagacaaggccatcatatgtgcaggggacatattctgcccctgcgcgatccagcaggccgaattttccgctgcggctcacgggggtatagccgttcagcagcggtgcggcacgccggaaaaggaaggagccatccccagaagtgttggtataatacacactatcgtaacaaaccggcgtcacttcctcgcccatcgtgcccaggtacacccacttgccgtcccgctctgcgggggcaagcgtggcatcaaaaaagtagtcggcaagagtgtagtggtagatgtttgccgcattaccattgcggcggcggtaaatgtattgtccatcactgataatactgacgtggtcgtcgccttcgtcttccgttacgccggtctgggccggcacatagccgtccacccggccgctgtacagcagcatgtcttcgtctgtcggcgcggccaattctcccgggcccattgagccgctgtatgtatatactttgtaatccgtcaggtagacaaactccagataggtgccgccatcgtgggccgcgcagagcatgccgtcgccgctttcccgcagcaaaacgttgatccgcttttcttcggctagcatctcatcccaaggtaaattatcctgataaccgtgccagcggcggccctcaataaaacattcaaccaacggctgcggtgcgcggcagggcagtacctcggtaccatcgctgcgcatcaggccccacaggccgtctttgcacatcgtgtaatagtcggtctccgggtacggttgaaaggcacgctcgtaggcaatgaaccggatatcatcataatccagcacatccgcatccgtcggcacaagcccctgcggcggagcagtagtcggcgcaggggcggcagcactttcggctgtctccgccgtggcggcggtttcgggggtagccgcaggctgaccatccgtaacaggcgcactggaccgtacttgcccagcagcgcaccctgtcagcaacagcgccatgacagcacaaaccatccgtttcatcgctttcactccctgctttcttttatttataaggaaacgtcttttccttattgcgttacttcttccaggtattccatgcttacccagccataccacccggcatatttgctcagcatccaggtgttatcctcgttatggcccaagtcctgcaggcaggtatgcgcgggcaccaactgccatttattgtagttggtccccggacctacgcgcatgttcagccccacatccgaggtgacgcgccagtaatggtcggtcgctttcagctctttcgggtaggtccagatgttcatcttcgtgtctgtccaatcctcaggcacaccggggatgcgttgactctgccattcgccgttctgcttcagccacagcacatgcccgttccaggcggcatactcatactcgcaggggatatactcgttcttgatggaatcatcaattacgccccacttgccatcccggcagacagccgcgtatccgttcagcagcggcgaggcataccgcagcgcgtagttgttggcgtaatcattgccatacacaggctcgtacaccgtatccgttaccagcacgccctgtaagttgatgtaaccccatttgccgttcagcttcacaggggccaggttctggtcatagaagcaccctgcatcctcgtagacggtatcgttcagcagttcaccgtccgcattggcaaacacataaccgccggcctcggctatttcataataataataattggtgtcgccgttgccgtccatccattcgcagcgctggcaggggagatattcgccgcacattgcatccacggcacccagcggttcctcactgcccagcataccggcgcttttgctcaccttgccgctgttgatatcataggtccaggctaaaagcagacagtcatgctcaccgctgcaaagtttcccagcgtttgccgcagccaaagtgtcgttgtatgcctgccagttctcatcgctgtcgctgacaacataatgccacttgagggtatcgcctgcgcagcgtcgtacagggtagtcagcccggcagggcagcagtaccgtgccgtcgctttccatcaggccccacttgccgtcctggcacatggtataatatccgtccgaaaccagatcatcctcggccagcatgacaggcgggtaggtgtcgcgcatcggcagcatgattgcggtatagctggtgctctctgccgtgggtgtttccgttgcttcagtttcggatgcagcaggtgctttggtcgcttccggtgcaggcatcaccgccgcttctggcgtctgcgtggccgcaggtgtacttactatatccgtaggatctgccggttttgttgcacatcccgtcaaaatcagtatcatagctgcacaaagtatccgtttcatcgcttttcctcctttccatgtctttttttatattagtatagcataaaagccgtatcctgcccatacaggatacggctttcgacgcgaattttacatggattgcaaagttattacaagaggttgggcttattcgtacatcctccgcccggcaaatatacacaaggggcgcttggccttgcccatctccatcaactgtacggccgcggccaaggtcgcgccgccgctggtgcaggcggggatgccgtcgcacagcagcacttccttcgaggcccgctccgcatcggcggtggtcacggtcagcaccgtatccaccacataggggttgtagttttccggtacaaagccggggccgatgcccgcaatgccgtgctggccgatgaacccgcccgaaatggcggcgcactcggcaggttccaccgccacaatgcggatcatgctgttccacgccttgatgtactcggccacgccggtcacagtgccgccgctgcccacaccgatgacgatagcgtcaatgctgtccccggcggccttcaagatctgcggcccggtcacccggcggtgatactccgggttgtcatcgttggcaaagtagtgggtaaagtagccgtggtagcgttcggctgtctcctgggcgatgcgatccatcacccggcggccgccgctgctgcacaccacgattttcgcgcccagttcctgcagccgctggcggcgggcaataggcaggttgctgggcactaccaaaatgcaggggtgccccgtggtggcacaacttaccgccagcgccgcgccaaagctgccggaactggcttccaccaccggcataccgggctgcaaagcgccgcgctcggtagcaaaggccagcatcgtctcagccaggccatctttggaggttccggtagcgcccccaaagtccagatacgccaaaatgctggatgtcagcccgtggcggccggagtatccgtccagccgcacaacaggggaacggtatacatcctgatagtaactgcgcaggatcggcatgaacaaaatactcctttcgacaaagtgaatttaattatagcatacttcctgctattttgcatcctttcgggcataaatatttttatacaaagaagttgcctgaatcggcaaaaatctgtcgcagaattacctgaatgtgtaaaaaaagccgcaaaacctcttgacttccgcgctcccagctgttataattcataggctggtgtaaagaaaaacgctttacacagtgcaagcacagcaaaggagggcacaggtcatggcgggaaaaccgcagaaaaacctggcgtattcggtgctgctggacttctacggcccggcccttaccgaaaagcagcgtgccatccttaccgaatattatgacgaggatctttcccttgccgagattgccgagaatttcggcattactcgccagggtgtgcgggacgccatcaagcatggcgaagccgccctggatgagctggaagcgcagctgggtaacgcccgccgccacgcacagatgcaggaagacctcgcccggctgcaccagctggtcatggagatccggtgctgcaattcggggctgttcaacccggtaccgcgcatccgcacggataccgacgaaatgctgaagatcatagagcgtctcgacgcgtaggaggaaccagatggcgtttgagtctttaacagatcgcctgaatggcgtattcaaaaaactgcgcggcaaaggcaaactcaccgaggcggacatcaaagctgccatgcgcgaagtccgcatggcgctgctggaagccgatgtcaactacaaagttgccaaagacttctgcgctcaggtctctgagcgtgccatggggcaggaggtcatggaaagcctgacccccgcccagcaggtcgtcaagatcgtcaacgaggaactgaccaagttgatgggcggcgatgagccccagtatctgcgcatcaaaaacaaaggccagaccgtgctgatgatgtgcggcctgcaaggtaacggtaaaaccacccacgccgccaagctgggccggtactaccgcagccagggccgccgcccgttgctggtcgcctgtgacgtctaccgtcccgccgctatcgagcagttgaaaatcgttggtgagcaggtcaacgtgcccgtcttctcgatgggcaccgagaagcccgagctcatcgccgaaaaggccatggcttatgccagggaccacggtaatgacatcgtgatccttgataccgcaggccgtctgcagattgacgatgccctgatggacgagctggtccgcatcaagcagcatgtcgaagtcgacgaaacgttgctggtcgtggatgccatgtccggccaggaggccgtcaatgtggccaagaccttcaacgagaagatcggcatcaccggtgtcatcctgaccaagaccgacggcgacacccgcggcggcgcagcgctttctgtcctggctgtcactggcaagcccatctacttccagggcaccggcgaaaagctggaggacctcgagccgttctatccgtcccgcatgtccagccgaatcctgggcatgggcgatgtgctctccctgatcgaaaaggcgcagagcgttcagtctgacaaggaagctgaggacgctgccaagcgcctgatggaaaacaagttcgacatgaacgacctgctggcccagttcaaacagatcaaaaagatgggcggagcttcggctctgctggccatgatgcccggcggcaatcagatcgacgctgatgctctggacgaaaaggccctgccccacatcgaggccatcatctactcgatgacccccgacgaacgcgccaaaccttccatcatcaaccccaagcgcaagcgccgcatcgccgcaggctgcggcctgacggtcgaggatgtcaacaagctgctgaagcagtacgacatgatgcagaagatgatgaaaaaggtcaagcgcaatcccaaaggtttcatgcgcggcttgggcaaccttggcggcatgggcggctttaaaggcttcggccggtaaagcccactataaatccggtatgacccgctcggctttacggcccacgggatgtacaatataaacagtagccccgcaagggccgtaaaacaatttttggaggaatattactatggttaagattcgtctgcgccgcattggcgccaagaaggctcctttctaccgcgttgttgtcgctgacagccgttttgctcgtgacggccgtttcatcgaggagatcggctactacgatcccaccaagaaccccagcgttgtcagcatcgacgccgataaggccaagcagtggctgtccaacggtgctcagcccaccgataccgttcgtgagctgctgaagaaagcttccgttctgtaatctgttcgccttgttataagggagggaacgccacatgcaggaactcttattagccgttgcccgcggccttgtcgaagacaaggaggctgtgcaggtgaccgttgaccccgtgcgtgatgacggcactaccgtctatcacctcaaagtagctgagtccgatatgggccgcgtcatcggcaagcagggacgtatcgcaaaggcaatccgtgttgttatgcgtgccgctgctgtccgccagggcgaaaaagtcatcgttgagatcgactaaaacctttaaagcactttgccgtccggtaaagtgcttttttattctagtaaggaggatcattccatgcaaagctatcttcccgcctgcaagatcgtatccacccacggcgtgcgtggcgaaatgaaagccctgccgctgtgtgacggcgcagaattcctggccaagttcaagcgactgtacgctaccgccgacggcacaggggagtgccgcgtcctcggcgtgcgcacccagggcaatgtcatgctgctgcgcctggctgatgtaaccgatatggacgctgcacgcgctcaggtgggccgcacctactactttgccaaggccgacgcccgtctgcccaagggccgttattttatcgatgacctgctgggctgtgaggtcagggatgccgacaccggcgctgtctacggcatcctgaccgaggtggaccaccccgccgcccaggacatctacaccgtcaccgatgctgcaggcgagaagcacatgctgcccgccgtgccagagtttgtcaagaccatcgacatcgacgcccgcacgatcctggtcacccccatcgacggcatgttcaacgatgctgtcaacggtgacaaggagtaaggcatgcgtatcgatattgtgaccctcttcccggagctgtgcgacggtttcctctcggccagcatcctgggccgtgcccgggccaagaacctgttcgaagcccactgtcatcagattcgtgactacaccaaaaacaagcagaagcagaccgacgactatccctacggcggcggctgcggcatggtactgtatgcccagcccatcgccgactgcctgcgtgccgtgcaggaccagtgcgccgcccaaggccgcaccaagccgcatgttgtctttctgaccgctgccggccagcagtacaatgaggagaccgccaagcggctggcctcctacgattcgctggcgctggtctgcggccattacgagggcatcgaccagcgcgtcattgatgccttcggcgacgaggagatttccatcggcgactacgtgctgaccggcggcgaactggccagcctggtggtggccgacagcgtcctgcgcctgcagccaggcgtattggccgaggaaaaaggctaccaggacgaaagttattgggacggcctgctggaatatccccagttcacccgccccgaagtgtgggagggccgcgccgtgccgcccgtgctgctgaccggcgaccacaagaagatcgacgcctggcgcggcgaccagagccgtcagcgcacccgggagcgccgccctgacctgtacgaccggtggtgcgagactcaccccctcaccgaaccgcccaagtggaagcgcggcgagaatatgcgcctggtcaagaccgaggagcagatggcccgtgccgctgagctgatggccgagggccgccgtaccgtctgtgcccctgtctgcacagaggaacagctggctgccatgacgccggagcactggcgccccggcctggacgcagagcgaaaaaacggctgggccttctaccttcactacaataaggtaggggagaccgatgccatggtaggcgtctgccataaaaccggcatgatcggccatctgtttgtcaccgagtccgcccgcgggcagggtatcggcgccaaagtgctggattttgcccgcaaaaagctgcaggaacacgagcaccccacgttaggtgtgctcagcaccaacacccgcgccatcagcctgtacaagcgcatgggctggcggctgaatggcgtgctgaccgtccatgaccccgcccagggcgccccttttgccgtgtattgcgaggaactgcgcatgcgttttcacggttaagattgcggttttagtatcaatcgacaacaatgttgaaaacaaactagtaaacttgcacaaacgacagtgccgagatttggcggaattacagaatcctgccgattttgtaaaaatacactgtacaaaatcgaccaaataggataaaatagagacaatcaaggcggcgtattatgcgcaatagaccgcctggaagtagcccacggtataaatacaagggcatattattttcaaaagtaggagagaataactatgtacgtcaaagaagttaccgttgagaatcaggttggtctgcacgcccgtccggctaccttcttcatccagaaggcgaacgagtacaagtcctccatttgggtcgagaaagaggagcgccgcgtcaacgctaagtccctgctgggtgtcttgagcctgggcattgttggcggcaccaccatccgcatcattgctgatggcgccgatgagcaggctgctgttgatggcctggtcaagctggtcagctccggctttgccgagtgatccattctcaaaaaattagcggtggggcgacccgccgctttttttgtaatttcttatggcaataccgcataattctaagtgccgatacggcgagcgaggtgcggcagctgctaagccaaaagcgcagataatactttgtgtattatcgagcattttggcaacgcaggtgccgtgccgcagccgccggagcggtgcttaagccgttaggcgggaattgtgcggtgttgccttataagcattcccacgaaagaggcgtccatgacaaaagctgaactctacaaaaaagcctgtatgctgccgctgctgcccggggtgtatatcatccgggataaaaccgataccatcatctacatcggcaaggccaagcggctcaagatccgcgtgtcgcagtatttccgcgagggtgtgccccacgatgccaaagtcacccagatgatcaaccatgctttcacctttgatgtgatcgtctgccagtcagagtttgaggccctcgtcctcgaggccagccagatcaaggcccacacgcccaagtacaacatcctgctcaaggatgacaaaggctacagctatgtcaagatcacccgcggcccctggccccgtgtttcggcggttttgcagaaagatgacgacgatgccgactacatcggcccgttcacatcctccttcgccgtgcgggagatggtggagatggcgcaggattgctttttgctgccccgctgcagcaaggagttcccgcgggacttcggcaaaggccgcccctgcttaaacgcccacatcggcaagtgcatggccgtttgcagcggaaagattacttgcgaggcctacaacgatgccgtgcagggtgcgttgcgaatggtccgctacggcaaaaaggacatcgtcaagcagctgcgggagaagatggaagccgcctccgatcgtttggacttcgagaccgccgccctgctgcgcgaccagatccaggccattgagcgcgtggccgccggccagaaagtcgtgatggatgctgacaccgagatggatatcatcgctctggcgggcaccacgcgggctgtctgcgccgctgtgctgcgctaccgcgacggccgcctgaccgacaagcgggagttcatgttccacgacaccaccgatattgacgccgtgcgggaggaattcctgccccagtattatctgaacggagagactgtccccaaaacgattgctgtcgacgctctgccgccggatgccgaggcgctgaacgaagcgctgacccaggcccgcggcaccaaggtggagctgtacgtgcctcagcgcggcgatgtagccaaactggtgacaatggcctacacgaacgcggtagagcgcctgggccgcgagagcggtcgctacacccgcgagcaaaagctgctggaagaagccgcccaggtgctgggcctgaaagccccgccgcgggtcatcgaaagctacgatatttccaactggggcgatggctccagcgtctgcggcatggtcgtatttatggacggcaagccccaccgctccggctaccgccgttttaagatgaagaccgttgcaggcaccgacgactacgcctcgctggccgagacgctttcccgccgcgccgccgaatacgaagcggcccgccgcggcgaaaagccggacggcccccaaaatcagtttgccaccctgccggacttgctgctgatcgatggcggtaaggggcaggtgggcgcggtcaaacaggctttgcgcggcaccgcgctggagcatgtgcccacctttggcatggtcaaggacgaccaccaccgcacccgtgccatcgtggacgacgagggcggcgaaattgccatcaaccgcaaccgcaacatctttaccttcgtcaccaacattcaggacgagacccaccgctacgctaacgactaccgtaagcgcgcgatgaagaaaaagtcctacgctgccaccctcacggccattcccggcgtgggcgaaaagaccagcgccgcgctgctggcccacttcaagaccgtggccgccgtcaaggccgccagcatctccgatttggaggaagtcaagggcatcagccacgccaaggcggaaatgctgtacaacgccctgcgtaatggtgtataatgattttatctcgggcggtgctgccgtccaataaacagtaacagaacggaaatttgctttatgctgattttggctattctattcacgctggtgctggccgccgcctttgcggtggtgcccgcccgccttggccgccgaaagcccacccgtgccgatggatgctacgccttgctgcccgccgtacttgtctggctttgggccgcctgcatctggtccaagccggggctgaccatcgggtttgacgccttccgctgcctcggcatcacggccatggtactgtgggcttgcggccttgcggcggggttccgccatgcctcggtgcgcaaatggactgcggcggcactgctgctggcagcgtccctcggggccgaggtatttatcggtaacctcaacttctgggccacccacagctatgagcctgtcgacctgcgggcctacctgcaggaggccgaggacgaccataacgccctgacgctggacgacgagcataccaccttaacgttcaccggcctggaccgggagctgtacaatctgcagctttcgggactggaatatgtctacaatggcccccacccggaagtgcagaacccgctgtttatcctcaacgtcgccgccacggacgaagccacatcatcctcccgccagagctggaactgggaagttgccgccaacgccccccgcagccaggtgcgcagcctggacctttccggcaaggcgtccaccctcacgctgacggcctacccctataacggcgagtaccgccagtacccaatcagctacaccttgcagaccatctacgccaacgtgccccgcgcctttgatttttcgctggtgcgctgggcagcagttttggcgctgctgtccgccgtctatgcactgcgcccggtttctgctgcctggcgagatgcttaccttacgcaccgcaaaaagtaccgccccgttgtcctgctggtagcggtcatattgggtgcggcggcgttctttgcgccgtttgccgaccgcttcaacgccggtgtctccaccagcttttacaacacggccgattgggacggcggcagccgcatcaacttcaccttacatatcgacgattgggccagcgatgcctccgcccagtacggtgccctggcccacagcctgctgaacggccgcctggacctggagcaggacccgcccgccgctatgcaggagatggccaacccctacgacaccgctgcccgccagcaggctgcgccggacgccctgtgggacgttgcctactatcagggccgttactacgtctattttggcgtcatcccgtgcctgctgttccagctgccctttgaggcattgaccggcgtgcgggatctgccgcccagcctgccgatgatcttgcttagctggctgttcctgctggcggcgttcggctgcatcaaacaggccgcccgccgctggttcccggacatgagcgctgctgtctacctgctgctctgcgcaggcatcggcaccggcagccaaatttactatttgctgctgcgcccctctatctatgagtacgctatcctgtccggcgctgccttcgtcatgctggcgctgtggcaatggctgctggccgccaaccagcccgccgaaaagcacggccgcatcctctttcatctcgcgttgggcagcttgtgcatggccttcgtggctggctgtcgccctcagatggtgctgtttgctgccctctgcctgcccatcttctggcagcgctacctgcgggaaaagcgtctgttcaccaagcagggcatcaccgaggccgttgcctttgtgctgcccgtggtgctggtcgccatcggactgatgtggtacaacgccgcccggttcggttcgccttttgattttggtgctaactacaatctgaccagcaacgatatgacccgccgcggcttctcggtgggccgcactgcccccgccgtgcttaccttcctcttcggcatccccggcgtgcaggcggtgttcccgtacctgaccgccaccaaaatgcagaccaactatatgggcctgaccatcaccgagctgttctacggcggtgcctttgcctgcctgcctctgctgtgggggctggccagcctgccgcttgcccgccgccgtctggctgccaagcgtgatctgcgcacttttgtagttgtggtactggctgccatgttggtgctggccgtgctggattgccagatggccggtatgctctaccgttatcaatccgattggcttggtccgctgctgttggccgccgcgctggcctgggcattggccgagcaggtactgcaagcccacgccgctcagcccggcatcgatgtattgcagcgtgcattctgtaccatcctgccgctggctgtgctggccggtgcctgctacagtttctgcgtctacttcactgccgagcccggcctgattggccagaaccctgccctctaccaaaacgtcagccgcctggtccagttctggctgtaacccccggaaaataagaaagaaaaaagagaaggagccattctatggcagaaaagaacctctacaccgtcatcgtcgccgatgacgaggacgagctgcgggaagccgtctgcacaatgattccctgggaagccctcggtttccacctggtgggcagtgccagcaacggcctggacgccctcgaacttgtcgagcagctggaacccgacctgctgctcaccgacatccgcatgccctttatcaccggcattgagctggcccgccaggtccgcgagatccgccccgccatgcacattgcctttttaagcggctacgatgatttcgagtacgccaagcaggccatccagtacaacatcatcagctacatgctcaagcctctcaccatggacggcctggccgccgagctgaaatccatccatgagcgcatcgaccaccagtatgccagcctgcgccgcagcggcatcgtgcaggaggaccgtgcgtccttcctgatcccgctggtgctggaacactgcgataatacctccgacgccgtcgaagccgccctgcgcacttcggctgccgcctgcggcctgctgcgcggcaccgatgaccgcagccagctggtggtgttgaccgcccaacctgacgacaatagcgagaacgccgccggtttcgtccggatggtggaccagctggccaacaaatatctgcgccactatgcgtttttctgcaacgaccatgtggtggctgtgctgttcggaaacccttcggatttcgacgagtacctgcacattctggccgacgagatctgccagctgaccgagcgtgccctggggcagcattgcgtcgtcggtgtcagccgcgccgctgcccgcttctgcgagctgaacgccggataccgccaatccatggaggccctggccgccgcaaaagagaccgagggcggcgtcagcttcacccccgatgtgcgcaagggcggcagcctgtgtgagcgcgcgctggaaatcatcgagcagcattactctgacgaggacctctcgctggcatccttaagcgccatgctggatgtcagccccaaccacctgagcgcctgcatcaagaaaacggcaggggagaccttcatcaacattctggtgcgccgccgcatggagaccgcccagcaattgctgttgaccaccgacctgcagattcaggagattgcccgccgctgcggctacagcgaccagcactatttcagttattgctttaaaaagtacagcggcacctcgccgggtgccctgcgccgcagccataccgcgggagcccaatcatgaagccccgccacgcaccgcgcaccgcaccgctgatagcctccctggtggtggccatcgcagcagttacgctgattttatctaccgccacatttttgcgcagctaccgtcaggctatcgtggagggggcccgcaccagcagttctcaggcggtcagccaggtggtggggtccgtcggcaattatgtcgataatatcgatgagatcatggatcttgtcatggactccatgaaccaatcgccggaggagcgcaatgctttgctggatgcactgcagaccacccgcagcgaggtgattgctataaccacctatgatgccgacggcgttttgcaggactgctgggccaaggaccacaccccacgccagaacatcctgcgcaacagttccttcgacctggttacggctaagcgccgcggccgcggttacgtcagcatcccccatgtcgaaacaatttttgagggctactacccgtgggtcgtcagcgttgtccgccgcatgccggaggattcgccccggcagtggatttcgatggacatccgtttttcagctctggccgccaccatcaacaatgtgggcatcggccagcacggctactgctacctgatggacgaacgcggcaacatggtctaccatccccagcaacagctgctctacgcagggctgaaaaaggaggaggccggacggctggcatgcctgggtgacggcacctatgtggaggataccgtcatctacaccacgcagaaagtccccaacagcacatggcgcgtggtcggcatcagctatattgacgagaccgtcaacgaaagtttctggcagatgacccgtatcattctgattgccgccgcgctgattctggttgctgctgtggtggtcggctttgtgctgtcctgcattatcagccgcccgctgcaaaaactggaaaccgctatggaagcctttgagcagaacgccgatggctttgttttcaattccatcaccggcacccgcgaggtcgaggagctgtccgattcgttcctccacatggtgggccgcatccagcggttgatgaccgccgtgcgcgaggaggaagtcgccctgcgcaaaaccgagctgaaagccctgcaggcgcagatcaacccgcattttctctacaacacgctggattccatcgcctggatgtgcgagcgcggcaaaaacgctgacgccgtccagatggtgcatgccctggcgcggctgttccgcatcagcatcagccgcggacacgagctgatcccgattgagaaagagttgcagcacgccgaggcctacctgcaaattcaaaaataccgctacaaaaaccagtttacctaccatttcacagtggatgaaagctgcacgcagtacctctgcaacaagatcaccctgcagcccatcatcgaaaacgccatcgttcatggtctggacctgatggtcgaggacggccacattgagatcaccgtctgccctgacggcggcgatgtgctgctgaaagtcagcgatgacggcatcggcatggcaccggagcaggtagccgcactgctgcaaaacgaacccagcgaccgcaccggcatcggcatcaaaaacgtcaacgaccgtctgcgcatctattttggccccggctacgggctttccatcgacagt

SEQ ID NO: 8012 - DNA, 18306 bp, Unknown
  gut microbiota DNA sequence
gtcccagccgaccgggagggcgattatgataaaacacgttaaaacgcttgccgcctgtctgccggccctgcttctggcaggctgtgcggcttcgcccacccccgcgcccaccacgacctgctaccacgttgccatgattgccaaatccaccagcaccgagttctggagtgcggtctttgccggggccgaggccgccgccactgagtacaacatggatctgaccatcaccggctccgagagtgaggaggactattcctcccagaacgacctgattgaaaaggccgtcgaggagggtgcccaggccatcatcttctcggcgtcagactaccagcagaatgccgccgccatcgatgccgccgccgacaaaggcgtgcgcatcgtcgtggtggattcggcagtcaactccagcaaggtctctgcctatgtcggtgccgataactacggtgccgggcagatggccgccaagtcagcgctgaaaaacgtcgaaggtccgttacacgtcggcctggtcaactacaacgtcaacagccccaatgcacaggagcgggaggagggcgtcatcgacactcttaccgccagcggccgtgccgaggttgccgccaccgtctacagcgtggccaccccggaaaatgcccgcgccgagacgctgaccatgctggcccgccaccctgagatcaacgtgctgatctcctttaacgaggccgtcagcgttggcgcggcccaggctgtctccgatttagaccgcgcggatgacctctggatggttgctttcgactccaacatcaccacagtggatgccttgcacaccggcgcagtagacgccatggtggtgcagaacacctacggcatgggctatttcagcgtcgagaatgcctacaagctgctggccgggcagggaagcgacgtaacccgcgagaccgaaaccgccacccgcatcattgaccgcagtaatattttcgccctcgacggccaaaaagccgttttcccgtttgaataaccgtataaattcatcctatcccgcaggtttctgcgggatattttttcttcaattttattacagcaataactttttcgtcacttttgctgtgcatcttgcacaaaacgcattgtctacgaatgtagaaaccgtccaataaggtgaaaaatctgcatctttatcggtgaaatttcaccttgttttttctttcactatcgggtaacataataactgtcaacagggtctgccacctctacaaggtgacccgaaaaaaaccactgcaaaaagaaggagaaaacaattatgaaaaagttactcgcactcgcagttgcaggcactatggccgtatctctggccgcttgcggttcttccgcatccagcgctcccgcttcctccgaagctacctctgaggccgctacctccgctgccgagagcgcagctgagagcgttgtcgagaccactcagggcggcaaggttggcgtctgcatctacaagttcgacgatgccttcatgaccacctaccgtaatgctctgcaggaaatcctcgagggcaagggctacgaggtcaccatcgtggacggcaacaacgaccaggctaagcagaacgagcagatcaacaccttcatcacgcagggtgtcgatgcgctgatcatcaaccccgtcatgacctccgccgctgatcagatcatctccaccgttaaggatgccgatgttcccaccgtcctgatcaaccgtgagcccaccgccgatcagatgtccgcttacgacaagctggtctacgttggctgcgacgccgctcagtccggcaccttccagggcgagctgatcctcgacaccgagaacaagggtgacatcaacggcgacggcaaggtttcctacatcatgatccagggcgaccccgagaacatcgacgcccagctgcgtaccgagtactccgtcaaggctctgaccgatgccggcgtcgaagttgaacagctcgacctgcagcgtggtgactgggaccgcaacaagggccaggaaatctgccagaacgacctcgctaagtacggcgaccagatcgaagttgtcttctgcaacaacgatgacatggctatcggcgctctgcaggctattcaggctgccggccgtaccgtcaacaaggacatctacctcgttggtgtcgacgctctggacgctgccaagaacgaagttgctaacggcaacatgaccggcactgttctgaacgatgctaagggccaggctacccaggctgttgagtgcatggaagagttgctgggcggcaagacctacgctgctggtgagcagagtgtctacgttgactacgtcaaggtcactcctgacaacgttaaggacttccagtaatcagcttacttaaaaccgaaatccggggtgcgtgtgcacaggcgcacgcactccttttttatcagaaaatggttacaaaagatttaaaggttaaagggggccagcgaattgtcagagtaccgcttggagatgtgtgatgtcgtcaagacgttccccggcgtcaaggcactgaatcacgcacagctgaaattgaaacccggcaccgtccatgcactgatgggcgagaacggcgcgggcaagtccaccttgatgaagtgtatgttcggtatctaccacatggacgaaggcaaggttatttatgaggggcaggaggttcagatcaagggacctctggatgcactgaatcgcggcattgcgatggtgcaccaggaattgcagcccatcccggagcgttccatcggcgagaatatctacgtcgggcgctacccaaccaagaaatacggacccgtcaccgtcatcgaccacgacaagatgtatgaggatgcggccaaggtcctgaaggaagtccatctgaattatgatccgcacgcaaagctcggaaccttgagcgtttcccagatgcagctggttgagatcgccaaggcggtctccgcagactgcaaggtactgatcctcgacgagccgacctcctcgctgacggcggccgaggtcgaggcgttgttcaccatcgtggacgagctgcgcgccaagggcgtttccatcgtctacatcagccacaagatggacgaaattcttcgcatcagcgatgaagtcaccatcatgcgtgacggccagtacatcggtacttgggaggccaaggaactgaccaccgatatgatcatcaccaagatggtcggacgtgagctgtcgaacctctacccgccgcgctcgaatacgcccggtgaggtcgtgtttgaggtcaaggacttcacgtccatcaaccccaagagcttccgtcacgtcaacttcaacgtccgcaagggcgagatcctcggcgttgcgggtctggtcggtgcccagcgcaccgagctgatggagggtctgttcggtctgcgctgccacacgtcgggcaccatcacctataagggcaaggaactgaccatcaaccagccgcaggacgccatcaaaaacggtatcgccatgctgacagaggaccgccgcgccaccggtattctgggtgtgctttccattgcggataacgtctccattgcatcgctgaacaagtatctgatcggcggcatcatgctggacgacaacaaaatcgaaaagctcgtgcaggataatgtcgccaagctgtctatcaagacgccgtcctccaaaacgcagattcaatcgctgtccggcggtaaccagcagaaggtgctgattgcccgctggctggccaacgaccccgatgttttcatcatggacgagccgacccgcggcatcgacgtcggtgcaaagtatgaaatttactgcatcatcgccgagatggccaaacagggcaagagcatcatcatgatctcctcggaaatgagcgagctgatcggcatgtctgaccgcatcatggtcatgtgcgatggccgctgcaccggctttatcgatggtgataaggcaaatcaggagaacatcatgacgctggctacccagtttgaataaggaggagatccgaaaatggagaaaaaattcgatgtaaaaaagttcctttccaataacgccatcatcatcctgatcgctctgctggcgttgtttgtaggttctactacccagaacttctttaccgttaccaacggcaaaaacctgctgctgaacgttgccccgcgtttcatcatcgcctgcggcgtttccggttgcttgatcaccaagggcacggacctgtccgcaggccgccaggtcggcctggccgcctgcttctccgccatgctgctgcagagtgttgactactctgcccgcatgctgccctggctgcccgatattccgtggcccgtggccctgctaatcgtcatagcgatcatggcctgctttggtgccatcaacggctgcattatcgcattcctgaaggttcctcctttcatcgctacgctgggcatgcagaccatcgtttacggcctgtgctccgtcatcaccaacaaccagcccatgggcggttacaagcagagctacctgacggttgccagcggcacgctgggccccatcccgttcctggccatctttgcactgatcgtcggcatcttcttctggttcctgtacaataagacccgtcacggcaagtacatgtacgccatcggcggcaacgagaacgccgctcaggttgccggtgtcaacgtcaccgcgtccctgatccgtatctacatcctggcatcctgcatgtatgctctcggtggcttcctcgtcggcgcaaaggccggcggcgcttccaccaacaccggcaacggctatgagctggaagctatcgcagcctgcaccatcggcggcgtttccaccaacggcggcgtcggcaaggtctccggcgttctggtcggtgttctggtctttgaagtcctgaagatctgcctccagttcctgggcgtcgaccccgcttacacctacattgcacagggccttgtcatcgtcatcgccgttgcccttgacctgcgcaagtacctggccaagaagtaatccgctatggcagatgaaatcaaaaacgagaccccgcagactacccctgaagggactgaacagaaatcggatcgtcccgaccgcagccagctgaacgcctttgagaatttctatgagaacttctccaaagttccgctgaaatacattgatgcgttcatcgtcgtatgcgctatcgctcttgtcgcagtagtcggcatcggcatactgaaaagcaagggcatcctttaaccgggaacacccccgaagtttcaccgcttcggcggtgtttctttttgcctataacaaaagcggcagggaagtgcgcatcactttgcgctccctgccgctttatttacagcaaaattactttttaatcggctttttctttttgcgcacgctgtagccaaagctgcccagctttcggcccagtgccagataatccccgtgggagtagacgatcagctttgccttgttcaggcagagtttgccgttttcgtccagcagcttttcgtccacatccacggctacgcactcagccaaaaacagatcgtggctgcccagcgggatgacctgcgtcaccttgcactccaaattgaccgggctttcttccagcagcaccgtgcccaacttggcggcgggggcagcggtcagatgcatggcggcaaacttgtccacatcgcggccgcttttcacgccgcaccaatcgatagcctttaccaggctctcggtgggcaggtttaccacgaactcgccgctttccttgataagcttatggctgtatcgctctggccgcacgctgatggacagcatcggcggctgggtgcagatggtaccgcaccagcctacggtgataagattcggcttttccgggctgccgcagctcaccagcaccggcggctccgggttcagcagggtagaacctttccagacctgacggctcatgcgttgtcctccttggtttcgccaaagttcggcgtcgtctcgctgataatatagcgcgggcggtgcttggtctccatgtagattttgccgatgtactcgccaatcacgcccaggcagatcagctgcacgccggacacaaagcagataatgctggtcatgctggcccagccggagaccgtcagccccaggatggcctccaccatggcccagatcacaccaataaagctgataagtgccacgatcactccgaacccggtaataaagcggatgggtttgatggacaggctggtgataccgtcaaaggccagcgacagcatcttggacaggggatagtggctctcacctgcaatgcgctcgtggcgctcgtaggctacgctggtcgacttaaagccaaccagcggcaccatgccgcgcaggaagagatttacctctttgaacttggcaaactcctgcagtacacgggcgctcatcaggcggtagtcagcgtggttgtacaccacctcagcccccatggcgttcagcagtttataaaaactttcggcggtaaaacgcttaaagaaagtatcggtatcgcgcttgctgcgcacaccgtacaccacatcgcagccgtcccgataagcatccaccatgccgtccatggcgttgatgtcgtcctggccgtcgcaatcgatggaaatcgtgatgtcgcagcggtcctttgcctccatcaggcccgccagcacagcgttctggtgcccacggttgcggctctgacagataccgacatagtgttcatcactggccgccagctcgttgatgatctcccaggtgcgatccctagagccatcattcacgaacagcacccggctatcggggctgatcttcccagccgccgccaggtcgttgattttctgcaaaaacagtggtgccgtaatcggcagcacctcctgctcattatagcaggggatgacgatgtaaaggattgggtctttgcggtcattcatagttgaatcctcacttaatcaaaaaagtcagcacgcatttcatcgtagctgggatagccgtaggcgatataattctcgttttcaaactccacagtgcctttatccagggtgtgttcccccagaatatcctgcagttcgtggcgctccagaaacacaaacaccgggccttccgggtgggtatccatatggtcggtctcctgcagccactggtacacattatccgggtcttgcagttcttcgccggggttccatacgcgaatatcaaacgcaccgttagaaagctccaccataatattgccattccagaaagtagcgtacccttcggtatagcctgccacacgcagggctgctaccgcttcctcgtggttggcggtcatgttgcgcggccaaagctttgtgtaatagtcgttgccgcaccacagcagcagggctgccatcatgccaatgcacgcgccccgccagaaacggcagcgcggcaggcggtacagataatccaccgccaccggcatcatcagcaccacaatggggatattgtaccgcgtgtaatagaccatgtcggtgaacaggtacagcccatggtaaattacaaaggcgatcagtgccattacgtagatcagcttttccggcagggtgtaatcctgcgggcggcgcaccaaagaaacaaacgcgcaaatgagtaccaacagcgctagaaaacagaatgcattgtaaaaaaggttggtcgaggttatgtacccgctgtcctgatggccgaagctctccagccagccggtaagcagccgttccagccttgtgccctcaaacgccttgaactgtacaccctcctggctggtgtagtggtaaatgtggcgaagcacttttgcattgatctgccagccgatgcccgcgccaagcagcgccgctgtgctgccgaacagcatccggcctgttgccagatccagttctggcagggtatcaccctgccgcgcaggagagcggagaaccgccaacagaagcgcgcccaaaagcaacggcagatacaaaatcaaaagctggcgcagcccgttggtgcccagcagcaccgcaaaagccgttattatcattagctggatgacccgtgtgcggcggcacggcgttttcatgtaccggaacagcagccccattgtaaaaaaggtagccgtaatgtagggcgggtagctgatcgtcagcagcaggatacggaaatacgcatcgctgaccggtgtcatcattactgccgcaatcagcgggaataactggcgtatgccagcctgccagcagaaatacaggcaggacaacaccatcagcgccagcacgataaaagtaccgatttgccgcactttcagccagttatcaaacaggaaaaacagcggggtaaaggcccaatggatgttgaacacccgtagctcggtagagtaaaaccaatcctgcgtaacgattttatgctcctgccgcagcaaatgggagaggaccagctcgctggacatatcggaatccagcagataatacatccgcccgtagacgacctgccaggtgcgccagcaagcaaaaataaagcaggcccagctgaaaagcataaagacataatgccagcgcttttccctatcaggccgccagcttcgtaccgcattccagcgggcttgcactgcagttttaaatggcatggaaagctccttacatttcatttgccaacctctccgggtcaggcagtttgaaggtactgcggaacagttcgatcaggccatcttcctgcatgcggctcagttctcggcttaaagcgctacggtcacagttcaggtaggcggccagttccgcgcgggtcatcgtgatagtaaaggtgtcgctgccggtctggtcgcgctgttccagcagccacaggcagatgcgcccgcgcaggctcttgcagcacagtaattccaggcggcagtccagcgaaaaatattttccgctgatcgtctccagccagttctgcagcagcttccagtgggcagcgctcaactctccgcttggccgcagcataccatcgtagggcaggtacagcaccaggcagggaacagccgccgtcacgttgaccgggcttttgctgcggccgcctgccagcacatcggcaaacacgccgcccggccccatgcgggccatcgtgatgggcgtaccgtcaggcattggcttggtggctgtgatctcgccttccaaaatgatgcccacgtcttttgtctcgtacccggccatcagcagcagttcgcctttatcgtaccggcgcacccgcggggccaggctttccgtcagcagggtcagctccgcatccgtcataccgcgcagcagacgggtcttgcgcaatgtatcaaaataaggggtgtactccatgcaggggtcctctctcaagaatgttgcacaggcaacagacattttctatttattatagtatagtggggcagcaaaagcaagagatgtttctatcagcatcccaaaaagagaggaacagaaaaatcatgaaactgaaacgtattctttctgctgttgccgcctttgcgctctgcgcatctctggccggctgcggcgcatccgcatcttctgtggctgaatccaccgccgagtccgcttctaccgaagccgtctccaccgtggaggaggaagccagccccgaaacctctgccgagaccactgccctgcgcgtggctggcctgaaaggccccaccaccatgggcctggtcaacatgctgacagctgacgatgccgccgacctggtcgacttcaacatgtacggtgctgccgacgaggtcgtgcccctgctggtcaagggtgacatcgacgccgccgctgtgcccgctaacctagctgctaccctgtaccagaagaccaacggtgccgttgaggttgcctgcgtcaacacgctgggcgtgctgtacatcgtcgaaaatggcgagaccgtaaacagcgtcgctgatctcaagggccagaccctcgtcaccaccggcaagggcaccacgccggagtatgtcctgcgctatgtcctgtcagagaacggcatcgaccccgacaacgatgtcaccatcgagtactgcagcgaagccaccgaggctctgagcaaggtccaggctggcgaggccaccatcgccatgctgccccagcctttcgtgaccagcgctctgtcccaggtcgagggcctgcgcgttgccctggatatgaacgaggaatggcagaaggtcgccggttccaagctggtcaccggtgttctggtcgtccgcaaggatgccgttgaggccgatgccgaccgcttcgccgctttcatggacgcttaccaggccagcgtggacgccgccaacatcgatctggaaggcaccgccgccctgtgcgaggagtacggcatcgttgccaaggctgccctggcccagaaggccctgccccagtgcaatatcgtgttcgagaccggcgaccagatgaaaaccgacctgaccacctactatcaggtcctgttcgacgctgaccccaccagtgtgggtggcagcatgccggctgacgacttctactatgccggttaaattctggcagcgagccgccgccctggccgcatggatcgtggtctggcagttggcggctgtctctctggggcatggcgggttatttctcgccacaccgatacaaacattgcaggcgctggctcagctggcgcctacagctggtttctggcagcgcatcgtgttcagtgctctgcgcatattggccgggttcctgctggcggtcgtcggtgggctggtgctgggtgcgttgggtgcccgctggcgctgggtgcgcatttttattgagcctgccatgcagcttatccgcgccatgccagtagccagctttgtcatcctggctttgctgtgggtgcgcagtgctaacctttcggtggtagtcagctttacccatgtgctgccggtggtctacgccggggtgcagggcggcattgctgatacggactctcaactgttggagatggcccatgtctaccgcctgccgctcatcactaggctgcggtatatctggctgcccggcattttcccgtcgttttgtgaaagctgcattgccgccatgggtatgtgctggaaaagcggcgtctcggccgaggtcatcggcctgccggaccattcggtcggcgacgcgctctaccgcgccaaaatcaccctgtccacacccgatgtgttcgcctggacgctggtcatcgtgctgctttcggcgctgctgtccaccgtggccgcccggctgttgcgggccgtaaaagcccgtctttgcggggaggtgcaggcatgagcatcgttatcgaaaacctctgcaaaagcttcggcacccacgccgtgctgcaaaatttcaattggacggtagaccgccccatggtactgatgggcgtttccggctgtggaaaaaccacgctgctgcgcatcctgtcagggctggagaccgccgacagcggcaccgtcaccggcgtggtgacccctgccgtcgtctttcaggaggaccgtctttgcccccagctgactgccgtagacaaccttgtgctgacaggccacggtctgaccgccgcccaggcccgcagcgacttgcaatcccttggctttaccgaggccgacctgcgtctgcctgccgtgcagctttccggcgggcaaaagcgccgcgccgccctgctgcgcgccttgctgtgccaggatgcccaaacgctgctgatggacgaacccttcaccggcatggatgccgacctggtgcgggatgccgccgccgttacccgccgcctggcaggggagcggcccacaattttggtcacccatgatcgcaccgcagccgagctgctcggctggcctattcgcgaaatttaaacgcatacaaataccgcccctgccctcaaaaaggcagaggcggcattttatatttcacatcaattcggtcaaaatagagttctgtaccaccataccggcgggagtaaggcgaagcgttttctcgtcaaactcggcgtagccgtgggccacgcactggcggataaactgtttctgcgccgaggtaaagctgccgccccagcggccgtattcggctaagcttaatcctctgcgcaggcgaagctgcatcagcaaaaaatcctcggccgtgcaatcgccctccatcgcttcggcagcggtgccctcaataaacgcctgcacatcgtccggccagtatttccgtacacggcccacacaactgtgggccgcagggccgtagccctggtagtcgcagcaatcccagtacagcaggttgtgccgtccctcatggccggggcggcagaagttactgatctcatactgctggtacccggccttttccagctgggccaccgcatataaataaaagtccgccgccgcgtcgccgtccggcaggcccgcgggcgggttgcggtaaaacgccgtgcctggctctacctttaataggtaagccgaaatatgcgtacagccaccatcccgcaacaaggcaagcgtagcatcaaactcggcgttgctgtactccggcagtgccagcatgatgtcgccgcagatttcctcaaaacctgccgcccgcgcccaggccagtgcctgtgcggccctttcggcggtatgggtgcgccccagccgccgcaactgggcgttgctggcgctctgcacgccaaagctgatgcgcgtcacccctgccgcacggaagcctgccaagctttcctgcatcaccacatcggggttggcctccagcgttatctccgccccaggcaaaggattcgccgccgtaatcaggctttctacctgggcaggcgaaagcagggcaggcgtcccgccgccaaagtagagcgtatccgggcggcggtcgttctttgcaagctctcgcagcagcgcacttacataggcctgcggcactccccgcgcaccgggagccgagtagaaatcacaataccggcatttggcccggcagtagggaatatgcagataaattccgtacaaatcagacatttttcaccttttatccatggttcttaatagttttgtgatgaattgacatcctaataacagtataatacttcatacagaaaggggatttcaaccatgtatcagaattacaatgatatttcttatgctgaaagtccgtttggaaccttaaatcaatatatgaccaagaccttcggctggatgtttgccggtctgctggtcaccttcgccgtggccatcggtgctatttccaccggtttggtctatgctttcatcaacagcggcgtcttcttcatcacctgcattgcagagctgattttggtcggtgtactgtccgcccgtgtcaccagcctgcagccaggcaccgctactggcatcttctttgcctatgcggcgctcaacggcctgaacctctgctccatcttcctgatctatgatctgggcagcttggtgctggccttcctggtgggcgctgtctacttcggcgttatggccgtgtacggtgctaccaccaaccgcagcctggtcggctggggcccaaaattgatgggcggtttgatcgccatgatcatctgctccctggttggcagcctgttcagcctgtttggcttcagctttggctttggtgatctgctgctctgcgccgttggtctgttcctgttcatgggtctgaccgcctatgatacccagatgctcaagcatcactacgcctatttcggcggtgatgcagccatgctgcacaaggcttccattatcggtgcactgaacctctacctcgacttcatcaacatcttcctgtacgtggtgcgtctgcttggccgccgccgcgacagctaaaccgcccttgacaaatcctgccgaaaccgctatactaaatccgtattcgttaaaacacattgacggagaaagtacgcgcggttcgtttcggaccagagagagcggtcaccggctgcaagccgcccccaagcccccgcgccgaagttcactcctgagtggtgcgcgtgaacggcatacccgcttagtagtacgcaacggctctgcaccgttaccggcagttaaagagtgccgcgccttttttgtgcggaacacgggtggtaccgcggagttttgatgtgcaaggcttcgtccctgacaagcacagggacgaggcctttttgttttgtcccgcaagacccataaacagaggtgtactatggaagagaaaatcaaagagctgcgcgcggcgattgaagaagctgccgccgctgtcaccgatcaggcacagctgtcggacttctggcagaaattcctgagcaaaaacggcgctgttgccgggctgaccaagtccctgcgcgatgtgcccaaagaggatcgtcctgccgttggcaagaccatcaacgagttcaagcagtgggccgagggccagtatcaggccctgtccgtccaggtggagcaggctgccctggctgcccgcaacgccgccgaaaccgtggacatcaccatgcccccgaaggttcgcctgaacggcagcctgcatcccatcactctcgtcaagaacgagatcgtcgacgttttcgccggcatgggctttgagatctacgaaggtcccgagatcgaggatgacgaccacaacttcacccgcctgaatgtgcccaagaatcaccccgcccgcgatatgcaggacaccttctatgtggccgatgacatcgtgctgcgcacccagaccagcggcggccagatccgcgtgatggatatggaaaagccccccatcaaagtgttggtcccgggccgcgtcttccgctctgactccgatgccacccactccccgatgttccatcagatggagggtctggtcgtggacaaaggcatcactctgtgcgacctgcagggcatgctggacaagttcgtccaggccttgttcggcgctgacgtcaagacccgtctgcgcccgtcctacttcccgttcaccgagcccagcgtcgaggtcgacgtttcctgcttcgagtgcggcggcaagggctgcccgctgtgcaagcacaccggctggatcgaggtcctgggtgccggtgttgtgcaccacagcgtgctggagaactgcggcattgaccccaacgtctattccggctttgcctttggcatcggcatcgagcgtatcgccatgctcaaatacggcatcaacaacatcggcctgatgtttgaaaacgatctgcgcttcttgaagcagttcgaggattgatgggggaggagtacagattatgaaagtaccgttcagctggttaaaacagtatgttgatattgacgtcaccgcacaggagttggaagataagctctttggctgcggctttgaggtcgaagaactcattgatctcggcggcgagatcagcaaggtcgttgtcggcgttgtcaccgagtgcgttcctcaggagggcacccacctgcatatctgcaaagtagactgcggcgagtacggccacgacatccagatctccaccggcgcttctaacgtttacgagggcatgcacacccccgccgctctggacggctccacgctgcccggcggcatcaagatcaaggccaagcccctgatgggtgttgagtccaatggcatgctttgcagcggtgaggaactgggcctgaacgacgacctgtatcccggcgctgaggtctacggcctgctcgacctgcccaaggataccgttcccggcactcccattcagaaagttgtcggcctggatgattacatttttgacatctccgtcaccgccaaccgtgccgattgccagagcgtcctcggcatcgcccgcgaagttgccgccgtgctgggcaagcccctcaagatgcctgccaccgactacaccgtctccgataccaccgacgaccgtctgtccatcaccgtcgaggccccggacctctgcccgcgttacatcggccactatgtccgcaacatcacccccggcccctctccgcgctggatgaagcgccagctggccctgtgcggcctgcgcagcatctccaacgtcgttgacatcaccaactacgtcatgctggagatcggccagccgatgcacgccttcgatatggacacgctggaaagctgccagatcatcgtccgccgcgccaaggatggtgaggagatcaccaccctggacgaaaagaacttcaagctgacccccaataacctggtcatctgcgatggttccaagcccgttgccctggccggcgttatgggcggcctgaacagcgagatcaaagacagcaccacccagctgctcttcgagagcgccaagttcgcccgcgacaacatccgcaagaccgcccgcggcctgggccagaacaccgatgcctccagccattacgaaaagggtatttctgagtacaccaccgagctgggcatggcccgcgccctgcacctcattcaggaattgggctgcggcgaagtcaccgctgcacacttcgattgctccgccggtgccccgcgtgagggtaagcacttcaccgccaccatcagcggcatcaacgccatcctgggcatcaccgtgcccaccgatgccatcctcgacatcctgcaccgtctgcagttcgaggtcaccctcgaagccgacggcaacaccatacaggtcgtcgcgccccgctggcgtgaggacatcgaagtcggcgagcctgacctggccgaggaggtcatccgcgagtacggctatgaccacatcgtacctactttcctgaaggctgcccaggtcaccaccggcggcctgaccgctgagcagaaggcccgcgccaaggccaagcgcaccatgtgcgcccagggcttctacgaggccgagaccctcgcgttctacgccgatgccgacttggatatgctgcatatcgctgccgacgccccggagcgcaaggttatccgcatcctgaaccccatttcctctcatctgaccatcatgcgcccgctgctggctccgtccctgctgaacgttgtcgttgacaacctgcgcaagggcaacggtgagggccgcctgttcgagatgtccaacatctacatcccgaagcagctgcctgtcaccgaactgccggaagagcgcctgcacctgggcttcgccgcctggggcagtgacgaggatttctttaccgtcaagggcgctgtcgccgctttgggcgatgctttcggcgtggggctgaccgtggagcgtgccgccgatgttgcctggctgcaccccggcattgccgcttacatcctgtgcaagggcgagcgcgtcggcgtcttcggcaagctggccaatgatgtcacctctgagctgaagctgcccaaggacagccgctccaacctgaacatctacctgggcgagatcgattgggtcgccttccacgctctggtccccaccagcctgcactacaccccgatcccggagtttgccccggtccagcgcgatctggccctggttgctcccgaaagcatggagtgcggcaccctcatcaccgagatgcagcgcgcctgcaagcagctgaccaaggtggagctgttcgacatctaccgcggcgaaaagctgggcgctgacaagaagagtatggctttcagcctgtacttccagcccggcgagaagcccttcgctgccgatgaggtcgatcgcttcgtcaagaagatcctcggcaacctgaagttcaagcttggcatcgagatccgcgagtaattttataatttctaagccgctgtgcgctttttgctgcacgacggctttttctttgcaaaagttttcaaatcggacacattctgcggtacaatagaggcaaaggaggttttttccatgcatccgattttagttgtagacgacgaacaggctatcgccatgctgatacgccgcatcctgaccgacgcaggctaccgctgcgaggcagtgaccgacagcatcaaagccgccgatctgctggagaaaaaacagtacgacctggtgctgctggatattatgatgccccaaatcgacggctacgacctgctgaactatatccgccccaccggcacaccctgcatcttcatcacggccaaagcggcggtagaggaccgcgtgcgcggcctgcacagcggggccgatgattatatcgtcaagccctttgccccggccgaattagtagcccgggtagaaagcgttctgcgccgcgcgggccgcagcatggtagtctaccacctgtgggatctgaccgtagacaccgctgcctgccgcatccagcgcggggacgaggagatacgcctgacgcccaaagagtacgaactactgctgcttttcctgcgtaaccgcggccgcgcactctaccgggactatctgtacgaaaccgtctggggcgaggatgacattgccgacagcacccgcacgctggatacccatgtcacccggctgcgccgcaaactgcatctgggcgaccgcctgcgtaccgtgcgcaatgtgggttatatgctggaaaaagagtaaaggcaacaccgcacaattcccgcctaacggcttaagcaccgctccggcggctgcggcacggcaac

SEQ ID NO: 8013 - DNA, 6113 bp, Unknown
  gut microbiota DNA sequence
tgtccataatacgcattgggtccgtgcttgcgcataaaatgcttgtccaatacatgttggggcgcaggctgggcgccggggtcgatggtcagggtcaaaacggccatcttggccacctcctccaacacggcggcgtggtagacggcctcggcggcatccttgccccaggtaaacggcccgtggctggcgcacagcacggcgggcacatgcaccgggtcgatgccgcgccgggcgaaggtctccagaatcaccttgccggtgttccgctcgtaatcctcgtcaatttcttcgggcgtcagctcccgcgtgcagggcaccgggccgtaaaaataatcggcgtgggtggtgccaaaggcgggcaggtcccgccgcgcctgggcgaaggccaccgcgtaggtggagtgggtatgcacgatgccccccagctgcgggtaggccttgtacagctccagatgggtcttggtgtcgctgctggggttcagcccgccctcgaccttgcggccgtccaggtccagcaccaccagcttgtccggggtcagctcctcatacgccacgcccgacggcttgatgaccaccagcccggctttgcggtcgatgcccgagacattgccccaggtgtaggtcaccagtccccggcggggcaattccatgtttgccgcataaacctgttgtttcagttcttccagcataggctcgacctttccgcgtgttgggctgtttctttgcccctattataccagcagttgcgcaaagtttccagcccctttttattcccgccaaaatctgctataataggcccaaaacggataaagagaggaacacactatgcaggaagaagccttgcagggcaacgagagcatcgagcaggccattgccgccttacagcaaaacgccaccccggagctgctggcccacgcgctgacggccatccgccgccgcatccgggaaaacggccagtttgtggtagccgtggagcccaaccccggcaccacccagatgagcctaaaagtcgtgcagacccccgacggccgcgcctggtggtacgcctttaccagctttgaggaggaaatgcggggtgccgagcaggtgcagtccacctttatggcggacattggcaaattgttggaaaccgccctgaccgtgcccgagatcgagggcatcatcctgaacccttggcaccgcaccctgatgctggataagaccttgatccagatcattctgccggaaagcccggtggtaagttgaggacgcgccgatgaagattctggtaagcgcctgcctgctgggcgaaaactgcaaatacagcggcggcaacaattacagcgaaaaagcagcggcctttgtgcaggggcatgaggtcatccccgtctgccctgaggtactgggcggcctgtcggttccccgcaccccggcggagatcgtaaacggagaggtcgttacgaaggacggcgtcagtgtggatgcggcattccgcgccggtgcggccagagcgttggccattgccaaagaaaacggtgtggaactcgccatcctgcagccgcgcagccccagttgcggtgctgccgaagtatacgatggaaccttcaccggcagaaagatccccggccagggcgtatttgcggccctgctgcgggaaaacggcatccccgtgcgggatgcagatactttaggcaataccgcacaattctaagtgccgatgcggcgagcgagaagtacaagctgctaagcaaaaagcgcagataatactggatgtattatcgagcatttttgcgacgcagattgtgcttcgcagccgcagcagcggtgcttaagctgtaaagcgggaattgtgcggtgttgcctttataataaacttgtcgaaatacgtaaaacagccccgactgtctgccctacctggccggaacaggcactccgcgcgaatattctcgcgcagatcagccttgcgcttaaccgcatctggaccgagtggtatcccagccggggctatagttttaatatcaccggctcgccgggtgtcgaccaggcctacgtttcgggccgcacggtgtttgcggtgatggaaaaactgaccgccgaactgttcaacacctacgtgcgccgcagcggcgaccgggaaccctactacaccgagtattgcgacggcaaaaccgtcacctgcccgggcatgaagcagtggggcaccgtcgaccgcgccaaagagggcaaaaacgccctgcaaattctgcgctactactacggcagccgggtggagttggtcaccaccaataacatcgccagcatcccctccagctatcccggcagccccctgcggcggggcagcaccggcaccaacgtgcgcatcatccagcggcagctttcccgcattgccaaggattacccgttcttcggcaagcccaccgtgaacggcatatttgatgagaccaccgaaaatgtggtgaaaaaattccagaagcagttcagcctgacggcggacggcgtggtgggcaaaagcacctggttcaaaatcagctatatctacgtcagcgtcaagaacctggcggagctgaccagcgagggcgagaccgccgacggcacccagagcaccggcggctggcccggcaccattctgcggcgcggcagcaccggcagcaatgtggagcaggtgcagttctggctgtccgacctggcccagtttgacagtagcctgcccgccgtgacggtggatggcagctacggcgcagccaccgagcgggcggtgaaagtctttcagcaaaagcaaagcctgacagcggacggtgtggtgggacagacgacctggaatgccctgtatgccgcctggctggaagcccaaagtgacctgggcggcaccgcctggcccggcactgccctgcggcggggcagcaccggcatggaagtgcggctggtgcagttctggttgcggctggcagcggacaactacagcggcctgtcccacgtgaccgtggacggcagctatggcccggccaccgtcagggcggtgacggcgttccagaaccggttctcgctggcggcggacggcgtgaccgggcgcagcacctggaacaaattaaaggaagtcgccctggccgtggccaacaaaattgtggactacggcgtagcgcccggccagttcaccgccacggtgcgccagggcagcagcggcaccgccgtgcgggccgtgcagttctacctgcggcggctggcggcctattacagcgatgtgcccactgtgacggtggacggcacctttggcgcggcgaccacccgcgcggtgcgtgcctggcaggagcgggcgggcctgaccgtggacggtaccgtcggccgtctgacctggcagagcatctacgacgctgtgcaggccttggagaccagcggccctgtggtacgggtggtgggccttacctcccccaccggaacgctgagacccggcgacagcggcccggaaatattgcagctgaaccggctgctgctgttcctgaaccagtggatacccgagatcaactttttggccggcaccgagccgtccggtacctttgacccggagctggagatcgccgtgcgcagtgcccagcgctactttgggctggcggagaccggcgaggtgacgcccgcaacctggaccattttccgcgatgccgctttgacgctgctggccgtgacccccgccgcggccgggccggaaccgggcggcgagtggcctgcctcggccctggcattgggcagcgcaggcccggcggtattgcaggtgcagcagtggctcaacctcatcgccgccgtggaccagggggcaaactttgttcccgagaccggcgtatttgacgaagctacgcaatcggcgctggaaagctaccagctcaccgccggcctgcagcccttgggcgtggtggacgccgacacatgggaaagcctgcgcctggccgcccagagcatttgccgcaagtgccggaacgaggagggataactatggcaaaactgttcgtgtacgatgccttcaacaaccgcttctacacctataacctgaacgagaatgaccccatgccatacagctacggcagcacgttgaaattgcgggaattccgcggttccagcggggccaatgtgctgtggaccaccaccgccgccatggaggcctggaacctgacccgccgcacctacggcaaatccatcccggtgggctacgccttcaagcgcatctgggagggtggccacggcaccaccagccagcactacgcgggcgtggcctttgacgtaggccaaagcagcggtgcggacgcccgcaaggccatctacaatgccgctgtcgccaccaaggcgtggggctatgtggagccgctctcgatgacgccgacctgggtgcactttgaccgccgctacggcaaacccgcctgcgccaaaactacggcaggctaccctacggtacgccgcggcagccgcagcacctatgtgctggtgctgcaggacgccctgaacgccctgggttacaccaccggcacgctggacggcgtgttcggtgccaggaccgagaccgccctgaaaggtgtgcagcgccgctttggcttgacggcagacggagtctgcggatgcaacagctggaaaaagatcaccgaggccgtcgtcggtatcggccgcacctcgaccgtgattgataaataaagcagggtctggtatactaaaggcaataccgcacaattcccgcctgacggcttaagcaccgctccggcggatctccgcgccaagagccgccgcaagcggcggttgcgctccgaagcgcctcgctgcggctcggtgtgcggcacggcatctgcgttgccaaaatgctcgataagacatccagtattatctgcgcttttggcttagcagctgccgcacctcgctcgccgtatcggcacttagaattatgcggtattgcctaaaagtacagccgcagccttatgcctgcccggcagggcgcggcaaagacaagaagcaaggatgtgttgggaatggatatgatggagtttctgcgcacgcgccgcacctaccgccggttcgagcagcgccccgtggcgcctgaaattctgcaggagtgtgtggacgccgcccgcatcgccagctgcggcgccaaccgccagacggtgaagtatatcatcgtgcaaagccccgaagctgtggccgccgtgcagccgctggtacactgggccgcctatctgccccgggagcagggcacccccaaggccgacgaggtgccgacggcgtttatcgccgtattgcaggacgaaaacctgcccggtgccaatgatatggacgcgggccttgccctgggcagcctgaccgctgccgcctgggcccacggtgtgggcagttgcatcatgggggccatcgaccgcccggccctgacaaagctgctggctctgcccgaaaagatgcgcctgtgctgcatggtcgccctgggttaccccacccacaagagccacttggtggaaatgcagaacggcagcgtaaaatactacctggatgaggccggcgactactgcgtccccaagcgcccgctgagcaaagttttgctgaaaacgctgtaataagaaaaaaccgcagttgaaaaataaaaagtccagaactgttggctgaaccagccacacagttctggattttttggttgtaggaatgagtatgacaaactggaatttatatatgtttttgcaaatacaccatccgatgcagttttctatgcatccgatgagcttttttcggtagcgtttccttttaagccaccttggtctttcgcagatacccccatgctgccagtccaacgagcagaatgatcttgatcggtgccgatgccagcagtacatctgcctgaaagaaagcatgcccacctgcatagagaaaatcaaagctgatcattttatactgcaatgcgttggaaagcccaatgccccctgccggaagcagggtggacagccattctccgaaggaacccggcacgaccatataaacaatcagcggtgccaccacactgatcagcgccacagacaaagcggtaaggttgttcttggcccatacggatgccatcagcacaaaggccacctccgcaaagaagatcaggaagtttgccaccagcatgacccactccatct

SEQ ID NO: 8014 - DNA, 35951 bp, Unknown
  gut microbiota DNA sequence
aacaaaaccgtgacattgccgccgtacactaaggccagaacataacaaaggagatgctttctatgaaataccgcacagcttttgccatggctctggccgccctgatactcaccgcctgcgctgctgaacctgccgcaggcatcactccatcggcggaatccgccgcgctcgctgtcaccacgcaggagccccccgccgcagcagttgccagcggtaagccgctgtacatcctcaacagcggcggcacagccccagagtttgctataacggacaccgccgcctatctgcctatgaaattcggcgccacactgctggctaccaaaattgattttgccaccgcacagcagcaggtgctttgcagcgcagacggctgctcccacgctgatgcaggctgcccggcctttatggccgctgacgatgatgctttgtcgcagtactacaccggcgggttagttgccgcaggggacaggctctactggtttatcaatggtggggcctcgcccgtcaatgtccgggtcgatgtcagcgcactggacggcagtaatcgtcacacgattgttgagaacggcagtatattccagctggattgcacgatgtccatgtgctttaccgatggtgatgctttgtatcttgccaccgccgccagcagccttgtccggctggatgataccggcctgacctcggttttcccgctgaacgatgggcatcccacgcccgaaaacccgctttatacgcaggacaacacgccccgctgcaccatccttggctgctggcaggatatggccgtctttgcctgcacaccgtccctcagcggcagcggcacaggcctgataggcgtgcatgccgacggctctgttacggatttgggcagctacagcatcgactttggcagccctaccgattggatttccaccctgcatgacggcaagctttattacgttcccggcagcggcgaccaggccgaaaccatcgaggtcaccgaccttgccacccaaactaccgagacgctcccgctgcctgctggcggtggctggaacaattattgcgtcgcctacggcgatggcaccattggcctgatcagcaacgaaatcaactatgcctggacccccggcagcgataccgccatagagttggcccccacctggtgcaaggacactgctgttgcccgctctccggtcatctatgccgagaatggcacgatagcactgatcaaagtcagcgaccgcgccatttctacgccgcagctcaccccagaggggcttccatatcagcgccagcagacattttctgacctggccctgatttctctgcaagacttattctccggcagccaggattggacgcccgtcgccatgcttgacggggcactttttgattgagcccacaggccactacatgaggatttttctatgaaatttgccaccaaactctcccttggctgcatcacgctgctttcctgtgcgctctgcgcggcggggttgatcttgaccggcaaaagcttttccggcagtttagagaccacccgcgccgccatgcaggctcagcaggccaaagaaaaatacacactcgagcgctgcatttttaccgctgccgaaaccaacaccctgttctcgaccaacactatgttcgagaactacaccctggccaccgccgcccagcagtatgccgagcaaacggccgatgccaacagcggccttgctctatgggtcaacggtgcatatacgctgtattccaacctgcccacggcattgccgcgtgctgtgcaaatgcaggccgtttccaatggagctgaccactggcagctggctcactgcgcggggtactggtatctgctgttgtcccagccattggatattcccggcgtgcaggcagacatactctgctcctacgatgtcaccagcgtgtttgccacgcgcaacgcccagctgcgggcctggctggcggcttcaactgctttgctggcgctgggcggcgcggcggcagttctcttcagccgcctcgtcacccggccgctgaccaccctgcaatctgccagtgagaagattgctgccgggcagtatactgaacgcacccaggtgcagaccaacgatgagattggtgtactgagccgcagttttgacgctatggctgctgcggtagagactaaaattggcgagatggacgaaacgctgcaaagccagaaagacttcattgcagccttcactcatgaggtcaagacccccatgactgccatgcttggttatgccgacctgatgcgtgccgcgcctgacgacgcagacttgcagcgggaatctgccaactacatctaccacgagacccgccggttagaggaactcagccgccgtctgctggccctgatgggcttagacgccgctgaccgcctgacgccggagcctgtcagcgaccgcagcctgctgaatcaagtagtgcgcagcctgccccagggcagcacacccgtgccgcgcatcatcgcctgcgattgcgccgtgcaggtggaccgcgccctctgggtggatatgctgcgcaatctgaccatcaacgcccagcacgcctgcaagggcattgcgggggcggccatcacactgcgctgccagcagcaggggagcaccgccgttttcacagtggccgataccggctgcggcatccctgacgccgacctgccccgcgtgaccgaagccttttatatggtggacaagtcccgcagccgtgccgatggcggcagcggcatcgggctggcgctgtgcacccgaatcgcccaggcccacggcacccaattacaaatcgacagcaccgagggtgtgggtacgaccgtgaccgtatccgtacctatccttagccctgatgatttgcctgccgccgatgcagacggaaaggagcagccatgaaaaaatatcgccttccactggcctgtgcgctggtggtcctcctcagcctggcgctgcctttcgctgttttttcgctgtgggacaaggcacttctctccgccccgcacagccagacggccgccgagggcctgtccgccgaagcccgcgccaattccactgcctgcacgctgtacgcctgcagccatgtactgaacgtcccgctgggctacaacagcggcagcgaaaacccctgggcgcagaccgccatcgatgacgccacgctggaccgtgctcgcagtgccctgcgcgcccttcacgatgccgggctgctgaccgacgtccaacttgccaaagccctggccgtctgcacccaaaacgacaaagccaccacctggaacgccgccaccgcccccggcggcctgacacaggtaagctgcaatgtcatagaaaattttgatgatgaatcgcctgattcttacagcagctttgcattgaacctgattctgacaagcgctgacgccccggtctatttcaactaccaggacggccaggataccacccaccttatcgcggacgccacctacctgcaaaagtacagcacccttttggggctggattcctttgccgattggcagtacccggattggagagccgccgtgcgggatttcggcgtcgccgcctactgcgagaccgcacagctctacctcaccgccaactgccgctatggcatcaccctctccgccgccagcatgaccccgcaggactatgctgatcttgacgccctctacactaaaggagacaccccatgaaaaagctactctccctcgccgccgcactgacctttacgttaaccgcctgtaccgcccctacatctgatactctaccagccacccccgaaaccaccgcgccggaagaatctaccaccacccaagacgtcggcagtggggaagtgcgcatgctaagcgccgcggacggcgggatctactatcagacttttgccgacagtgaggtcaaccacgaggtcgacattggccgcaatcttgtctatgcggtcgaggaaaccactggcctggcccgcccggcctgcaatgtgcccggctgcacccacgacagtgatgcctgcccagcctacatccaaggctcggccacttgttatgccgatggcagcgaggtctatctctacatctgcctatataaagaagcggaacatacaaccgttttccgcttagagaaaatcaacgcggaccatacccaacgtacctgccttgcagatgatttaccgtttggatgggtacagcctatcggtatggcggcggatgacacgcacctttatttcttaaccactgacaactacagcaactccaccatgtccgccatgctgctggccgtttctaaagcaaccggcgatatgcagacgctttaccagctggacggtcttgaaaacgggcgcggcagcacggggcaagttactttcgtcaatctggtcggtgccagcggctgccagctgtattttacccattccgaaaggaaccccgatcctaataactattataattccgccgtgcaggtctggtgttatgaccttgccgccaaccagtgcaccgccgcccaacggtacgaggtcgatgatggcaccatcgtcatcccgtcgcaggaagtccacgatgattacggcaacacctacacaaacagcggtgtcatcagccacagccacctctattacaccctgaccggctactacgggtcttttagcagcggcattgccgaatgcgacaacgagcacggcaccgccgccgtgctggatgcagccaccgggcagcgcaccgtgcttgccgaaaacctgcccactaccaccgccgagtacgaggcaaactacagcgtcgcgcgttatcacgatggctggctgctgacggtggacgaatggggccgcggttctgacggcatgggcaccggcgatggcaccagcgcacaatatttctgcgatggcagtggccagatgaccctcatcccgcaaaagcgttatgccgagggcaagggtgtacaggacatccagattttggacatccagaacggccaggtgctggtcatctacgatgaacagattgacacccgacagggcattgacaaatccggcacagcctacacctacacgccagtctggcgcctgtacggtgtcatgccgttggaagacctgcttgccggcagcatcgatttcactcccttgcagttcatttcctgagcattgacagcattgacgcagacaactcaacaaaatttgccgtcttttgcttgcatattttcccgttttggcgtatagtaaaggcagtattctgacagggagaagcaaacactatggccaaaattcaccgcaacgatatgcccgtccagcatcccacccaaaccatcaccctgcccaaagagccggaacctgacacccccaaggctaccgcaccccagttctacgaccaggacaaggacgccgactacgaggccccgcatccggccaaaggcagggacagcgccgcgaaagcgggcaaagccaaaagcaaaaaggatctggcctacaccatcgccatggtggtttttgcggtcatcttcctggtcagcggcgggctgctggtcaagcgctttttcgacgataaaaagaccgaaaacgaattttccgacctgcaatcgatgatcgacgttgccgctacgcccgccccggccgaggacagcgagccttccaacgccgccaaattcgccgccctgaaagaccagaacagcgatttcatgggctggatctccatcgagggcaccagcctggacttcccggtcatgtacgcgcccaacaacaaagactactacttaaaacacgatttcaagcaccagtacagcgattacggcgtgccgtacctggatgaaaaaacgaccatcggtgccaatgcccaaagcaataacctgatcgtctacggccacaacatgaagaccggcaccattttcggctgcctgaccgagtataaaaaagcggcctattatcaggaacacccctacatcgagttcgacaccctgtacggcgacgccaagtacgaggtctttgccgcctttgccatcgacgtggtacaggacaccagcttcgtctataaccagtacgttgatatggacgaggatacctacaacgactacgtggccgaggtcatccgccgcagcgatgtagacagcggcatccgccccgagtatggcgagcagctgctgaccctttctacctgcgaatattcctcggccaacgggcggtatgtggtagtcgcccgcaaggtaagtccctaatttatttcggtaatagcattacaaactttatttccttttgcaaatgcaaaattttatgcgcaaaatcagcttttatacttgcctaaattttgcaggcgtggtaaactgataaatgcgcaagaactcgtgatgagtcttatggtgtaagaactcggaagagaagaatatgcgcagcgggcggccgtagcccttgacggccgcccgccttttttttgcaaaacagtagacatttttcgtaaaatagaatatacttatgtgcgtatattgttaaaaagcaagatctataccgtactgaacataaacaaggaggcgcaactcttatgtgtggaatcgtcggttttaccggtgccgcccaggcagcaccgatcctgttagatggcctggccaagctggaataccgcggctatgactcggccggtctcgccgtgcagaacgctgccggcaagatcgaagtcgtcaaagccaagggccgcctgaaagtattaagcgagatgacggacggcggcaatgcccttacaggcacctgcggcatcggccatacccgttgggccactcacggcgagccttctgtggtcaatgcgcacccccattactccaacgataaaaaaattgccatcgtgcataacggcatcatcgagaactacctagagatcaaagagcgcctgaccaacaaaggctttacctttgtctcccagacggacaccgaggtgctggcccagctgctggactactattacatgggtgagtccgccggcgacccgctggacgccatcgcccgcaccatgctgcatgtgcgtggctcctacgcgctgggcgtgctgtttgccgacgagccgggcaccatctacgccgcccgcaaggacagcccgttggtggtcggcaaggccgagagcggcaccctgattgcttctgacgtgcccgcgctgctcaagtacacccgcacggtctactacatcgacaacctggagatcgcgcggctgacgcctgattctatcgagtttttcgatactgacaaagaacctgtccagcacgaagcttccaccatcgagtgggacaccgaggcagccgaaaagggcggcttcgagcatttcatgatgaaagagatccacgagcagcccgccgctgtccgggatacgctttccccgcgcctgaaggacggcaagattgatctgtccgagctggctctggacgaggacgctatccgcggcatccaccgcatctacatcatcggctgcggctccgcttaccatgtgggcatggccgcgcgctatgtattcgagagcctggcccgcctgccggtggaggtcgacgtcgccagcgagttccgttaccgcaaccccgtgctggagccggattctctcgcgctggtcatcagccagagcggcgagaccgccgacaccctggccgccctgcgcctgtgcaaggaccgcggcgtgcgcacagtgggcatcgtcaacgtggtgggttccagcattgcccgcgaggctgacgccaccatgtacacttgggccgggccggagatctccgtggccaccaccaaagcctacagcacccagctggcagcctgctacctgctggccaccgagtttgcccgcgtgcgcggcaccctggccgacggccagtacgagaaccttgtggtcgagctggaagccctgcccgaaaagattgaaaagacgctggccgacaaggagcgcatccagtggtttgccagcaagtacgccaacgccaaagacgccttcttcatcggccgcgggctggattacgccgtagcgctggaaggcagtctgaaattcaaagagatcagctacatccactccgaggccttcgccgcgggcgagatgaaacacggccccatctctctggtggagaaggggacactggtcgtgggtatcctgacccagccggatctgttcgaaaagagcgtttccaacatggtcgaggtcaagagccgcggcgctttcctgatgggcctgaccacctacggcaactacagcatcgaggacaccgccggtttcaccgtctacgtgcccaagaccgacccccactttgccaccagcctgtcggtcattccgctgcagctgctggcctattacgtcagctgtgccaagggcctggatgtcgacaaaccgcgcaacctggcaaaatctgtcacggttgagtaattttcaccaaaaagcaaagcctatctttatagaaactgcccgctccgtttgtgcgcagcatgcaacacgacggagcatttttgtgctataatggatgtaagcctaaatagtcatacaaaaatgtcgagctgtcaaggaagtactctgtaggggcgaacattgtccgcccgtgcccgtttggcatagcagttgctttcccatagttctgcacaatatttccatcctattaagattttttatcatttttcataaatccaaaccaaaaggaaacaacatgcaacaggattcaaaacaaatcatcaagggtctgccgcggcgcattgcgctgatgctgctggactgcgggctgatcgtgctgtgctactggctggccgtcatgctgcggtttgacagcggcgatgcctacaagcgggtgctgaccatccgcgctatggcccccatgctggcttacgtgctgccgatctatatgatcgtgttctggttcggcggcctgtacgagatcatgtgggaatacgccggcatgcgtgacctggcccgcctgacttgtctgtcgggcctggccaccggcatcatcatgctgttcgacctgttctatcacagccgccccatttccggcgctgtgctgatctttggtgcggtgttcaacacggcggccatagcgggcgtgcgcttcctatggcggttcagcaggacgctgcacgacgcctgtgttaataaacccgaggacgacacgccgctattgatcgtaggtgcgggcaatgccggcgcctgggccgtcaacctctgcaaaaacaagaatcagagcttcggcaacccggtctgcctggtggacgacgacctgaccaaaaaaggtctgcgcgtgcagggcgtcccggtgcgcggcaccatttccgatattcccgaattggtgcgcaagtaccacatcgtcgagattgttattgccatcactacgttaaaaggtgaccgcctcaccgagatcatcaacctctgcaactccacccactgccgggtgcgcatgctgtctgacccccaggccgtggacgagaacggcaaccccgtagccgccggtttccgtgagctgaacaccgctgacttcctttcccgcgacgagattcagctgaacaacgcccagatctccgagtacctgcacgataaggtcgtgctggttaccggcggcggcggttccatcggcagtgagctgtgccgccagatcatgcgctaccagccccgccgtctgctcatctttgacatttacgagaactgcgcctacgagctggagaccgagctgcgcaacaagtacggtgccgaggctcccgtcatcacgctcatcggctccatccgtgataaagcccgcctggatgaggtattcgagacctatcatccatcggtcgtcttccatgcggccgcccacaagcatgtgccgctaatggagatcagccccgccgaagccgtcaaaaacaacgtatttggcaccaagaatctgctgacttccgccgccgagcatggtgtcgagcgctttgtccagctttctaccgacaaggccgtcaaccccaccaacgttatgggctgcaccaaacgcctctgcgagatgctgattcaatcctttgccagcggcaccgacatgaagtgcgtggccgtgcgctttggcaacgtgctgggcagccacggcagcgttattccgttgtttgaggagcagatcaagcgcggtggccccgtcaccatcacacacccggatattgtgcgctactttatgaccatcaccgaggccgcgcagctggtgctgcaggccggcggcctggccaggggcggcagtatctacgtgctggatatgggcgagcccgtcaagatcatggacctggccacccggctgatccgcttctacggctacgagccgggtgtaaacatgcaggtcaagatcaccggcctgcgtcccggcgaaaagctgtacgaggagctgctgatggacgctgagcaggacaagatgctcaagaccgcccacaacaagatcttcatcgcaccgcccatggatatcgacctggaaaaattctacacccagctgcaggagctgaaagtttcggcccaccacaacgatgacgccgtagttgaatgcctgcaggagatggtgcccagctaccatcccaaccgccgcgtgcgcgccgaccacaccgtcgttgctgccagcggcaacactatgatcctttcccgcgaggagctggacaaagcccgcaaactgcatggcgcaaagggggaatgatgccatgtaccaacgctatgtaaaacgcatcctggattttatcctgtccctggccgccaccatcgtgctggccattcccatgggtattattgccctgtggatcaaagctgattctcccggcccggtatttttcaagcagcggcgcgtcggcaagggcaagacccactttaacattttaaagttccgcaccatgcgcggcgatactccccacgatgtgcccacgcatcttttaaaaaatgccgacagctacatcaccaaaagcggcgcgttcctgcgcaagaccagcctggacgaactgcctcagatctacaacatcctggcagggcagatgagcatcatcggcccgcgccccgcgctgtataaccagtacgacctgatcgatgcgcgcgataaagcacatgccaacgacattcgtccaggcctgaccggcttggcgcagatcaacggccgcgacgagctgcccatcgatgtaaaggccaaatatgacggggaatacgccgctcacctgaccttcggcatggacctgaagatcttcttccacagcttttcctacgtgttccagcgccgcggtgtcgtcgagggcggaactggttctatacaagagccaaatgaacagaaaccgtcaaattgacggatgaattccccactgttttactgggcagtggggtttattttgctcaaatttaaaaaatatacaagaaaatctcgcttttttcgttaaaatatgttgcaaaagtcaagctaattgtgtaaaatatacatcaagagcttttgattttcgggcaagatggccaacggcaatttgcccacaaatatctgaaggggagcacatactatggcgaacagggtcttccagaatgtggtgtaccagatgaaggacgccgtcgaccgcgtggtcggcgttgttgatgaaacgggcaccgtgatttcctgctcagagctggggcagatcggtgaggtgcgagaaggcgtagctgctgcccaccagaccgctggtgatgcttttgtgcgcgacggctactcctaccatcagttctccaatgccaagcataacgattatgctgcatttgtggagggcaccgatgaaacggccgagcagttttctgccatgctgtcgatcagcctgcagtgcatcaaacagtatcacgacgaaaaatttgacaagacaaactttatcaaaaacgttgtgctggacaacatcctgcccggtgacatctacgccaaagcgcgggagctgcacttcgtctccgacgtgcagcgtgttgtcctgctggtccgcgtgacctccggcaacgatatttccgcttacgatgttgtcagtggtctgttcccggacaagcagaaggacttcgtctttaacatcagcgagacggataccgtgctggtcaaggagatcaagcccgacaacaacacccgcgatatggaaaagctggccgcatccatcgtggacaccctgcagggcgaccactacatcaaagcggtcgtcggcatcggcacccccatcggcaacatcaaagatctggcctccagcttcaaagaggcccagattgctatggaagtcggcaaggtgttcgacaccgagcgtcaggtcatcagctacgatcacctgggcatcgcccgcctgatctaccagctgcccactaccttgtgcgaggccttcctgcgcgaggtcttcaagcaggagagcatcgattctctcgacgctgagacgctgttcaccatccagcgcttcttcgagaacaacctgaacgtttccgaaacgagccgcggcctgttcgtacaccgcaacacgctggtctaccgcttggagaagatccgcaagctgaccggcctggatctgcgcaacttcgatgacgccatcgtctttaaggtagcgctgatggtcaaaaagtacctttccgccaacccggccaagtattgatttccataaattcacaaagatttcaaaaagtcctgctgctacgcacaacagcaggacttttttagcattttgcctacagaaaagtgcttgaccgtaacaccccggcatggtatcctattatatgtatgactgtaaccatccacaagaagtcacaagggcatgggagttaaaaccaatgatcgaatttgaacacgtttcaaaaacttacgagacgcacaacgacgaaaacgtagcgctcgatgacatcaatatccaaatcgaggacggcgagttcgtctttatccttggccattccggtgcgggcaaatccaccttcctcaaactgatccagatggaagaaaagcccaccgagggccgcgtcatcatcaacggtcaggaccttaccaagatgaaacgccgcaaggtgccgtatctgcgccgccagatgggtgtcgtcttccaggatttccgcctgatccccaccatgacagtgtacgagaatgtggctttcgccatgcgcgtgaccaacattcctaccaaaaagatcaaatcccgcatcccatatgttctgtccctggtcggtctggaggataagatggaccgcctgccggacgaactttccggcggtgaacagcagcgtgtggcggtagcccgcgccttggcccacggccccaagctcatcattgccgatgagcccaccggcaacatcgaccccgagatgtccatggacatcatgcagctgtttgaggccatcaacaaggtcaacatcacggtggtggttgtcacccacgagcacgagctggtacataagctggcccgcaaatacaacaaccgcgtcatcgagctggccaacggcatggtcgcctcggacacttcgcaccccgaagttgcccgccgctacgccgcccgcatggccgagcgtgagaacggctacgatgagtacgaagattacgatgatgaggaataaataagaggggataccatgcgtttttccagctttacttatctggtcggccagggcctgcacaacctgcgagccaaccggcttatgacctttgcttccatgggcgtgctgaccgtctgcatgctgctgatcggcgccgcctacctgctgggtgtcaacatcgacgccatggtcgagtatatcggcgaccagaacgagaccgttgtctacatggaccagggggccagcgatgaccagattgccgccgctgacaccgccatccgcagcactgagcacgtggtgggcgtcacctacatgtcgccccaggacgtgctggcagtttacagcgacatgctgtccacctacaccaacctgcaggatgctttcgctaacgataacccgttctaccccaactaccgcgttgtggtggacagccctgataacatcgaggccgtttcccagcagctgcgccagatcgatggtgtttaccaggtcaacgccccgctggagatgtccaaggtcttcgtctcgctgcaaaagatcgtttcctacgcctgctacggcatcgtgctggtgctggccattgtcagcatcgtagtcatcaacaacaccatcaagatcaccgtctttaaccgccgcaaggagatcaacatcatgaagctggtcggtgccaccaacggcttcatccgcttcccgttctttgtcgaaggcgtcacctccggcctgatttccgcggcactggcctccggcatcatctgcggcgcttactatgccctgacccgctggtatgccgagaacccttccaatctgtcccagatgtttggcggccaactggtgccactggctgacgtctggtactaccttgtcggcggctttgcgctgctgggcttcgtgctctgcggcatcggtaccgccaccagcatccgtaaacatctgaacgtctgatttacgatttactgaaagagaaaacagaggaacagaaaagcaatgagaatttcccgtcgtttcaaacggatcgtttccgctatgctggccaccgccctagcctttaccatgaccttctccactgatgtcatgccgctggctgactccaagcaggaccagctgaaggctgaggtctccgccaagcaggctgagctggacaaggtcaacgccgcgctgaaagaagcgcagagcaacaaggaaaacgccgaggccatcaagagccagctggaagaacagaagaacctgattttaagccagatctcgctgctcagcgaccagatcaccgacctgcaggagcagatctacctcaagcagaccgagatcgacgataagcaggtcgaggtcgacaacaaacaggccgagtatgaccagcgctggtccgatttcaaacaacgcatgggcgctatgcagatgctcaacgacggtggttccatcgcactgctgtccagcgccaccaacctgtaccagctgctaacctttgctcagacgctggagcaaatcagcagcaaggatcaatccatctgccaggatttggagaaccagcgcgccgatttggagaaccagcgcaccgagctggaaaatgctaaggccgagatggaagccacccaggccagcctgaaggagcagaccacccagctgaacagcaaacaggatgaactggccgtcaatattgcccaggccaacgaggatctggacgaagcctctgcccagcaggaggccgccgaagcggccgcagccgaagcccgcaaaaagctggacgaagccaccgccgccctggactcctatctggaagcccagaacaagaagtatggcaacgcctccattacctgctcactggacttcggccgcccgctggccacctttaagtacatttcctgctacttcggcggcggcggtcaccgcggcactgactatgcagcccccggcggcaccgagatctacaccatcgctgatggcgtcgtcaccgccgccacctaccattacagctggggctactatgtgcaggtctaccatggtaccgattccaacggcaatacctattcgaccctgtatgctcacatgaacagcgcccccgtggtcagcgtaggccaacctgtctccaagggccagctgctgggctatgtcggtaccacaggcaattctaccggcaaccatctgcacctggaaatgaaggtcaacggtgtgttgaccagcgtcaccaactacatctcgtaaggggagggaagtcctgatgaaaccccagaaacataagccagccgtgcgcattttctgtcttgttattgcggtcgttatgattatcagccttttctccagcgttcttttcagtctggcctatactctgtaaaagaccgcactattttgtaaggagccatctgaacccatgagcaaaaaaattagtctcggcgttaccatcaccattgccttgatcgccatggcggtcactttttctctgacgatggttgtctcgatgaatatgttcaactccaccgtgtccagcgtcaaaagcaaggagcgccagtacaacaagctggccgaaatcgaccgttttgtccgctccaacgagtatttcactatcaacgaggacacgctgaacgacaccttggccgctggttacatgctgggcatcaacgataaatacgcccgctactacaccgccaaagcttacagcgagcgcctggccgttgagtccggcaagctgaccggcatcggcgtggccgtcgtcaacgacccgtcctccggctacggccgcatcacccgcgtctacggcaactcgcccgccagcgaggccggtctgcaggtcggcggttacatcactgccatcggcgatatgtccaccaagtccatgaccgacaccgcctccctgacctcggccctgctgggcgaagaggggaccaccaccaccatcacctatctgacgcccgaccgacaggagcagaccgtcgacctggtgcacagcaactaccgcaccaccaccgtttccagccagatgattggcgacacctgcggctatgtccgcatcgacgccttctcctccggcacggccagcgagttccgctctgctgtggacaatctgctgaaccagggcgctgccagcttcatcttcgacatgcgcgacaatatcggtgagaacctgaacgccgcgctggtctgcgccgactactgtgtgccttccggcgtcatcgcccaacaggaggacaaggacggcaacatcaccttgctgcgcatgtccgatgaaaacgaggtcaccgtgcccatggtcgtcctcgtcaacggcagcacctccgatggtgccgagctgtttgccaatgccctgcgcaagatgaacagcgccaccatcgtaggcacccgcaccgccggtaagggtgttgtgatgagcgacgcccagagcttttccgatggctccgccgcctacatcactatcggtctgctgctggacaacgagggccaatcctggaacgacctgggcctgacccctgatgtggacgctgcgctgtcctccgacgaacagaatgcctattacgattacaccgtcgacaccgacccccagatcagcaaggccctgaacaccgccaagatgctgtctggccagaactgattttcccgaattttcctgtgctgagaggagcccgctttgcctaccctgaccgatttgtctaccatccgcgacctttgcgcacggtatgattttgccctgtccaaaggctttggccagaattttatcatcaaccccggcatctgccctcgcattgccgatgaggccggtatcggccccggctggggtgcgctggaagtcggccccggcatcggcgtgctgaccgagcagctttgcaaacgcgccgataaggtcgtttccatcgaggtggacaagcgcctgccgccgctgttggaagaaacgatggccgattatgacaatttcaagctggtgctgaacgatgtcctcaaggtcaacctcaaagctctgctggccgaggaattcggcgataagccggtggctgtctgcgccaacctgccgtactacatcaccagcccgattctgatgcgcctgttagaagagaaactccccatcgagaatattaccgtcatggtccagaaagaggccgcacagcgcctttgcgctgctcctggtacccgtgacgctggtgccatcagctatgcggtggcttattatgccgagccaaagttgctttttaccgtacagcccggcagtttttacccggcccccaaggtcactagcgcggtcatccgcttgaacgtccgcaaaacacctgcggttgaagtgccgggcggagatgagaaagctttcttctccctgatccgcgccgccttctctcagcgccgcaagaccgccgctaacgccatctccaacggtctgcagctgccaaaagccaccgtcctctccgccctggaagctgctcacctggacccccgctcccgcccggaacagctgactctgcaagactactgcgccctgcaagctgttcttcaggctgggaaataatctacttttcccaaaaatcacaaacaaaacgccccggaacacaaaccgtgttccggggcgttttgttttggagctagtaataggactcgaacctacaacctgctgattacaaatcagctgcactgccaattgtgctatactagcaggtactagataataataacacaattggctgttgtttgtcaatgctaaacttacagcagcgcgatgcccgccttctcgcaggcggctacggtgtcgtcgtcccacaggctgacctgcacctcgcctacgtgtgccttacccaacagcagcatgcacaggcggctctggccgatgccgccgcccatggtcaggggcagggtgccgtccagcagcatcttgtggaagggcagttccgcacgctgcgggcagccggcttcttccagctggcggcgcagagattccgcattgacacggatacccatgctggacagctccagcgcacagcccaagggcacatgccagaaaaggatgtcgcagttcagcgcccaatcatcgtagtccggggcgcggccgtcgtggggcttgccgctcttgagcttgccgccgatcttcatgatgcagatggtgccatgctccttggcaaaggcgttctcgcgctgtttgggtgtgtagtccgggtacatgtcctccagttcctgggtggtgataaaggtcacatcgcggcccaggtggatatttttcagttctgggaacttccagcgcagctcatccgaggtcgcgcagacagcatccacaatatcccgcacagtgtcctgcaaaaagtccagcgtgcgctggtcggcggtgatgaccttctcccagtcccactggtcgacatagatgctgtgcaggttgtccagttcctcgtcgcggcggatggcgttcatgtcagtcaccaggccctggccggggcggaagccgtacttgtacagggcgtaacgtttccatttagccaggctgtgcaccacctcagcctcctggttcaggcaggggacatcaaaggcgactgggcgctccacaccgttcaggtcgtcgttcaggccgctgccctgcatgacgaacaggggagcggtcacgcgcttcaggtgcagggccatgcagatcttttcctgaaagatggtcttgatcaggccgatggctttctgtgtgtcatacaggcccaacaggctttggtagttttccggcagagtgatcttgctcatagttcatttctcctttagcgtatttactttccctataacttaagccttggcaaactggctttcgtacagcttggcgtagaagcctccacggtccagcagttcgtcgtgggtgccgcgctcaatgatattgccgtccttcatcaccaaaatctggtcggcatttttaatggtggacaggcggtgggccacgataaagctcgtgcggcccttcatcagttcctcaaaagcatcctgtaccaatacctcggtacgggtatcgatgctggacgttgcttcgtccaaaatcaggatcggcgggcggcgcagcatcacgcgggcaatacaaagcagctggcgctggccctggctgatattgcctccgtcctcggccacctcggtatcatagccgttgggcagacggcagataaagctgtgggcacgtgcctttttggctgctgcgatgatttcttcccgcgtggcatcgggcttgccgtaggcgatattttcggcaatggtcccggctttcagccaggtctcctgcagtaccatgcctaggttgccgcgcaggctgtcccgcgtcacggtgtcgatgggatggccgtccaaccgcagggtaccgccgttgatctcgtagaatcgcatcagcaggttgaccaacgtggtctttccgcagccggtggggccaaccagagcaatacgctggccgggctccactttcaggttcatatcctcgatcaagggcacatccggcacatagcggaacttcacatgctcaaactcgaccgcaccggcaccgtgggacagttccaccgcatccggggcatctggcaggatgggcgtttcatcgataaagtcaaacacacgctgggcgcaggccaaagcgttctggaactcggtcatgacatccgaaatatcgttgaacggcttggtgtactggttggcgtagttcaaaaacacggacaaatcgccgaccgtgatgccacctgcgatggccgcaaacgcgcccagcacgccgaccgcggcatataccagcgcattgacaaagcgggtgcaggggttggtcatcgatgagaagaacaccgcccgcacgccgcagctttgcaggtccaggttgatcttatcaaagcgttcttcggcgcggctctcgtagccaaaggcacgcaccaaatgctcgttgccgaccagctcatccaccaggcttgtcagctcggcgcgggtctcgctctgcaccttaaacatcgagtaggtgtgggtcgcaataaagcgcgccacaaaaatcgacagcggcgtcagcgccacgaccaccagcgcgatgcgccattcaatgaacagcatcacgcccagcgtaccgcagatggtcaggatgccggtaaacagctgggtgaagcccatcagcaggccgtcgctgaactgctccacgtcggtggtgatgcggctaatggcatcgccgggacggtgggcgtccatatatttcaggggcagctgttccagctgctcaaaggcgcgcacacgcatatcgcgcacgacgtggaaggtaatacggttgttgaccacgttcatcaaccactgcgagacagccgtgcaggctactgtgcccgccatggcaatggccagcttgcccacgccgccaaagtctacctggccggggccgataatatggtctaccgccttgccggagatgaccggagccagcagggtagtgaccacagtaaccacggccagcaccagcgtcagcaccaccagcccggcataggggcggatcagctccagcacacggcggagcgtgcccttattcactttctgtttccacttgctcataaggtcttctccacctcctctttgctcagctggctcaggcagatttctttgtagacctcgcaagtcttcagcaaatggctgtgcgtggcgtcgccggtcagcacgccgtcatccagcactaagatgtggtcggcgtgctgcacgccggctgcacgttgggagacgatgaataccgtcattccttcggtcttttctttaatagccttgcgcagggcagcgtcggtggcaaagtccagtgccgaggcactgtcgtccagaatcaaaaccttcggcttcggcaccagcgcgcgggcaatcgtcaaacgctggcgctggccgccggaaaagttgcggcctgcagtctccacgggtgcatccagcataccgggcttggtgcgcacaaagtctgctgcctgggcaatttccagtgcctgccaaatttcttcgtcggtggcatcgggggcagcccagcgcatgttatcgcggatggtaccggtaaacagcacggcctgctggggcacaatgcctaccatgcggcgcagttgggtaaagccgtactcttttacattgtggccaaacagcgacaccgtgccggtcgttgcatcatagaagcggcacaccaggtcgatcaaggtcgatttaccgctgccggtaccgccgataacgccaatggtctcgccaggcttagccgtaaagcttacattggtcaggctgggcgcaccggcgccgttgtaggtgaaagtcacgtcgtcaaacgccacagccggggcagcgggttctgcatccagctctgcggcggcaggatcaggcatcgtggtgtgcgtgttcaagatctcgttcacgcgcataccgctggctagggcgcgggtcaccgagatgaccagatcagccaggcgcagcaggctgaccagaatttggttcatataattgatgagcgcgatgatctcgccctgggtcagtgcgccattattgacttcgtggctgccgcgcatcagcagggcaatgatggccaggttgatgaccaggtaggtcagcgggttcatcagggccgagatgcggcctgccatcgtctggatgctgcgcaggtggtcgttggtctctacaaaggcggccaattcgtccgcctggcgtgagaaggcacgcaccacacgggcacccacgtagttttcacgggtcagcagggtgaccttgtccaagccgttctgggcctcatgatagatgggcaccgtggcgcgcataatgagataaataatcagcgaaataacgaccgttgccgcaataaacagcagggtcagccgcgagctgatggtgtaggccatgatcagcgcgccaatgacaatgaacgggctgcgcagcagcaggcgcagcatcaggtttacgccgttctgcacctggttgatgtcgctggtcatgcgggtgaccaatgtcggggtaccgatgccgtccagctcgctgtagctcagcgtgttgatatggcggaacaggtccctgcgcagcgcggtaccgaagcccagcgccgctttagcggagaagtactgggccgtcaggctgcaggtcaggccgatagctgccagcagaatcagcagaccgcagcgttgccagatgaacacggcatcgccatttttgataccggtgtcgataatgctcgccaccaccagcggcacaaaaagttcaaaggtagcttccagcattttaaacaggggtgccagaacagcctgcttttcgtagcccttgatgtagcgcatcagtttgtgcatgttggtatcacctcatactcggattttgcagacttttttattatagcacatcgtgaagcgtttgtcattccatgttttcccttgtttcgaggattatttatgcgtcgaacgtctatactgactataggaaaaatttaggaggcgccagaatgctatttcgttcttataaagggctgtcccgcggggcctcgcgcacggtgcgcacggcgctgcgcctagccgggcagcagggctgcgccacggctgataccgggcacctgctactggccatgctgcagacagcccagggccctgcagcggattttctacgccgcaagcgcgttaccactgcctccttgacagaggccgcccccaagcgcagcggcaccggccagccccaccgcctgcgcaaaaacgacctttcctcggacagccgcaaggccatcgagtttgccattttgggtgcccatgcatccagcgccgccaaagccgaaaacgagcacctgctctgcgccatgctggaggacactgcctgcacggccagcatctggctggcggccgcaggcatcgaggtgccccaggccgcgcgggagtgccgccagctttccggccagatgacactgcccgtacagccccggatgagcaccgcccgcagcggccgccccagtgaaaagtacggccgcgatctgacccgcctggcgcaggagggccgcctggacccggtgctgtgccgggaggaagagctggaacgcatggtagaaattctgtgccgacgccagaagaacaatccctgcctgctgggcgagccgggcgttggcaaaagtgccctggctgaagcgctggcccaggcgattgcgtccggccaaatcaccccggcactgcgcggcaagcgggtgctggcactggacatggcctcgatggtagcgggcaccaagtaccgcggcgattttgaggagcggttcaagaacctgctggaagaactctaccgcgaccgcagcaccatcctttttattgatgagatccatcttatcgccggggccggtgcggccgagggggccatcgacgctgccagcatcctgaagccgatgctggcccggggcgagatccagctcatcggtgccaccacgccggaggaataccgcaagaccatccagaaagattccgcgctggagcgccgctttggaaaagtaatggtagaagagcccacccccgaaaacgctgaaaagattttgctgggcctgatgccccgttacgagcgttaccactgtgtcgtcatcccgcccgagacgattcacgccgccgtggagttaagcgtgcgctacctgccggggcgttttttgccggataaggccatcgacctgctggacgaagcagccgccgcgcttcgcataaccgacaaggaatcctccggccgtagggtgctgacgccgcgtcatattgcccgggtcgtcagcaaggccagcggcgtcccggccgagcgggtaggggaagccgagcgggagcggctgaaccagctggaagcccgcctcagtgccgaggtcatcggccagcccgctgctgtttctgctgtggccgctgccatccgccgcagccgcaccggcctgcgggagaacggacgtcccatcggtgccatgctgtttttaggtcccaccggcgtgggcaaaacacagctggcccgcacactggccaaatgctggttcggcagtgagaaatccctgctgcgctttgacatgtccgaatatatggagaagcacactgtcgcccgcctgctgggcgcgccgcccggctatgtcggccacgaggaaggcggccaattgaccgaggccgtgcgccgccgcccctacagcgtggtgctgtttgacgagattgaaaaagcgcacagcgacattcaaaatctgttgctgcaaatcttggagggcggctctttgaccgatgcccaggggcggcgggcggatttttccaacaccattatcctgctcacttccaacctgggtgcccgctgcctgtccgggcagacagccccgctgggttttgccactgcgcagaccgagcgctcccgccgcagcaaacaggcgatacaggaagccaaggattatttccggcccgaactgatgggccgcctggatgaagtcgtcgtctttgatccactcggtcccgaacaactggctggtattgccgaccgcctgttgcgtgaactggaagtccgcgctgccgggcaagggtatctgcttacccatactgcgtccgccgccaaagtgctggcaggggacactgtgccgccctacggtgcccgcgaactgcgccgcaaggtcagccgcgccgtcgagcaggccctcgccgaccgtatcgccgccggcacagcccaccccggcacattgtacaccgccgatgccgacgccgacggtcatatcatcctgaccgaaagcgatgcggctttgtgcgtataaatataaaaataaaggctcccctcaaggggagcctttatttttaatacccttttaatcttacggcttcacgctaaattcctgctcgcagtacacgcaacggtactttccgctgggggtcagcgcaaaaatatggtcacagccttcctcaatcgaggtaatgcaccgcgggttcttgcacttgatgacattgaccaagcgcttgggctgctcggggcggctctttttcgccacgtggccattctcgatgaacgtaatactgatcttcgggtccacatagcccaaaatatcaaagctcaggccgctcacgtcaccctcgattttgataatgtccttcttgccacttttctggctgcgaacattctgcagcaaggccacgctggcgtcgctcagcttttccagctccatcaggtggtacagggccaggccggtgcctgcggtgatatggtcaatgaccacaccgttctgaatttcatcaaccttcaacatcgaaagctacctccccagttttaggatctttcaagccaagcagcgtcatgatcagggccatgcgcatatgcacgccgttctgcacctgatcaaagtaagcggcacgcgggtcatcatccacatccagcgtgatctcattcacacggggcaggggatgcagcaccgccatgtcggccggggccagatccagctttgtcttggtcagcacgtagctgttcttcaggcggatgtaatcttcctcgttgaagaaacgttcgcgctgcacgcgggtcatgtacaggatgtcaagctggggcagggcttcttccaggctgcgggtctcgacatactcaatgccgttgggctccagaatttcgctgatgatgtagtccggcacacgcagttcttcgggcgagaccagcacaaacctcatgcccggcaggcgggacaggctcttgatcaggctgtgcacggtgcggccaaacttcaaatcgccgcagaaaccgatggtcaggtggtccaggcggcccttgcgctggcggatggtcatcatgtccagcagcgtctgggtggggtggctgtggccgccatcaccggcattgatgaccgggatgcggctgtagcgggaggcacgcagcggggcgccctctttggggtggcgcatggcggcaatgtcagccacgcagctgaccacgcggatggtatcagccacggtctcccccttgctggcgctggaaacaccagcatcggggaagccaagcacctggccgcccaggttcagcatagcagcctcaaaggaaaggcgggtacgggtgctgggttcatagaacaaagtggccaggcgtttgcgggccgctacgtcgcggtaagcggccgggtcctcatggatacggtcggcaagatccatcagactgagcgtttcttccagcgtaaagtccgccgggtcgatcaaatgtctcatacacattcccctttattcaacggtctatgatcttctcggcagcaccgcaccttgcattgtgcagcactgctgtatgtcaaagcggtcgcccgcctgaacaccattacaaaagcttgcgcaccatcgcaaaatcaaagaaatcagtataataagtttggcagcacagcaccggtttgcacaggcgggagtagcaaatctcctccagctgcaaaagcgcctgttcggggcgcagggccagctggcggcggatgcctgccgggccggacactgcatgcaggtgggccacagtctccgtcacttcagtatggcagtggcgggcggcaatatcaaaaatgggctggctgaaatcaatgccttccagccgcttattgtcaaataaagaaagcggcagaatatcggtggaaaacagcaccggcgtatcatccgccatcacgcggcggcgcacaaacaccaacgtctgtggggcgtcggtgggcagctgcagcttttcggccaaagcgggggaggcgatttcccgcgttacgctcaagttatcgctgcggggttccttgccaatggcgcggatcattttatagaattccaacttctgatccatgcggtttttcagctgcaccacatcccggtttaccaaggtgccaatgccgcgcacacgttccaggtagccgtcgcgctccagctcgctcagggcgtcgcgcactaccgtgcggctcacccccagatcggaagccagctccaattcactgggcagctgggcagcaccgctatagcggccattttccagttcctccagcaggcgggcagccgtatgctggctgcgcagctcaccgcccagccggttttcggtctgtttgttcatcgatcaaattcctttcgggcccgacatacgtctgccaggcagcatttatcgcagtagggggtggtgcgcgccgtgcacaccgcgcggccatggtctaccagccggtggcagaaatcactgccttcttccggcggaatgatcttccacagttccttttcgacttttgccggttccttaataccgtccaccaggccgatgcggttgcacagccggatgcagtgggtgtcagtcacgatggccggcttgccgaacacatcccccataatcaggttggcgcttttgcggcccacaccgggcaggctcagcagcgcgtcaaagtcgctgggcactttgccgccgtattcatcctgcagcttgcgcatacaggcagaaatatcccgtgccttgctgcgccccaggccgcagggttttacaatggcttcgatttcttccggttcggccgctgccaacgcttccacactgggatatctggcaaacaggtcctgcaccaccacgtttacacgggcgtcggtgcactgtgccgccagccgtaccgacaccaacagttgccaggcgtggtcataatccagcgtacattctgagcgggggtattcttttttcagcctatcaatacagatccgtgcgagttcttttttagtcacaggattcgctccgtttcgttttcttctcttgattttaccacgatgtgcctttttaatcaagcgcagaagtatgatgttttggtacatatccccccatgtgttttcctgaatcgccgatagggcaaaattttcccgcaaaaacacagtttgcatcggccttttatcggtgctgccttgatttcaccgccaaaatcacctataatttaatgataagaatttctattttatgcggcatacacgccgcagcatttttagctaaatttatagtaagtaaaggaaatccaccatggagccattggcacagcgtctgcgcccccgcactttggatgaaatctgcggacagcagcatcttttaggcaagaatcaggttttccgccgcacggtcgaaagcggccatatccccaacatgatcttctacggtccctccggcgtaggcaaaaccactgtggccagcatcatcgctgcaggcagcggcatgaaactgcacaaacttaacggcaccaccgcctccaccagcgacatcaagtcggtgctgaacgacatcggcaccttgggtaccgacggcggcatcctgctgtatctggacgagatccagtacttcaacaagcgccagcagcaaagcctgctggaatgtgtagagcagggcaccgtcaccctgattgcctccaccaccgagaacccatacttttatgtatacaacgcgctgctttcccgctgcacggtgtttgagttcaaggcactgaccgccgccgacatccgccagggcttgcaaaacgccgtagcccgcctgggggccgacgaccagacgccgattttgatcccggacgacgcgctggactacctggcccaaagtgcgggcggcgatatgcgcaaagccctgggcaacctggagtttgccgtcaccgctgcgccgatcgagaacggcacccgcaccatcgacctttccatggtgcagcaggtagccgtgcgcactgccatgcggtacgacaagctgggcgacgaccattatgatattgtctcggcttaccaaaagtcgatgcgcggctccgatccggacgccgccctgcattatctggcccgccttctggaagccggtgacctgcccagcgcctgccgccgcctgatggtctgcgcctgtgaggatgttggcctggcctggccgcagatcatccccattgtaaaggctgccgtggacattgccaacgctgtcggcctgccggaagctcggcttccgctggccgatgctgtggtattggtcgccacggcacccaaatccaactctgcccacaatgccatcaacgccgccgtcgcggatgtccaggcaggccgcaccggccccatcccgcgtcagctgcaaaacaaacactatgacggcgccgacgccaaggtcaagggccagcattacctctaccctcacgattttcccaaccactggaccgcccagcaatacctgcccgatgccatcaaggaccgccgctactacgaacccggcgacaacaaaaacgagcaggcttttgcccaatactggaagatgatcaaaggagaataaccatgtccaccctccactgcgaaaacattacgtttccttcctctgacaggaaacatacctcctcggccgtcatttatacctgcccggacgtgcccgtgcgggcagtcatccagctcagccacggcatgtgcgagtacgtccgccgctatgcaccgatggcggatttctacgccgcccatggcatagccctggcaggcaacgaccacctgggccacggcgacaccgcccaggcaggggagcacggccactacggcgaaaaggacggccgctttcatctgttggacgacctgcatacaatgaacagcctgctgcacgagcgttttcccggcctgcccatcatcctgtacggccacagcatgggcagcttttatgcccgatggtacgctgaaaagtggccggagagtatcacggcacttatcatttccggcacagctggtcccagcgtgatgaacgccatcggccagcgtctggctgctctgattgccgccgtcaagggcaacgacgccgtctcgcccttgatggtcaatctgaatttcggcagctattgcaagcgcatcccggatgccgcctcgcctaacgcctggctcagccgcgacacccaggtcgtacgggattatgacgccgacaagctctgcaccttctcgttcaccgcgggcacctaccgggagatgctggccaccctcaaccacgtcagccgcaaaagctgggctgagggaatcgccaaggacctgcccatcctgctcatcgccggtgacgctgaccccgtaggcaactatggcgccggtgtacgcaccgtctgggccatgctgggcgacgccggtgtacaggatctgacctgccagatttacgagggtgcccgccacgaactacacaacgaaaccaaccgtcaggaggtattcgattacgtcctgacctggatcgaataccatatttaaatttattttatatcgcattatcgagaatcctcggcttataccggggattttttattttacctattgacaatgctatacctcgcgtgtattattgtattagatgcttaatacaagtacacaggaggcaaccaccatgaattggaacataaccgccggacggccggtttatgtccagctgatcgaacagctggagctggcgctggtggcgggggaatttccgccaggcagccgcatcccgcccgtgcgggagctggccgccgatgcgggcgtcaaccccaataccatgcagcgtgccctgcaggatttggaaagtcgaggcctgctgcaggctcagcgcactgccgggcgtaccgtcacagccaacgataccgtattgcaagctctgcgccgcaaacgcgccgccaccctggccagggattttctgcagcaaatgcatgccctgggcatgaccgcagcagaggtcgagaccctgctgcgggaaaccgaaacatcagaaaaggagtaacacaatggaacctgtatatgaagtccacggcctgtgcaaatactacggcaaaaaggccgcgctggatggcgtggattttaccgtagagccgggcaaattggtgggcctgctgggccccaatggcagcggcaaaacgacccttattaaaatttccgccgggctgctcacggccgacagcggcaccgtctgcattgataaagcaccggtaggtgtctataccaaggccatcaccagctacctgccggaccgcatggccctgcctaccgagttcaccgccgctgacgccgtaagcctgtacactgatttctttgccgatttcgaccgtaccaaggccaacgccatgctggccgacctgcatctgaatcagcacgatcgcatcggcgctatgagcaagggcacgcaggagaaaatgcagctttgtttaacgatgagccgtgccgccaagctgtacctactggacgaacctttgggcggtgttgaccccgccgcacgggaatacattttaaacaccatcctgcataactacagcgaggacgccgcgctcgtgctctccacccatctgatcggcgatattgaaaaagtgctggatgaggttatcttcctcaaagacggttctgtcatgcgccaggtcggcgtggacgagctgcgtgaggagaccggcaccagcgtggacgcttattttagggaggcatacaaatgctgacgaaacttttaaaatatgatttcaaggccaccggccgcatcatcctgcccatcgcgggcggcgtgctgttattaaactttgtctcggacctgctggggcattttgtcaacaacaccagccatacgatgccctgggtcggcgtttttatggggctgctcacccttgccacgtttttgggcatgctggcggttctggccatctgcttttttgccagcgtgcagcgctactacaaactgttgggggaacagggctacctgatgctggccctgccggtacacgcctggcagcacattgccgccaagctcatctgcggcgtcgtgtggacgctgttcggctttttctactttggaatctgcggtacgctcaccctctcggcactggacggcgacagcttttcccttaccggcgtaaacatccaagatgttccgctcctgctgttatttttcctcctgatccttgcactgattgccggtgcccagctgcacgcttacctggcctgcgcctatgcggggatgtttacccagcatcggctgaccatcagcatcatcagctactttgtaattggctttatcggacaaatgctgagccttgtcggcaccattgtttttgccattaaagtatatccgtccctcgataacatcggcagcatggtcgaactgcaaaacggcatactcctttccgtctgcgtcatcttcctgctcaccctgttggtggacgccctgctttgggcgctgactcagtggctcatgagcagccgcctcaatctggcttgatttttccgttctctgttccgattaataaggaaaagagcctgttttttcatgcaatcttgtatgttgtttcctgcatcttctaaaacgaggctttcactttttgtcatctgtaccgtgatgccctgtctgtttttgtacagctgcattatcagcagtggatcaggggtacacggcggctcgctcatgtggttaccggggtcggctatcggctatgctgttattgcgttccttatttacaaacattccaaagccccctaaacataataagaaaccccaagcaggaaccggccccccataaaaggggatgcaggctcctgcctggggttttcttcccttattaattacttaattacacaacaaaatcccgtattgcttcggcatcgtgcaggcctttggtgtacagccttttcaaggcctcctggtcgcgggtcagcgttttgacaccgcaggtgtcgtcaggtgcaatgatgagcactttgccctcggcagccaactgctgtgctttctggatgccttcattataatgttgggcgcgcagggccagctgttcggcagctttcgggtagcgtcggcggatgacgcgtgccagcttgcggtcggtgccgtcggcgcggatgatcccggcgggctttgtcaaaatcagcaccaccttatcgcagccatcggcaaaggccttgtccagggggatggtatcgcccaaagcgccgtcataataggggacaccatcaatcacaatgggcttgcaggccaccgggatacagcaggaggccatcagcacgcgatagtcgtcctggtgcagatcactgcgtgtaaagtattttggcttgccagtggttgcgttggtggcaatcatgtaccattccgccgggtttgtgttcatttttgcaaagttcagtgggttttcgccgcccgcattgctgagcgtcccatagatatattgcaggttcaaaaacgagccgccgtgcagcatgttgcccgcgcccatgtactgcttgcgcatcgagtattcctcgtaaaacgggtagtttcgcccgtgctggccgcttatataggatgcgaggtttgcactgccagccgaaatgccgatgccataatcaaactgtacatcgttttccatacaccagtcaaacacgcccgccgcataaatgccgcgtaggccgccgcctacgtcgatcacgccaattttttccatttgttgcttccacctcttatgcaacaaattatacacctgtcacacgcgcaaagtatcatacaatctggcgcagatgcccgaaattttgtccttttagggcatagctattttaaccgcacgccgccacagcttccaccgccgtttccagtccgcgggcaatttggcgcaggtccatgctgggggtgcccagcggcttattgatgacctgctccatcgcatagggcacatggatgaacccaccgcgcacattggggtactttttatcgatgagatacagcagggtatacagcaaatagttgcacacataggtacccgccgtgtaggagaccgcggccggtatcccggcatcccgcatccgctgcaccatggcttttacgggcagggaggtgaagtaagcggtctcaccgtcctcccggatgggcacatccacaggctgatacccggcattgtccgggatgcggccgtccataaggttgatggccactttctccggagtgatagccgcgcggccgcccgcctgtcccacgcagatgaccgcatcgggtttatgccgctgcatagcgtcctccagaaccgcaccggcgcggtggaaccgggttgggacttccagcttgatgatctcggccccggcaatggtgtcaggcagcagtttgactgcctcataagccgggttgacggtctcgccgccgaagggatcggagccggtaattaaaattttcatggcagagcgcctcttttcgcagtttttgccattatagcatatctgcctctccatctcaagcgccgtgccacaccgcacttttgccgtaatcctccccatttacgcattttttaatgattcatgaacatttctttacagatttattataagttttagttgacaaacactctccatgccgtataatgtatcttgtgtgtgcatctatagggtaaatcttttatgccctgacacattggcgttgtatgtgctgcttgtagcggacctgtccaccgggaccgtgtaacaaacctttgcggggcggcataattggcgccgactcgttaagcgctttgtgccggcctaaggaagaaacggtgcgaaaagaaagtgctgtaacgggaaattccgcaaagggggatgcaataataatgaatgagaatctcatcgtatcgctgaaagacattgttgttgattttgacgggcagaaggtcctggacgggctttccctcgacattcacgacaaagagttcgttacgttccttggcccttccggctgcggcaaaacgaccactctgcgcgtgattgccgggtttattaccccaaaatccggcaatgtcttttttgatggcaaagacatcgccgacctgccaccctataagcgccaggtcaacacggtgttccagaagtatgcgcttttcccgcatctgaatgtctttgaaaatgtggcgttcggcctgcgcctgaaaaagttgccggaggaagagatccgcccgaaagttctggaaatgctggagaccgtcggtctgaaaggctttgagcggcgcagcatccatcagttgtctggcggccagcagcagcgtgtggccatcgcccgcagcctggtcaaccagcctcgcgtgctgctgctcgacgagcccctgggtgccctggacctgaagctgcgcaaagagatgcagctggagcttaagcgcctgcagcgcgagatgaatatcaccttcgtttatgtcacccacgaccaggaagaagctctgaccatgtcggacacagtcgtggtcatgtccggcggcaagatccagcagatcggttcgccgcaggatatttacaacgagcccaagaacgcctttgtcgcccgctttatcggtgattccaacatcgtggacggcgtgatgctgcgtgactttttcgtcaacttcggcggtcatgactttacctgtgtggaccgcggcttcaagcccaacgagccggtgcaggtcgtcatccgtcccgaggacgtgcagatcgtgccgccgtctgtcggcatgctgaccggcctggtgcgtgaggtcatcttcaagggcgtacattttgaaatgcatgtggatgtggaaggctatgagtggctgatccattccacccaggcaagccagcccggcgaactgatcggcatgaacatcggccccgacgaaattcatatcatgaagcgttcggaggtgtaagcgatgcttaaatccaagacctcccgctggctggccgggccgtatctgctctggatggccgctttcatcatcgttccgctgttcatcgttatctggtatgcactgaccaacgcagatggc

SEQ ID NO: 8015 - DNA, 175 bp, Unknown
  gut microbiota DNA sequence
ctaccagggtatctaatcctgtttgctacccatgctttcgagcctcagcgtcagttggtgcccagtaggtcgccttcgccactggtgttcctcccgatatctacgcattccaccgctacaccgggaattccacctacctctgcactactcaaggccagcagttttgaaagcaatt

SEQ ID NO: 8016 - DNA, 152 bp, Unknown
  gut microbiota DNA sequence
gtgggtttccaaacccacgttcaaggttccacaagtttcagttttgttcaattttcaaggtcctgctgcgctgtcacttgttccgtaacagcttgtatattatatctcataaaagttcttttgtcaagaacttttttcgatattttttgaag

SEQ ID NO: 8017 - DNA, 155 bp, Unknown
  gut microbiota DNA sequence
ttccaccgctacaccgggaattccacctacctctgcactactcaaggccagcagttttgaaagcaattcacgggttgagcccatggatttcacttccaacttgccggtccgcctgcgctccctttacacccagtaattccggacaacgcttgcac

SEQ ID NO: 8018 - DNA, 251 bp, Unknown
  gut microbiota DNA sequence
agttccctcaaaaacaagcaataaaaaataccccgcagcttcgtgcgaggtattttgtggtgcaccatcggggactcgaacccaggacccactgattaagagtcagttgctctaccaactgagctaatggtgcatataaacaagctccaggctgggccaaaacccggcccggaggcttgttctttaaaagagaagtcggcatctacctattttcacaggccgtctccagccaactatcttcggcacgagtg

SEQ ID NO: 8019 - DNA, 221 bp, Unknown
  gut microbiota DNA sequence
aagcagttcacattgcgtggggtctttcatatggaggtgacgaccagatttgaactggtgaatgaaggttttgcagacctttgccttaccacttggccacgtcaccataatgagtgaaaaaccggcttttggagccggtttccactatttgtctggagcggccgacgaggctcgaactcgctacctccaccttggcaaggtggcgctctaccagatgagct

SEQ ID NO: 8020 - DNA, 345 bp, Unknown
  gut microbiota DNA sequence
caatggtggaagttaacgggctcgaaccgctgaccctctgcttgtaaggcagatgctctcccagctgagctaaacttccccatatggagcggccgacgaggctcgaactcgctacctccaccttggcaaggtggcgctctaccagatgagctacggccgcatagaaaagtgtattctttacgaagaatacacaagaaaatggtgcctccgatcggaatcgaaccaatgacacggggattttcagtcccctgctctaccgactgagctacagaggcataatggcgacccgaatcaggctcgaactgacgacctctagcgtgacaggctagcgttctaaccaactga

SEQ ID NO: 8021 - DNA, 124091 bp, Unknown
  gut microbiota DNA sequence
gttggagaggttttgctcagccgctctctccgggcgacgtatgttattatagctgacaacgagcgaaaagtcaagcattttttctaatttttttgcgattttttcaggttttttcaagttcctgcttttcatcgctggcaggccattttttgagcagttcgttcaggtccaccttataattcttgttgcagaactggcaattcacctcagcaatggggtcttcatcccgcagcttttccacttcttttttgcccaggctgcggatcatattctccacacgctcctcgctgcaatcgcagcggtaggtcacgtggtagctgtcgagaatatccggctgaaaaccttccagcgccagctccagcatattgcggacagtcttgccctcctccagcatagtagtgacactgggcatagccttgatgttcttttccaggtggttgatctcgtcctcggtggcgccgggcagcagctgcacgatgaaaccgcctgcgcagcgcacgctcaggtccttatctaccagtacgcccagggcgcagaccgtggggatctgttcgctgatggcaaagtaggtggtgacgtcctcagcgatctcaccagaggtcaggggcacctggccgatgtacggttcgcgcatgcccaggtcacggatcacgtccagcgtgccgtccttacccacggccgcgcccacgttcaggtggccgtcagcccgcggaggaagctctacaacagggttctccacatagcctttaacgttgccggtaccatcggaaacggccagcagacgacctgcggggccgccgcccttgatctgcagggtgacagaatcctgggtgcttttgagcataatgcccatcatggaggcagccgtcagcaggcggcccagcgcggccgtggtgacggcgctggtcttgtgcaggcgctccatctcgcacacgatctcggtggaatccacgccgtaaaagacaatgccgccgttctcggagatgccgcgcagcatgttatgattctgttccatttattctttccccctcctgggtgtattgtttgacagccgtgatgatccagcgcgggctgtcgggccgcacaaggccaaagtcctcgccgtcggcaaccttggccacggtgaagccatatttttccagcagcgacgttaccagatccagcgggtagctgtactcgctgaaggactccttaaagtgttcgccggtctcgtggtagtctatgtcgatggcaatgtccacccggccggtggctgcatcaaaatggttggtccagtggcactcggcgtcctcggcctcgatgtcgaaggtctcccccgccagaattttctggtgcttatacggagtgttcaggtcaaagatgaaaacgccgtctttttccataaagtaggccgctttgcggatggctttttcaaactgatccaccgggccgatatggttgtaggtatcaaaggtggagaccgccgcgcggatggtgccgtacaggtccagcgagagcaggtcctgccgcagcagcaaaatacggccggtcatgtccagctcatcggctttttcccgcaggacgctgagcatctcttcggagcggtcgatgccgatgacgtcatagcccgcctgggccagcatcagggtcaaatcgccggtaccgcagcccaggtcggcgaggatgccgtcgcggataccgtgggccgccagttcgtcggtgacatagcggtaaagggcgtcgtagtcggcctcgctgttgagttcatcataaaaataggcaaattcgttgtaggccatgggtcactccgttgctgcggcggcttccagcaaagcgcgcagttcttccatgcccaggccattctcggcactggtcaggatgactttctggcagccgtagggcgcacagatctcctcaaactcagcctggcgggcagccatctcgctctttttcagcttatcgcccttcgtcagggcggccacaaacgggatacggtggtagtgcaaatactccagcatctgcacgtcgtcggcactgggagcgtggcggctgtccagcaattgcaccagcaggcagacgctgcggtcgtcctcgaaataggtattgatcaactcgtcccagcgttcgcgctcggcgttggagaccttggcgtagccgtagccgggcaggtccacaaagtaggccttatccactttataaaagttgatggtggccgttttgcctggggtagcgctgacgcgggccagttttcggcggttgcacagcttattgatgaggctggattttcccacattggagcggccggaaaaaacgatctccggccggtcgctgtccggcagctggcgggacaagccgtaggatgcgagaaattcgcagttattgtagttcatagtggttcctttacattacagtggccgggtccttggcgacgggcttttcgccgatgatcaggttggtggcctggggcatggcgtgggcactgcgggcggcagcatggccgggcatgatgagggcatgcttgagcacctgggacaggcgctccaccgggatgaagtggatcttctccttgacctcggcatcgacttcgtagaggtcggtggcgttctctttggggatcagcacagtggagataccttcgcggaaggcggccatgctcttttccttcaggccgccgatgggcagcacattgccgtgcagcgtaatttcgccggtcatggccaggtcatggcgcaccgggatgccggacagggccgagaccagcgccgtggtcagcgtgacaccggcggaagggccgtccttgggcacagcgccctcgggggcgtggatgtgcaggtcggtgttcttgaagcggtcgggagcgatgccgtactcctcggcatggacacgggcataggtgacggcaagctgagcgctttccttcatcacgtcgcccaggctgccggtgatttcgatcttgccggtgccgttggggatgactgccacttcgacgggcagcatctcgccgccgacactggtccaggccaagccgttggcgataccgacggagtcggttcgggagatgaaggtcggcttgaccttctcggggccgagcagcgacttgaccatcgtgccggagacgctgatcttttcggtctcgcctgcggcaattttctgggcacacttgcgcagcaccgaggtgatggtgcgttccaggttacgtacaccggcttcgcgggtgtagccgtcgatgatctcataaatcgcgccggaggtcatggtgaccttgccgtccaggccgttatttttcagctgtttgggcagcagatggcgcttggcaatgttgaacttttcggtgcgggtataactgggcagctcgatgacatccatacggtcatagagtgggccgggaatcgtggaggcatcgttggcggtcgtgatgaagagcacctcgctcaaatcgaacgggatgtcgaggtagttatccttaaaggtgcggttctgctcggggtccagcacctccagcagggcgctggaggggtcgcccttgtagtcccccgccagcttgtcgatctcgtccagcaggatgaccgggttggaggacttggcggagttgatggcgctgatgatgcggcccggcatggcgccgatgtaggtgcggcggtggccgcggatctcggcctcgtcatgtacgccgcccaggctcatgcgggcgaacttgcggcccatacagtccgcaatggaatgggcgatactggtcttgccgacgcccggagggccgacgaggcagacgatctggcccttgacctcagtgttcagcttgcgcacagccagcagttccaggatgcgctctttgactttctgcaaaccgtaatgttcgcggtccagcaccctgcgggcgtgggcctggtcgaggtcatcctcggtggtgatgtgccagggtaggcccaggcaggtatccagatagctgcggataacgccgctttcggcggagttggactgcatacgggccagacggtcgcactctttcagcagcttttcggtggattcgtcgtccagcttgagggcggcgatcttctggcggtaggtatcggcttcggcgcgggtatcttcggaatcgcccaactcttcgctgatgatgtgcatctgctcccgcaggtagtattcccgctggcctttgtccaaagaggcgttgaccttatcatcaaggtcgcgctcgatttccaacacctggcactcctggcgcagcagcatcagcagtttttccaagcggctcagcagcgaggactcattcaggatggtctgcttatcctcgtatttcagcaagaggttcgcgggcatgtactcgctcaggaacaatgggctgtctgagctgacgatgttatagatgacgtccttggagatctgcgggctgtaggagaggtactcctcaaagcagtctttcaggctgcgaacgagggcctcggtctgggtgcgtttatcggcaccgatgccgcgcaccggcaccgggcgcacgctggcctgcaggaagtcgccatcgttcagttccagcaggcgggcgcgggtcttgccctccaccagcaccttgacgaggtcgtcggaaacgcgcagcacctgcttgatctcggcgatgacaccgtagccgtagaggtcaggcatcgtgggttcttccacgtccatctctttctgggcgacaaggaaaacgctgctgttggcgtgcatggcagcctcgatggcggcgatggatttggcgcggcccacctcaaagtggacgatattattggggaaaaccaccagcccgcgcagggcgatagccggcagtacactgacattgcgggtgattttgacttttactttctcagacattgcttactctcccatgacctgcagaacaggtgcgttgtatgcgagttttggcggcaaaaggatacgggcgctgcgccgtgccgtctcggcgtgcagcgttttctggggcgaacattcgccgtccagggtggtgatcatcggctttggatccagcacccggatgtcgatggccgatgtgcggaagtacgttaagtacgggcggaacttttcggtcaccgtaccgtccggcgtgaggtgctcgccttttttgtagccgcccaaaaggccgggcagcttcaggcgcggcaccggctttagcagcaccacgtccagcaggccgtcgtccaggctggcgttgggagcggcacagtagccgccgccgtacatgcgggcgttgcagatggccagcatcatgtagacgccgtccagttcccggtcatcagcctgaatatgcaggtgatgcctgaagctgctgcagacggcttcgaggatggacagggtgtacgcggtggtcccgccgcacagcgggatgcgccgccacttggggataccgttggccacctgggcgtcgatgcctgcggcgtagatatcgatgccgtagccctggggcgttgccagcagatccaccgggaaggtttcggctgccagctgggcatccatatccaagaaatccgccggggtgccgaagttgcgcacatagtcgttgccgctgccgcagggaatgcagcccaccgcgatattggggtggttggccgcgccttgcagcacttcgttcatcgtgccgtcgccgcctgccgcatagatatttacttcttccccgctggctgcggcggcttcggccaattggcgggcgtggccgcggttgcgggtgacctcgatctgcacgtccaccccggcgcgggcagcggccgcctggatctggggcaccagcaccacgctggcgtcggtcttgccggccgcgggattgatgataaacaactgctgcatggtgcgcccctttcccctatgcttcctgatagtaacaggtatatctattgtagcggtttcttgcaaaaagtgcaagggtttgggataaactgctagcccccggcccaaaatattgtgcaggaggggttttgtatggcagatgtttttgtggaaatcgggcaagtcgtcattaccagccttgtatcattgatggggatgtttttgctgacgcggtggggcggcaagcggcaaatttcccagatgagcccctttgactatctgaacgccgtgaccaccggttctatcgctgccgagctggcgacaaatctggaacagtggtaccgccctgtcaccgccatggtcgtgtacgggctggtgacctgggtcgtgcattttactgcctgtcgcagtatctttatgcgcagtttgtggagcgggcggtcgctggtattgatggagagcggcaccatttttaaggagaatctttcccgcgcgtccattgatttgaacgagtttttgggtcaggcccgcgtggccgggtattttgaccccaacgaaatacaaaccgccattttggaaacgaacggccagatcagctttttgcccaagagcggcagccgccccgtcaccccgcaggacttgcagctgacgccggagccggtgagtgcttggtatgacctgattctggacgggcagctgatggaagacaacctgaaagcctccggccgcagcgtaagctggctggaaggccagctgcacagcgttggcatcgggcagaaaagcgaggtattttacgcgggctgcaaccagcagggcacattcttcgcctgccgcgacgggtaaacaaaagggccgaagcccgaagcttcgacccttttgtattgggcgatgtggcccagattatttgaagtagcgatccagcagaccctgcataccgcgaccatggcgggcctcatcctttgccatctcgtggacggtgtcatggatggcgtccaggttcagttccttggccttcttggccaggtccatcttgccggcgcaggcgccgcactcggcgtcaacacgcatctgcaggttctttttggtgctgtcggtcagaacctcgcccagcagctcagcgaacttggaagcatgctcagcttcctcaaaggcgtagcgcttccaggcttcggcgatctcggggtagccttcgcggtcagccacgcggctcatggccaggtacatgccaacttcgctgcactcgccgttgaagttctcgcgcagaccctgcttgatctcctcgggcacgtccttggcgatgccgacaacatgctcggttacataggtgttgtccttcttctcaatgaacttggaagccggggccttgcagaccgggcagaactcggggatggtgccttcagcgatataaccacaaacagtgcaaacatacttcgtcataataaattgcctcctgtaattttggattttccgttttattgctcttatttgctcttgagacaagttcctgtctcattgcctatattatacggaactataccacttttgtcaatagtctttttcatatttttaagaataaatcttattttttaaaaagtttgtattgatttaccctccccggcgcatttttgggcatagcagcaaacaaagctttggagagcacacagctcaacgcccccacgcacagcccggccaccagcagcaccggcgcatagcctaatgccatcgcactggacagcagtaccgaggctcccagcaattggccgatattatgggccagcgcaccgctgaccgtgaagatgaactctcccggcgaggcgggcaggtgcagcagcccccacaatacaaggaaggacagcacgccgccgcacagggataaaaagccagctgtcggcccgcgggtcaacatggcaaacagagccttgagcagcaccagctccgccgctgtgcgggtgtttaagaaaagcagcgcgtacatgaccaccaggttggaaaggcccagcttcatggcgggcatcaggcccagcagcggcgtgatggcggattctaaaaatgacagtgcgatggccagggcaaacagcatgcccgtccaggcgacctctcgggatttttggctgcgcatagggcagtctcccctttcttgcaagtaggattactataataaggtagcagcccgcgcagactacctaaaaaatttacaattttcacacagcttttccggcgcggattcgagccaaacggcttgaaaaaaacagggatatggtgtatcctattagagtatcggtatagcatgccgatgcttatttttaaaagcataccataccattatgaaaaagatatgaaaaaggagatcctactcatgaaaaagttacttcctatcctgctgtgcgctgccctgctggctggctgcggcagttccgccagctccgctgcttcttcgactgcggagagcaccgtagcttctgagtctgttgccgagtccaccgtagagagcaccatcggcggtgctgacggcgagaccgacattgtcgtgagcgatgatgccgaagccaataccgccaatctggacgctgctgtatccgctttggaagaggtcaatcccatcgccaacccccgtgcactggacgacttctctgttgagaacgagctgatgctgaccatggacaacattgccggctacaagggcgatgtgaccaacgaccaggctgactgcggcctcgtgtttgtggcccaggccaagcccggcaaggccgctgatgtcgagagcgagctgcaggcttacaaagacagcctgtctgccaacgacctgtatgccgagtttgccgacaaggttgccctggccaaggacgcccgcatcgtgaccaatggcgactatgttgccatcgtcatcgccggcatttcgaaccctgactacagcgccattgataccgccctggagacggcactgaacttctaaactatcgtatggatgcaacaggccgctaccccgctgggtaacggcctgttcttgtaaacaaaagaaaggagatcgcgcggatggtttttaacagcgttgtgttcctgttctgctttttgccgctggcgctgcttgcgtactacctcgtccccgggcggggcaaaaatgtggtgctgctggtggaaagcctgctgttctactgctggaccggtgtagaatatctgccgctgattgtctgcctgatcgtattcaactacctgtgggggctgctgacagcgcgcaccaaagccaaactgaaaggcttgctgcctgccgtggcggtgctggtcaacctggcggcgctggtctactttaagtatgccaatttcctgatcgataccctgaaccgcatcgggaattttggcctggccgccctggatgtaggcgcggtgctgcccctgggcatcagctactacatctttaaaattatcagctacgaagccgacgtttacaccggcaaggtggaggccgagaaagaccccatcgcctttgcggcgtatgtgctgttcttcccgcaattgattgtcggccccatcatcaagtaccgcgatatggccccgcagctgcacaactacaaaaaccgctgcaatgcggcgctgatggagcgcggcgtggaactgtttttgtttggccttgccaaaaaggtgatcttggcggattccatcggtgcgctgtggaccgatattatcagcacgggcggcgtggggctaagcaatgtttccaccccgctggcctggctgggcatcattgcctactcgctgcagctgtactttgactttgccgggtacagcgagatgagcaacggcctcgctgccctgatgggctttgactgcgccgccaactttgatttgccgtatatttctgccagcattacggagttctggcggcggtggcacatttccctgtccggctggttccgggattacatctacattccgctgggcggcaaccgcaagggcgccgcgcggcagatgctgaacatgttcctcgtctgggtcgccaccggcatctggcacggcgccagctggaacttcatcgtgtgggggctgtactattttgtgctgctggtcatcgagaagaatttcctgctgaaattcctgaagaaatgcccgcttgcggcccatatttacacgctgttctttgtggtgctgggctggggcatctttaccgccaaccagcccggtgcgccgctggggctgctgctcaacaagctgtttgtgccccagggcggcatctcgccggtgtattatctgcgcaactacggcgtatttttggtgctgggctgcgtgtgttcgtcggtgctgccccgcttgctgtgggagcgcatcagccgcaatacggcggtaaaagcggtggtctcagccctgctggcgctgctgtgcattgcctatgtagtggccgccaccaacacgacggccctgtacgccaatttctgaaaggaggaacgggatcatgggaaaagttgtataccgcaaagaaaaaaagagccgttccccctatccgctgctgattctgggcgcggtggtcgtgtttgggttttcgctggtgaatctggtgtttcccaagcgcgaccagctggaactggaaaaccgcaaggccgcgcagctgccggcgttcagcgtttcggcactgctggacggcagctggcagagcgggtttgcccgctggatgcaggaccagtttgccctgcgtgatgtctgggtcaacacccagcgcgcggcggacgaaatcgttttccagaaagtcgaggagggcggcatcctgctgggcaaggaccactggatgtttacgaagctctttaccgtggacgatgccacccagaagcagcttgctaagaacgtgcaggctgtcagcgattttgcggcggctcatcccggcaaggtgacgtttttgctggcgccctcggccagtgtgatctatcccgaggagctgcccgccggtgccccgatggcggacgagaacgcgatgctggacgatatttttactacggttggtcaaaatgccagcgtgttggacctgcgccccacctttaccgccgacaagaacaagaacgagtacctgtactttaagaccgaccaccactggacgcccaacggcgcctaccgcgcgtatgagcagttctgtgcaatgaagggcctgacgccttttgaccgtgacacccatgagtcgatcacggtgacggatttccaaggcacccactattcggccacgcggctgtggaacgtagagaacgacgagatcacctactacccgctgaaaaacgagatgaccatttaccgcatcaccggcgaggccgcctatgagccggagaccactgagaatctcatcaacacgatgaagttcaacacacgggacaagtacgccgcatttttggacggcaacaacggctactcggtcatcgagggcgacggcgagggcagcattttggtagtgaaggacagctacgccaatagctttatcccctacctgaccgccaactatggcaagatcggcgtggtggatttccgcaactttaagtatgggctggactccaccattgagcaggaaggctacgatgaagtgctgatcttgtacaacttccagacttttatcgccgattccaacctgatttatatctcccgtcccagcaccttgcagtaaattataacgacacacggcctttccttttgcggtttgcaaagggaaaggccgttttttattgcatcgttattcccacaaaatttgcagggtgggtgttttaggtgctgcgttggggccgtagacgcattgctgccagaagccaaagtggaaaaggtcactggcggcggtggctttggttaaaactgcaaaagaggtttgcaaatcggcttccagggccttgcgtagggcagcttcgtctgccggggcggccaggctgcgcaggtcagcgccgtgcaggtggagctggaccgtactgccgtaggctgtcacctcggcgcgggcggtgcaggcggcggtgtcggcggcgtaagtggtttccaggcgggtggtctgcccggccagaaacgcagccagctgggccgtcaggcctgtacagcggcggggtgcggccttttccttttgagccagcagggtgaagtcatacccgccaccttgcggtaaggccgggacggcgcagcccgcgtgctgggtgaaaagctgctgcaggccgcagtggactttgtagtggtcctcgatggcctgcatccgctcatataagccttgggcatcctgctgccaatcgtggtcggcgctgtcaagaagaaagaccgaaagttccggtgcaggctgggcgcggtcgtagagtaacaggccgatctcctgcgcttgttcccagtcggccccgacaggcagggcggcggcgtccagcagaccgtagtagacggtgcccggcagggtcgcagcggcgttttccagcgcctgggccggggtgggcgcggcggcgctggtggttttaaaggcagactcgccctccggggcgttctggtcggccagcagcaggcagacagaataatgttcaccctgctgtgcaaaaaagacggcgcggacgatttcccgcttggaaagcggctggccgccacagccgcaaagcagcaggctgcaaagcaacaccatcaggagcagcgccggaatttttggcataaccatgccgcagcacccccgatccaggcaagaagtacaaagccccaggtgaacgcactgcgccagcgcagggcggcgtccacatccagcccacgcagcagcgggcagaccgtaggcagcaacagcaggtacacgcaaaacggccccaagttggcggcggcattctcctgccgggcctcaccgcccagcaggcgcgtcatggcgtaaaagtagagcgccagcttgatcgtaacggccatgacccacaaaatcaattgaagccattccatccgcgtaaagaccgagagtgccccgcagcgggcggcggcgtggagcgggtcggcccgcaggggcatggccgcgccgtaaaacagctccagcatcgcgtggattgtcacatcaaagccaagggcgacaccggccagccacagcagcgtgtggcggccgcgcttttgcggttccggccagagggcgggcagtagatattccgggtatagtgtcagctggtcgcgggcggcgtcggcgaaatccggccagatcagcgcggcgttttgcaggttggtgatgtgcagccgcggaaagaccgacagcagcattcccgccgtggcgatgcagagcaggcacagcaccacgtaggccgtctgcgaaatagccgagacgcggcgcaggtagagaattggcagcagcaccagcaggcagagtgccagctgggtgacggcaccgggatataaccgctgcgtgaggttccacaggcgcagcagttccagcaccgaggtgcccgccagcagcagggcaaacagcaggcgcaatagcggcgtagccccctgccgccagctgacggcaaacagtgcgcctactgcggccagcaccggcgcacaaaccagtgcggccgccgccccagcgcggcaccagtaagctgtttggctgcgcagcagcacgttgaccagcacccccaccagcagcgcggcgtacaggctgggatgttcacatttcatggcggccgatcacctccccggctttggccagctcggaccagatactgcgcacaaaaccgtcccggacgctggctttgcccgggggcatcagcgggtagagatagtcgtacccgaagggctcgctgccgcaggccatggctaagatcatcagcgcggcgcaggtcagccccagcacgccgaacagcccggccagcagaatgacacagaagcgaaacaaaatgctttgctcgtacagagaaggcacagccagcgtggcgatagttgcggccgccgccatggtaagcaccggcacactgacgatgccggcattgacggctgtctcgccaataatgagtgcgcccacaatactgaccgtgtggctgatggattgaggcgcacgcagacccgcctctcggacgatttccagcagcaaggtcaccgccagcatttccagcatcggcggcaagggtgtctgggcttcggcctgggcaagtttcgtcaacagctgcgcggggatgatctccggtgcaaaggccaccgccattacgtacagtccagggccaaacaccgacagaaggaacgccagatattttaaaagccggatcagccccgcgaagaccgcgcccgaggcgtagtcgtccaagcactcgaaatgctcggcaaaaaagctgggcaccaccatagcgtaggggcagcctgccaccagcaccacggctttgccctcgcacaggcgtgcgcaggcggtggcggggcgctcggtgtaggcggcggccgggaacaggttgagtttatcctgctttaaaaaagaggcaaagtaagcactatccaaaagcacgggcagttcgattttttccagacggtcccgaagggcatggatggtttcagccggggccagggcgctgtcatagcacaggcagtattcggtcttggcgcgggtatgggcggtggcaatttccgccaccagcgtgccggaacggaactggcggcgcagcagggatacgttattgcgcagcagttcggtgaatgcctcctgtgagccgcgcatgttgccctcaccgctgggggtgctgatgctgcgctggggcatttcctgggtggagaacacaactgcctggtcacagtcatcaataagcagcagtgacatgccgttggccagcagttccccgatctcttctatatccgaggctggctgcggctcagcggggataaggctttgcttaagcagatagtcgcacagccccggcccgccgccgaaaaaggccgggtcgcgatccagcatatcaagggctaaccggcagagtttttccggcgaggaaattcctgtaaacataatgatggcgcagcggatgccgcccaccgagagctttttggtatagaaatcgtccgagccgccaaatctatcttgcagaaccgcaagattttgggtcagggcccggcacaaggctggtttttgcatggcgttccctcctgccctttagtcttgcccggcgtttgggattttatgaggggggtccgctatgcttgccagcgtttttcgcactgtcattgtttatgttgccgttatcaccgccatgcggctgatgggcaagcggcagctgggggaattgcagcccgccgagctggtgaccacctttctcatctccaatgtagcgtccatctgcatcgatgagccggatttgccgctggcggccagcatcgtgccgatttttttgcttacagcgctggagattttgaactctactctggcctggttctgtccccggtatgcgcggctgctgttcggcaagccgatcaccgtcattgtgcggggtgaaattcggcagcaggcattgcaggagctgcgcatcacggcgtccgacttgatggaagcactgcggggcaaggagtacttttcccccgccgaactgttatgggccacggtggagccaaacggcagtatcagcaccgcaccggtgcctcaaaacagcgaagccccgcccatgctgccgctgctgctggaaggcacggtttaccgggagaacctcgccttttttggcgtggatgagccttggctggatgaccgccttgccgaaaagcagctgacccggccacaggtgttgctgctgctttataatggcaaagacctgctgatcgtgccccggcaaaacacaaaagggccgcccccgaaggggcggcccggaaaggacgcggtatgagtcgaaaccgatatgcggtgatcctgttggtagtgctggcgctgactttatggctggcggggcggtacgtgaaccgcaccacggccaccctttgcaatgagctgcaaaccgcctgcaccctggccgagaccggccaaatgccgcaggcacagcaagcttaccgagcggctgcggataacgctgcccaggccagcaaggtgctggggatgctggtgcggcgcaatctcatcgaccagatgaaccaaaccttaagcctgctgcccggctgtgccaaagaagagaaccttacggacctcaccctagagacggaccgggcctgttgccagctgcaacagatacagcaatcatttttcggcagtttttgatcggctgtccagcatgtccttcaattcttccataaaggtgttgacgtcgctgaactggcggtagacggaggcgaagcgcacataggcgacatcatccatctgcttgagctcctgcatagccagatcgccgatatggatggaagagacttcgcggtcataggagttgagcaacagctgctcgatccggctgacagcgtcgtccaactgctggtagctgacggggcgcttttcgcaggcgcgcagcataccgttcagcagcttctggcggtcaaatacctcacgggagtggtctttcttgacgaccatcaggggcaccgtctcgacgatctcgtaggtcgtaaaacgctttttgcagttcagacattcgcggcggcggcggatcttttcaccgtcctcagtcgggcgggagtcaataactttggaatccacttccccacaatacgggcatttcatagctgtctccttacttgtacagggtcatcaggcttcctttttggcggcctttttcttggacttccagtcgacccacagcggcgtagcgatgcagatcgtgctgtacacaccactgaccatgccgaacagcagcgggaacgcgaaggtgtagatgctgtccagacggtagatgacggacacaacgcagacgacacccagcgccaggcaggtggtgatggaggtcatcaacgaacgggagaagctctggttgacggacaggttgaccagctcggccaggcccatctgctttttgctgtacagggcactgttctcgcggatacggtcgtagataacgacggtatcgttgatggagtagcccaggatggtcagcacggcagcgatgaagttgccgttcagaggaatacgcaggatgacaaagacgccgaagacgacgaacatatcatgcagcagggccacgatggcggtggaaccagccttgagaccgccgatcttgcggaagcggaaggccacgtaagccaggatcagcacgcaggcggcgaccagggcgaccaggctcttgaacaggaactccttaccgatggtggcgttgacattgctgacctcgttctgctcgaagttgttttcggggtgagcttcgttgatggcggtcagcatatcgtccagctgctcggtggtcagggtctggctgcccggcagggtcacggtcaaggtctggttgccggaaatgtcggagccggtctggagggtcaggtcgctctggcccagctggctgccgatctcgctcttcaggctgggcagatcaacgtcgccctcatagctcagggtgaccatggagccgcccttgaactcgacgtccatcttgacgccgaacacggcgcagaagacgaggacgatagcgatcagtgcgcaggagaaggtgtagaacttcttgcggttgccgatgaagttgatgtgcggggtcttgtactcagcagtgccatccttcttgccgccgtacaaccaggggttgcgcagggccttgcagtggacggcgccgcggatcataacgcgggtagcccagacaccgaagacgaagttgagcagcacgctggtgagcagtgtaaagccgaaggagtagacagtaccggcggtggagggtccgaaccagaagaagatcgggttgaacaccttagcccagaagccgtcggtggggccgaaagcgcccatcaggatagcggcgacgatgacgatggtgacgttgccgtcgatgatgggggtcaggcccatcttgaagccgctcttgacggcggcaggcagggtcttgtttttagcgagctcttccttgatacgctcggcggtgatgacgttggcgtcaacgcccataccgatgcccaggatgataccagcgatgccgggcagggtcagggtagaacccgggaacacagtaaagtagccggaaacgacagccagggtagcgaccacctggccgaacaaagagatggtagcgatggtaccgggcagacggtaacgcacaatcatcatcacagcgacgagcgcaaaagcgatgatgccggccagaaccatgacctccagactcttagcgcccaaggacgggctgatagtggagtagctctcggcagacagggcgaaaggcagtgcgccggaattgatctggttggccagcgcggaagcgctgtcctgatcaaagttgcccttgatgatggcctcgccgccggtaatggcctcgtcgactgtggcggtggagatgttttcatcatccaaccagatggagatcgtgccgttgttggcggcttgctcggtggtagcatcggcaaaagcagcagcaccagcggaattgaacttcagctggacgacccagccctccgtctcgttatacgcggcattggcggaagtcacgtcgtcaccgctgaggatttcttccccatctgcggtggaacccttgcggaacaccatcttagcggtggtgccgatctcatcgatagccgtctgcgggttgaaatcagcctcgccggtcttccatgggaaacggacgatgatacgatccttgttactgtcaacatagctctcgtagtccgtaatgcccaggccgaccagacggtcctcgataacggtttttgccgccgtcatctgttcgggggtggcatccacatcaccggcgggcataaaggtaacatcgacaccgccgcggatatcgataccgaagcggatatccgaagcacccttgatgtagatgttcttagtgtcgccgtactgatagcttacgccgaagatcgcagtcagggaaaacaccacgatcagaattgccacgacaaacagcggccatgacttccctttcttgttcatagaaacctccaaaaatatgcccgcgcctgcgagcgggatagatttatgcgccggaattactgctgatccgccagcagcttttcgacgaccgccagacgtacacagacgcacagcagagccgatgcagtctcgacttcgtcaaggctgggataggtcggcgcaatgcgcaggtgagagtcctcggggtccttgtggtaggggtaagcggagcctgccccggtcagcgtgaggccgcagtctttgcacagctgggcaacgcgcttggcacagcccggcataacgtacaggctgatgaagtaaccgcccttggggttggtccagtgggcaatgttgccgcagggggtcagctcggtggcaaaagcggtcttgacggcgtcaaagcaaggcaccaggcggcggcgatgcttggccatgtgggcgagtacgcccgctttgttcttaaggaagcggacatggcgcagctggttcatcttatcatagctgatgatcatggtagagaagcgcttgcacatgtacttcatcgagttctcactgcaggcgatggcagagacaccggcaccagggaaagtgatcttgctggtggaagtgaacatgaagacgcgatcctcattgccgtacttcttggcctcgttcagcagcacaggggtctcgatgatttcatcggtcaagtggtgcacgatgtaggcctcgtcccagaagatcttgaaatccggggcagcggtcttgagtgcggcaaagcggcgaatggtctcatcgctgtaagtgtagccatctgggttggagtactgcggcacgcaccagatgcctttgatggtatcatcctcagccacgagcttctcgatcatgtccatatcggggccgtctgggctcatagggacgctgatgaggtcaaagcccatttcctcggtgatggcgaagtggcggtcatagccgggcaccgggcagaggaacttgcgcttctctacctgggaccaggggcacggagaatcctggaagccaaacatataaccgatggctaccaggttgtacatcagctgcaggctggagttgccgcctacaaaaacttccgcgggctttacgccaaacacatcggcaaacagttcgcgagcctcctgcaggccttccaattcgccataattgcgggcgtcgaagccgtcatcggtggtatagtcgtccatcttcagcagatccatcgccagatccatctggtgagggccgggcttaccgcgggccatgttgagtttcaggcccatgtcctgaaacttcttgtactgtgcttccagcgcagctttctctgcggtcagctcgtcacgattcattgacaggtaatcagccataatcaaagtccccctatatcattttcccacacgctgtatcccctctattttgatacagcacatgcgtacattacattatatacggttttgagcaaaagaacaagcgtttttgccgcatttttgcccgcaaaacgcaaatagtgtaccaaaaagcgggatatttttgcatttttaaaaagtcagaagccgtttttactgaattgacgagagattttctgcggatttttgacgagagattgcagggacagacttactgcagggcggctttttgatacgccggatgccaaaaggaaagagcctatattcaactgcaaaacgttgaatataggctctcatgccgccgaccgggatcgaaccggtacggtatcgctaccgagggattttaagtcccttgcgtctgccagttccgccacggcggcacaatgtacagctaactttagcatacatacgcgcaattgtcaagctgtacggtgggcgaggtgtcccctgcttatcgcaaattatcacctttgaacgttaaattttatcgtatgttctctgcccgtggatttttatttaggccctgcttattttgatttttcaatcagctcccgggcgttggccaggctcaactcggtgactttatcgccggagatcatgcgggccagcacttccactcggccgttcatatcaagggtatggatctcagtaaaggtgcggtcatcgcgtacgtttttctggatgagcagttggttatcggcaaaagcggccacctgcggcgtatgggtgatgcaaagcacctgatggcctgccgctgtctggtgcagcagctggccgatgcgccccgccgccaggccggaaacaccggtgtcgatctcatcgtagatgacggtgggcagggcgtcgcggtcggccagggcactcttgaacgccagcataatacgggaaagctcaccgcccgaggcgattttggccaggggcttggggtcctcgccagggttggtggagatgaggaattccaccgtatcctgcccgtgggaggacagcggaccccgtgcatgcttgagggcaaagcggatgcccggcatgttcagaaattccagcgccgcccgcatctctttattcattgccgtaaagccctttaagcggctctgggtcagagcttccgcggcctttttggcgtcggcatataaggcctgcacctgagtcttcagttcggcaatcttctggccggaggactggaagttttccaactccgccgcagcggcttcccgccgggccagcagttcttccacttccatgccaaacttttgcttgatgcggtagatcgtgtcgaggcggctctcgatcatgtccagttcgccggggtcaaagccgtaggcgtccaggcggtcggccagctcggtggccaggtcgcgggcgctatagtacaagtcgttgaggcgttcggacagcggggccagcgtttcgtccaaccgggcgctgttctgcaatccctcgaccgcgccgcccaacaagtcggcggcaccgggctgttcaccgtcctcgtcccctgccagcgccagatgggcggcggtgatgccgtccaaaataccttgggcgtgggtgatgacggtcttgcgctcctgcaggtttttctcctcaccgggctgcaatgcggcggcatctatggcgtcgatttcagcggtcagtgcttcgatcttgcgctgcttgtcggcctcgctggcattgagggcgtccagctggcgcttgacggtgaccagctcgcggtagcggcggtagtaatctgcaaacaaatcacggttctgggcatactggtccagcagacccaggtgcagggcaggattcgtcaggctttggctgtcgtgctggccgtggatggacagcagccctgcggaaatatcccgcacgacggcggcggtagcgggcatgccgttgacacggcagctgcccttgccctcggcgttgatctcgcggtagagcaaaaggtcgtcgttggcctcatagccgcacttttccagctgctttttcaccgactgggggatattttcaaaggttgcccagatgcaggctttctgtgcgccgctgcgcaccagttcccgcgaggtgcggttgcccaggatggcgttgatggaatcgatcaggatcgatttgcctgcgccggtctcgccggtaagcacgttaaagccgggggtgaaattcacctcggctttttcgatcacggctacattttcaattttcaggtttgccagcatgggccagccctcccccgtccgttgttatgctttgcttagccgcggcggacatactgctgcaaagacttgcagatctcggccgcgccatcctcggtacgcatgaggataaagaacgtatcgtcgccggaaagcgtgccgacaaccccattccactgtttggcgtcaaacacttcacaggcagcgttggccatgccggagaagcacttgaccagcaccagatgcccggcgtagtcgaccttgaggactgactcgcggaagatcatctcgaaccggctgggcgaatgggtcaccttgccggaggctgcggcgggcatgtagcggtaatggccgtcggcatcggccaccttgaccaactgcaggtcacggatgtcgcgggaaacggtggcctgggtcacatcgaacccctcctcccgcaggtgggccagcaggtcctcctggcggtcgatgggatgtttttcgatcagatcgagaattgcctgatgacgcgcgcttttcaagtgagatcaactcctcatcaatttattttcaatggcgtggaactgctcggaatcataaaatgtaatcagctgcaatttttggggcgcagctgttacggtaagtacatcgccgggctgcagatcgcactgggcggtgctgtcagcgcaggcataacaggtatcgcggttttcggcatcagcaaccagctccagcctgcggcctgcagcaaacaccagcggggccacctgggcgttgtgggcgcagacaggcgtcaacaccaccacatcagcggcggcatccagcaccgggccgcccgctgagaaggagtaggccgtggagccggtgggcgttgccaggatcaagccatcgctgcggtagctgctgacaaagcagccgtcgcagtagactttatagtccatcgggtgcatgcgggtgcggccgaaaagcaccacatcgttgatggcttcggcctgccagccgttggcagacctggccagcagcaggccgcgcgggtcgagggtatagcggccctcggccagcagacgcagcttttcgggcatctcctccacctcgcaggtggccaaaaagcccgtgcggcccaggttgacgcccagcaccggcttgccataatgcacacagtccagcccggctttcagcagcgtaccgtcaccgccgatggtgatgacgaaatcggcttcgcggtaggcttcttcctcaggcagaaagcggatgggcaccttggattcaaagaccggctgggccatgaccacggccacacccaactcatgcagcagcgcggccgcctggccggtgactgcatagccgctgtccttggtagggtttgttaccagtaaaaccgtcattgcgggtacaccctcttactcagtgcagattcggggccttatccagcgtttcgtgggctttggccacggtttgctcgatcaggctctcaggcagcggctgcggattttcgcagtgctgcacgtacatcaaaaactcgatgttgccctcgggtcccttgatgggcgaaaaatccaggcccgccggggtaaaatggttggccatggcatagccctgggccatctccagcacctcacggtgggtggcaggctcacgcacgacgcctttttttcctactttctcgcgcccggcctcaaactggggcttgaccaggcagacgcctacggcgtccggcgtggtaatggcatcagccaccgggaagatatgtttgagcgaaataaacgatacatcaacgctgaagaacgccaccggctctgacaagtcctcgggctttacattgcggatgttggtgcgttccatgttgacgacacgctcatcggtgcgcaggctccaggccagctggccgtagcccacgtccaccgcgtaaacttttaccgcgccgttttgcagcatgcagtcggtaaagccgccggtggaggcacctatgtccatgcagactttgccatccggccgcatgggaaagacctgcatcgccttttccagtttaagaccaccgcggctgacatagccgatatcgtgcccgcgcacttcgactttagcgtcggggctgatcatctcaccggccttatccaccttctgctcgtccacaaatacaatgccggacatgatgagggctttggcgcgctctcggctttggacaaggccgttctggcaaaggtactggtcaagacggatcttactcatgcttgggttctccttactttatacaggcaaggacgtccgcagccaaggcggcggcatccaggttttggtctttacgcaactctgccacactggcgtggagcagatgggaattatcgacagcgtgcagcaggtattttccctgccagccggcctgctgcagggcaaagcccagctgctggccgatgccgccggtgcggatggcatcctcggcaaacaaaatcgtatcgtaatcggccaaggcttcgcacagaccttccggcagcgggaagatgcgggtcagcttgtaggcgtcagcggccactttcttttgcagcagcaaatcggtggcagcgatgatttcttcactttcggcgccatagctgacgagggcgactttcgcgcccggccgggtgtcgatcttatcaaacaggttgcccgtgcagccaagagccaccagggcttctttctcattgccgcgggcgtagcggatggcgcggggaccggtcatatccttgacaaggtgcggcagccagtatttcagctccgcatagttggcgggggcgaatacggggatgccgatctggctgaagaaagccgggtcatagataccctggtgggtctcgccgtcaccagggacaaggcccgcacggtcaacgccaaacagcacgttcaggtgcatcaggctgacatcgtggataatctggtcgtaggcacgctggaaaaaggtggagtagatggccaccgtgggcagcagcccttggctggccaggcccgctgcaaagctgacggcgtgctcctcggccatgccgacatcatagaaccgctctttgtggcggtgcttgaagaagttgaggccggtgccgtacttcatagccgccgtgatggcgcaaagttccggcacatcatcgccaatctcggccaatgtggagccgaacaccgtcgagaaggaatccttgggcgacagctccgggtcggtcaggtggcttaaatcgatggaagaaacagcgtggaactcgccggggttttcctcggcgggctttaagcccttacctttttgggtgaccacgtgcaggaagatgggggcgaactgttcctgcaagttcgtgaacatctgttccatcagcagcacatcgtggccgtccacagggccgatatactggaagcccatctcctcgaacatcgtggagtggtagatgccccggcgcaccagctgtttgccgccctgcagcgccttgaccatggcattgcccgccacaggaatacgctccagcgcggtttccatctgggccttaacgtggaaatattttgggtcggtgcgcagtttggtcagataattggccatctggccgacgtttttcgagatcgacatcttgttgtcgttcaggatgcagatcaggttgttcagctggctgacgttgttcatgccctcgtagaccatgccgcccgtaaaggcgccgtcgcccacgatgacgaccactttgcccggctcgcctttgagctttttggcacgggcaatgccgatggcggtggacagcgccgcgctgccatgacctgcaatgaaggtatcgcaggggctttccttcgggttggggaaaccggacaggccgtttttctggcgcagctcggcaaagccagccatgcggccggtgagcagtttatgagtatagcactggtggccaacgtcaaacaaaattttatcctgcggcaggtccagggcgcggtgcagagccaccgtaagctctaccacaccaaggttggaggacaagtgcccccctgttgcggaaacgctctcgatcaaaaattgacgaatttcctcgcacagggcaggcagttcactctcctgcagccgcttcacatcgccgggcgcctggatgcgccctaaaagcggataggtcattgataagcacctcgctgtaaatttacgcgctcataccatgggcattgcaaacccaagtgcgatgccgagtacagcacccgtcagcacttcgatcggggtatggccgaccatttcctttaattttttaccacccaggaacggcagggcgttcacgccctggtccatccactcgttaaacatccggttcagcagtttggcctgctcgcccgtttcgtagcgcacacccatggcatcgtacataacgatgatggacacgaccgccgcaagggcgaactctgtcgaagtgacgccgcagtagcgcccggtagccactaccatggcgcatacggtggccgagtgggagctgggcatgccgcccgcaccccacatacgctccgggataaaacgatggaagatgaaaaggttcaggatcaccttgatgaattgcgccagaaaagaaccgcacagcgctgttaccagcacgtagttccaccccagcgcggcgtgcagcagtggcatggtatcctcacttcctattggcaaaaccgcagggccgttttggcggcgcgtgcgggattcgtctgtttttactttttgcgctgcagcagttcccctgccagcaggcgcaggaaatcctcctgcgcaccaaacccatccagggccgccatggcggtatcgttatgctgctttgccagcgcacgtgccccgtccaggccgtagagggtgataaaggtcgttttgtcgttatcggcatcgctgccgacaggcttgcccagttcttcggtggtagaggtcacatcgaggatgtcgtccacgatctggaacacaaggcccacttcggccgcatactgcacaagagccttgcgcagggcgggcgcggcattggcagccgtacagcccagttccactgctacgatgatgagtgcaccggtcttgttgcggtgcagttctaacagctggtcctcagtggcacgaatggtctcgtaatgtttgtcaagttcctgcccgtagagcataccacgggcaccgccccctttggccagaatagcggcggcttctacccggctctcggcgggcaggtcggcgtgggcgatgacctcaaatgcggcggtgaccaaagcatccgctgccagcagggccgtggattcgccaaactgcttgtggcagctagggcggccgcggcggaaatcatcgttgtccatgcagggcatgtcgtcgtggatgagcgaatagcagtgcagcatttccagcgcacaggcgtagtccaacgcctttcccggcgcggtgccgctcagttcacaggcggccagcgccagcacggcgcggatgcgtttgccgccgcccagcaggctgtagcgggcggcttttgcaatttcctcgtgtggggggagaaattcatcgcacagttcacccaggcgctgctcggtcagggcagcccaggcggtaagcttagccttatagtcctcgtaattcattgcacgtcctccgcctttgccagcaggctggcatcgatctcattgatctgcagcttggccgcgtccagcgtctgcttgcaatagctgataagtcccgccgcctcggcatacagtttgacggactgcgccaacggcgtggattcatcctgcagtgccgtcagcaattcctgcagacgggtcaggccttcttcaaaggattttggctgtttcatagggtcataccttcctgcgcgtttttgtgcacgctctgcaccacgcaatcggcccggacggccgcaccgcacagggtgatggcgtcgcccggctgcagtgcggcgacctcgctgaccgcgccgtccttctcgaccatggcatagccgcgggccagcacgccgtaggggttcagcgattcggccatcgcggcggcgtggcgcaggctcgtctcggcgtccgtaaagcggcggacggcggcgccctgcacagcctcgctcaggcgggcaaggtcagtttccctgcgctgcatggcctgtttctggcgctgcatggtctgggatgctgccagggcgtttaccttattatagcatacttcgcagcgattctgtatatttttttgaatattttgctgtaaaatgaatattttctgccgccattcttcccggtccggcacacagagttcggcggccgccgagggggtcggtgcgcgcaggtcggccacatagtccaaaatggtggtgtcgatctcgtgcccgacagcggaaactacgggtttgcggcaggccgcggcagcgcgggcgatgcgctcgctgttgaagacccagagatcctccttactgccgccgcctcgggtgaccaaaatcaagtccgggcgcttatccgcatccagtgcgcggatgcccgccacgatgctgcgctcggcttcgatgccctgcacgttgacaggggccagcagcagcttgaccatcggccagcggcggccgatgacgttctgcacatcctgccaggctgcgccggtcttgctggtgaccacaccgatgcactggggcaccggcggcagcggacgtttgcgctcgggggcgaaaaggccctcggcgtccagctttttgtacagagcgtcaaaggccatctgggccgcaccggcgccaaagggcttcatataatccacgtacagctggaacgcgccgtcccgctcgtaaatggtggcgcggccgtaggccagcaccagcatgccgttctgcggctggaagttaagcagctgggcagaattacgaaacatcacgctttttacgctggcggtctcgtcctttaaggtaaagtacatatggccgcttttgtagtggcgcacaaaaccagagatctcgccgcagacgattaaatcgttcagcggctcgcactgggcaagcacctgcctggccaggcggttcaggctggttacattgatgtagtctgccatgctccctgctcccttgcggccaggatcgacacgccgatggcgttatcgctggcgaatttaccgggcacgaaccgtgcgccgggcactcgggccgatacgtaggtgcggatgaggtcgctgctcatcacgccgccggcaaacaccacaggcaggccaggatggtcttccagcgcggcgcgggccatacgggtcagcgtttcggccacgcagatcaggcagtatttgcagacgtaggcgggatccttgccttcggccagcaatttggtatactggttttccagcccggaaaggctgcagttgacaccctttacgctgactttggggtgcactttctcagtgcactgggccgcctgctcactgacatagacgcccgccgggaacggatagcccagcttaacgcccaagcggtccaccgcctgcccggcgtagagatcctggctggtacccagcggcgtgatgcgctcggccccttggcagagcaaaaggtccgtggtaccgccggagacgtggaaaacaaggttttcctgctcgaacagctcacgttcccctgtggcaaacagggcagcggcgatatgcccctgctggtgggtggtgtgtatcagcgggatgcccttgcccagcgcaaaggccgcagcggcgttgacgcccgccaaaaagcagggcatgtaggagccctccaccgggcggggcttggcggaaacgcccaccgcgccgatttgggtcagatctgctttggtgccaagttcagccaacaggtccggcagggcggcggtgtggtggaacagtgcgtcactttggcgcaggcccagctggcccgccttgaccggcaaaaactttttgcaatcgcaaacaacctctccggcgtttgtgtcaaacacagccagagaggttgcataattgctggtatcgatgcccagcgtcagcattgcggctgggcggcttcggcaacaggctgctcgccgcgctcccgtgcaacggcacccagcaggccgttgacgaactggtagtcgttgtcagctccgtactttttgacaagctcaacagcttcgttgatggcgacaccggtcttctgctcctcgccatacagcatctcagccaagccgaggcgcagggccaccaggctgacgcggggcacgcgggccagcgtccagcccttgagatgggcggtgatgatctcgtcgagttcggcggcgtggtcgttcatcgcggccagcagctgggtggcgaaggcatccggtgcggccgattcggtttcggcgggcaccagcggggtctccggctcaaaggtggcggcaaatgccgtcagaaacgccgtctcgcgggattcgcggcgggtctgctttttttccatacttggttcctgtctttccttttctctacgaattctctactaaacgctcaggcctgggcggcaggctcggccaggccgacgaccagcacatccacgcgggccaccgtgatgccggtcatgttctggatggtctgcttgacattttcctgcactttctcgcaaaggggcatgatcttgctgccgtatacagcggtcaggtgtacggtaacggtggcaatgccatcctccagcaccacgttgaccggcttctgcaagccggtacgacccagcaggccgcggacattctggctgccgccggtcgtcacttcggccacgccgtcaatttccagggccgccagcctggcgatcttagcaagaacttcggtagatatttgcaagctgccgccgatggtcttctgtacatccatgttgtgtaccctcccgttgcatgcggtttgcaaaactgctgttgcagcttacaattgccgccattttagatagtatagtttagtttaccacaaaaccatgccatttgcaaccgatacacaagttttcacggttattttacttctacgatcgtgatgtcctgggccgccagcccttcgcactggctgagcagggcatcccggatgcgggtgacctcggcggcagtgagggcgtcgttttctgtcatgacggtaacgttggcttttttgccctctaaatccaccacgcaatcggcaaagcctttggattttattaaagtttccagcttggtttcaagagtgatgctacttacttgcgcggccaggtcctctgtcagttttttcttctcagcatcgctgagtttggcgtctttcagggattttttcagagtgtccagcgcttcatcccgggcttttgtgcgggccaggcgggcagactcgaaaaactctgcgcccgaatctttgcttacgctgaccatctgggcctccccgtagtttttgccggtgggggcctgggtatcggtggtgtccacagccgcggcggtttctacggcggtgtcatcggtcagcgggtcaatgacggcggagacctcctgcgcggtaccgtcggcaatcgcacccaccgttagatcctggggtgcggctcgggcaaaggaccagttcaggtagacagccgcccccagcgccagggccagaacagccgccgtagcctgccgggtacggttcttttttgcgggattcggtttcatagcagtccctcccttgggtcagttgtggggtattgcgtcggccagcgccgccacagtaacatggttggcccccaccccggtcaacgcctgtaccagggcggtgatgcgcgtctggacggcggggtcttcgccgccctggcagagcacggccacgccctgcacctggggcgtctggatagtttcaacaaggccggtgccgcccgtgatgacatgcttgctggcagcggtgccgtcggcggaagtctcggtgtcggcggcgtagatgctctcctcgccgcattgcagggtgaccatcacacgggtctcgcccgccccggcaagattggagataagcgtttgcaggcgggcttcgaggtgggcttcgtagtccgaggtgatcgtgctttgcggcattggggcggtggtttcgggcttggatttagcgggcagccagctggaaacacccagcaggacaaggcccagcagtcccaccgccaccaacaggccggtacgcttttgctcgtcagccagcagggcggcggtacgtttggtaagggtttgccacagggcggaaaggtccactttcatggtgccgtcccccctgccgtgatttcataggggatcgtgccgcagttggccgcaagcagggcttcggccttttggccgtccgctgcatgcaccagcgtgacctgccagccggtatccgtgcgggcaatggccgcttcgatgccgctggcggcaaggacatcccgcaacgcctgggcggcggcttcgtcggtcagagtgcggcggtaagcgccgacctcgctgtcggatacggacgaactgtcggatgccggggccagctcggcagcaatgcccgcccagtccgccacacggatgatctgcaccgccgccgttataatatacaaagccagcacggcatttatgacaggtttgaagccgttttccggccagaagatccgcaccagccctgccacggtggaaagcacacagcagccaaaggcagccgaacgcacagcagccatttttacaccccatttcctgtaagcagtaaaagcgccgtggataaaaacacgaggaaaaagtaaagcaccagcaccgagccgcacagccccgcgccctcggcatacaaacggcacagccgtccgcactgcttttgcccgcctgccagtgcggcaatgcctgcaccggaaaaggccaggctgtataaaaggcagtgtaatagtatcggcgtaaaggatgcccccagcgccagcagtgccgctaaggccagcgagcctttgagcagctgcacggcggcggccgcgccggtcagggccgcagcggcggcatcccccaccaccggcactgcgccctgcaagacacttttgccggtgcgcagggcggcagaatccgccgtgccagccagcacgctttgcaggcccagcacaaagctgaacaccgcgccgcagacctttaacagccaatgcaggcacttggagaaaagggcggcggcttcctccaccgcgcggctgccccagacgcaggcacaggccgcaaagcagaagtaaatttccagcaccggcaaaagcagtttgccgatgaccgctgccaaaaactgcgccatggcgaagaacataccactgtagaccagtgccccggcggtctgcccgcctgccgccgcaatgccgctgtagaccggcacgaaggcgataaggtagttctggcaatcttgcgccgtgtcccccgcggcgcgcaccaggtcgatgcccgccgccaagctcatggcggcgaagcccaacacggcgacggcgtcaatgcagcgcctccagttgttggccccggccagcaggcccagcacgcccgccaccagcaagtaccctgccgcccgcaagccaaaggccagtggctcgccgatgttggcggcaaggtaatctttcgccatctgccacaattcggcaaagccccagcctgcggcctgctgtagggtgggcacgccgtccaaaagctgggcagcattttgctgtaagctttccgccccggcaggcaggggcagcgcggcggctattgcaagtagcccgcaaagcaatccagcagttcttgcaaaagcggcagggcctgcaaaagcgccaggatgcgccctcccagttcggcagcggtggccgcggcggccatgccggcctcgcggcaggtatcggcggcaaactgcgccgccagcgcgatgcccaaaacgcgcaccaggcaccccagcccggccccctggaaatagccgccccaggtatccagccaatccagcaccggctgggcctgatgcagtactgccgccagcacccctgccgccgcacagacggagacgaggaacgcgaaggcgggctggtcctttttgagggtcaggcagagcacggcggcggtaaaggtcagcgcggcaagtcgaaagatcagcatagcgcatcacagttcaaacagtgctttgatgagcacaaacaggtcactgatctgccgcaccagcatgctcaacaccacgatcagccctgccagcgtggtcatcatggcctgatcctcccgtccggagcggatgagcagctggttgagcacggccacgatgataccggtggcagcgatcttgaaaacgagatcaatatccatcttcttcaccacaaaaggatggccagcagcagccccgcacagccgcccaggcgcggccacagcgccattgcacgggccgcgcggtcagcctggcggtcggcttcccggcggcagaggtccgccatgcggcgcagttcggcacaggcagcagcgcggtcgctgtgccccagggcggccaagctggcgtgcagctcccctgccagcgctttgggcaagtttggcaggggtaaggccgacagcgtacaatcgctatctgccgggagggccagcgccgcaaaggcggggttttcggcagcggcgtgcagcagcatggggccggtcagggcacggcaggtcagcagttcttctaagtaagtccacaggcgggacagcaggcggatacgcttttccaccgcctgccgccgcacagcaccgcaggcccccagcccggccccggcgcaggccagcagcagcgtgcccagaagccgcgccgtcatagctccacccactgggcccctgtgccgggacggctgcggcctgtaaggaacaccgccgcgccaaaggcccccgtagccagcagccgcgccaattggggcttgcgggtcaggctttcgggagcatcacagtggacggaggcgaggaaggtcgcccccgaggcaatgccttcttccagtgcggcggcatcggcggcggtgcccagctcgtcgcagacgatgtactgcgggttcatgcagcgcaatgccatgcagacggcctgcgccttaggaaagcgggtgtagacgtcgcatggcacatccgccccggcggtaaagccatcgctctccccggccaatagctcaccccgctcgtcgatgacgctgacaagagcatctttttcgcagagatagcggatgagcgtgcgcaggaacgttgtttttccgctgcccggtgggccggccaccagtaagccgccggtgtttttctgtaaaaatgcgggcacttcaggcggcaggccgcaggtgatgggccgggcaatacgcaggttgagggaggttactgcagagaagccgcccggcccccagctgcccgccacgcccacccggcagccgccgcggatagtgaaaaagccctggcggagttcttcttcataggcaaagaccgaatccctgcaaagatgctggaaacagtcctgcacctctttggctgtgagcctgcgcagcctgtccgcccggggcaggtacttggccgccgggcttatccggccattgaccgtaaacagcatagactgcccggcccgcaggcggatctcctgcacatagggcgcacagcgtatgggcagggcggccagctcggccgcgtagggctggggcaggcattgtgccaggcgataatactcgtccatttttcgcttcacctcacactgccactgtatgtgcggcggggcgggtacagaacccaccgccaaaaaatcacagccaaatgcttgacaaaacgccgctcaggtgctatagttagttacacaagtaatgaaccacttaaccacgtatggaaaggcggtgagcacttgcccccgacattgaatgaacagacttcgatttatctgcagattgccaaaatgctggaggatggcattttgcgcggcatctaccccgaggatacgcaggttcccagcaccaacgagctggcgcgtactttgtgcatcaacccggccacggcggccaaaggcctgaacctgctgaccgaggacggcatcctgtacaagcgccgcggcattggcatgtttgtagccccccgcgcggctgaaaagatacgcgccaagcgcaagcagacattttttgagcagtatgtccgccccctggcggccgaagctaagaacattggcatcacccctgcggaactgcaggccatgctggcccaggccagcgagaaggagtaaatgatggaagcaaaagttttaacagcccaaagcctttgcaagcgctacggcacgctggacgctttggaccatgtagacctgacgctggagcctgggcacatctacgggctgattggccgcaacggcgcgggcaagacgacactgctctcggccctgacggcgcagatgccggtggatgcgggcaccgtgacctacggcggcgcgcctgtgtgggagaatgaggctgtgctgggcgagctgtgcttcagccgggaattaggcagcaccgtcggtgggatgaacaacgccttgaaagtgaaggattatctgaacgccgggcggctgttttatccccattgggacgaagcctacgcccaaaagctgataacacagtttaagctggcccccaaaaagaggatcagcgccctgtccaagggcatggccagcatgctgaccatcgtgctggcgctggccagccgcgcccccatcacctttatggatgagccggtagccgggctggacgtggtagcgcgggaggatttttaccgcctgctgctggacgattacgccgagaccgggcgcacgttcgttatctccacccacattttggaggaagcctcgaacgtgtttgagaaggtgctcatcatgaaagaggggcgcttgatcgaggcctgcgatgccgacgaactgctggcgcagttctgcgccgtgaccgggcgggacgatgtggtgaacgaagcctgcgccgggctgaacatcctgcataccgaaacattggggcggcagaagtcctgcgtggtgcgggtgcctgccgagaccatggccgccaaggagctggatgtagattgcacgagcctgcccctgcaaaaggtgtttgtggcgctgtgcggccacgagcaagaactccaggaacatcgggagggctaagcgatgaaaggcactgttaaaacgctacgcttttttgcctggccgcttgcccagatgctgggcattgctaccctgttttactttggcaccctggtgttaggcgggctgacgaagatggtcatcttctccgattatgcaatttctttctgctttttgtatggcatttttctgtacatttcgttttggcagttttccgctgcctacagtcagctggcgctgagttttggcgccacgcggcaaagcatccgccgggccattttggtgctttgggtggtgggcagtctgtttgccgaggcttttaccgtgctggcggcccagctttcgctgtggatgccgatgaacgaaccagccggacgcaatgtatttttgctgcaatgcgggcttcacccagtgggcggcttttgcctgatgctgtttttggcggcgaccggctctgcggccggtacagccttgcccgccgcctggccgcggacgctgtgcctgaccgcaaagatccttttgtatattgtggcgtttgcccagatccttgtgtttatgctgctggcgtacttttgtccgcagtggtttgtgccctactgcgcggcgctggtcgtggctggctgcctgttgatggccgccgccctgcgggcactgcgccacatagcggtgcgctgatgtgaggtgtttgtgatgaaacgaatgatttccgcttgcctgcgctttgaagcgccggacctttggctggcggtgcccgccgcgctgttcccggtactgatggtcgaagtgaccgcactgatgatagccgccaccgaggatgaccccgaagcgctggtgttgctgcccggcgtgggtatgattttgaccgtggttctttgctgtgtgctgggggtcgtgtacctgtgcagcaactttcccctgctgctgcagttcagcgccagcaggcgtggatcgttggcggggctgtgcctgcatattctgcggatgaccgtactggccgaagtgatcgccgctgcagctactatagctctgggcgctgtgaaccatgggttcttcccacgatttgccgttggcgagttatggcggggcatcccggtttttgtgtggccggtctgcgccgtgctgccggtgctggtggggctcgtgtgggcaggcgtactcacccggtttggccgcaccggcggctgggtgctatactttttgtttattggcgggtgtttcagcacagacaaatggctgcacccgctggcagagcagccgtggatggtggtgtttcccgtgggcgtgctggcggcactggccgtgtgcggggcaaagtggttaatgaaagcggcggtgaaatagttaccctgcttatgtagggggtgatgcttgcaccagcctgcaggtcgctgcaagcatcgcccccctacaaataaagaaggctccctcgccgtgagggggccttttgtgtttgtgctgtttttttattcttctcccccattttcgatgagggcgtacaggcctgcttcatcgatgacggggataccgagggtctgggctttcgtcagtttagagccggcggcctcaccggcgaccacgtagctggtctttttgctgaccgagcctgcagccttgccaccgttttgggtgatgagggcttcggcctcctggcgggagagcgtgggcagcgtgccggttaccaccagcgttttaccggccagggcagtgcccttcttctcgccggtccactgcatgttgaccccggcagcggccaggcgagccagcaagtccttggtaccgtccttggcaaagaactccaccacgctctgggccatgacttctccgaagccgtcgatctcgcacatctgctccggcgtggcctcccgcagggcgtccatgctgccgaaatgctcacccagcagggcggcggccttgtcgccgatgttgcggatgccaaggccaaacagcaacttatccagattattgcgcttggaaccctcgatggcggtgaggaggttctgggcgctctttttcttgaatttatcgagggtcagcaggtcatcctcggtcagggtatacagatccgccaccgtgtgtaccagccccttgtcggacagctggatggccactgcctcgcccagaccatcgatggccatggcgttgcgggaggcaaagtggatgaggttgcgcaggctctgggccgggcactcggggttgacgcagcgcagggcggtctcgtcctgcaaatgcaccaccggtgcgccgcaggacgggcagaccgtgggcatctggaagggctgtgcgccgggcagatgggccgatacagcgatgacctcggggataatatcgcctgccttgcgtacctggacggtatcgccgatgccgacgcccaggttggcgatgatgtcgccgttgtgcaggctggcgcgggacacgctggtgcccgccaggaagattgggtcaaacacggcggtgggtgtcagcacaccggtgcggccgaccgtgacctcgatgtcgcgaacgacgctctccttgacctcgggcgggtacttaaacgcaatggcccagcgcgggaacttgttggtgctgcctaaggtgcggcgggcggccaggtcgttgaccttgatgaccgcgccgtcaatatcaaattccagcgtgccgcgggcttcgccgatggcctgaatctctttgatggcgtcctcgatgttttcaaacacgctgtagcgcggcgagaccggaaagcccagcgccttgatataatccagcgtttcgtggtgggtcacaaagctgcgtccctcgcactgctggaggttgaacacaaagatggacagcccacgggaggccgtgatggaggggtctttttggcgcagcgagccggcagcggcgttgcgcgggtttttaaagggcgttttgtcctccagctcctgctgctctttcagcttgaaaaaggcgctgtgaggcatgtagacctcgccgcgcacctccaaaaattcgggggcgtcgggcagttcgtgggggatgtctttgatggtggcgatgttctcggtgacgtcctcgcctaccacgccgtcgccgcgggtggagccgcgcaccagctgccccatgcggtattccaggctgaccgacaggccgtcgatcttagcctcgacgacatattccggcttaacgcccgcttcgcggacgcgggcatcgaactcccgcagctcgtcaaaggagaacgcatcctgtaaactctccatcttgaccgcgtgggtcactttgctgaatttgctgctggccgtgccgcccacatgctgggtaggcgaattggccgtgaccagttcggggtactccttttcgatggctttcagttcgcgcgtcatggcgtcgtactcgaagtcttccagttcgggggcgtcctgatcgtagtacagccggttatttttctctatgataacgcgcagttcttcggcgcgtttgcgtgcctgctccagttccattgtctgctccatttcgttttgctgaatatagggatagtataccacatttcgggcgcggactcaatcgaaattacttgcataggcgctgggcgtgtcgccgcagatgagcacactggccaggggcacggtgtcagtcacggtcagggtcgcggtgcggccgtccagcaccatattgacggtgacggtcagctccagcacggcggtgcagcgggtggtgttgatggaaagggactcagcggtttcccggacagccccctgcacatagccctggggctgcagggtgaactcccaccccgggcccaggccgctgagcaggctgttgttggtcaggctgccaaaagggatcagatagtcggttttcggcagggcggccagactttgctgcacggccgcggtcagctgcacttcagcggcgttggcgcgggcggtgtccagctggacaagctccccccgctggatgtagagggcttcgcacagcgtgggcattgtttgcagttgggcgctgacggcggattgcatcgcccgcacggtagcggcacgggcttcgtactcggccagctggtgcagggtcggtttgacagtggtgttgacatagcggctgaactgccctagggccagtgccgccagcaccagcgtggcagatacgtaaaatttgatgaatgtacggcgttttagcggctgttttctgcgtggcatcggccccacccccgtacccatactacgcgcggaaaaaactttttgatttttttgcaaaaatctgttgacaaacccaaccgcctttgctataataatcagcgtcgccaggaaatcatcctgcgctgaacagtctgggggattagctcagctgggagagcgcttgcatggcatgcaagaggtcaccggttcgatcccggtattctccaccacaaaaagccgcaacattggttgcggcttttttcttttatcttgcgtataacataaaggggaccggcgcgtttgcgtcggtccccttttactgtttataaagctttacaaattactccgcatcctcgcagaaagccttgaaggtcaggtaagccatgtagacgtcggccttggagacgacctcaaacggggcgtgcatcgagagcacgggcacgccgatgtcgatggtgtcgatgtcctggttggccacgtacttggcaacggtgccgccgccgcccaggtccagcttgcccatctcgccgatctgccaaacgacgttattcttctccagcaggcgggtcaggtagctgaccatctcggcacaggcatcgctggtgccggacttaccgcgggctccggtgtatttgtagatggccacgccgttgcctgcataggtggcgttgtccggctcaaaggcatcggcaaaggtcgggtcataggcagcggtaacgtcggcagacaggcacttgccagccttacaggcggtgatgtagtcagcaccctggccggcgcagagttgctggatgaagtggaaggtgtacatgctgttcaggccggtgacaccgtcggagccggtctcctctttatcggtcagcacgcagatggtggtgtaggccggagctgtgatgccgatctcggccatcagggccgggtaagcatccacgcggtcatcgtggccgtaggcaccgatcatagcgcggtccaggccgatgtcgcgggccttgtgggcaggcacgacctcgatctcggcgcgggtgaagtcgcgctcggtgatgccgtaagcctcgttgagcatgcccaggatgttcagcttgatgcgctgctcggcatccttatcggcgatgggctgagaggcaatcagcacgttcagctcctcggcggtaatgccttccgccagggtcttggtgttctgcttggcacccaggtgcggcagcaggtcggtgatgcagaaaacagggtcgctgtccttctcgccgatgcagatctcggcgcaggtgccgtcagtgcggtaaacaacgccgtgcagggccagggggatggtgggccactggtacttacggatgccgccgtagtaatgggtgcgcagatagccgataccggtcttttcaaacacgggcacggggcgcaggtccaggcgcggagagtcgatgtgggcgatgttcaggtggaagcccgcttccaggctcttggtgccgatggtggcggccaggatgcacttttcgcggttaatggtgtagaccttggtgccgggggccagcttctcgccggggacgaactttttgtagccggcgtccagcagcagcttctcgctggtgcggacagcctcgcgctcagtcttggcgttatccaggaaggtcttgtagccttcgcagaaatcctgggcggcctgcagggcgtccggggtagcgtcggctaccgtttcatttttgtaaagcagtgctttgagttcctcagtggtcttcatgggaaacttcctttcttatttttcgttatagatgtcctgatagcgttggtagctattggttatcttacgtacatatagccgcatctgcgggtaggggtaatggtccagtgtttcgccgtcggaggaatattctgcctgggacagcaggttatccacggtcccccatccgctgtggtaggccgcagcggcggtggccaggtcatcatggtagcgcagcaggcagtagctgacgaagtaagtaccgaaacggatgttggtttcggggtcgtagagatcgtcaaaggtcagatcctcgctgggggcaatcttcagcttgatccagtcgaaggtctcctcggtgatctgcatcaggccgcgggcgcccacgttggattgagcgtttggattaaagttgctctcggtacggatgaaggagtataagatcagcgggtcgatattgtacttgcctgcgtagtattccacatactcgttgtagcggcaggggtactccatcgtatcgacctggcggcggaaaacggtaaacaaaagggtcgcgaccagcgccaggaccaccagcaccgcaagcagggtgcgcaacaggccggggcggcgggactttgcttttttagccatgttcctcctttcacagctgctgtaaaacggcgtgcattttttctgccagctgttcggcggtgccatcgttgacgacctcatgggtagcagcggcgcgcagcgtttcgatgggcgtctgcgcgtccaagcggcggcgggccatttcgggcgtgatgccgtcacgggcacaaatgcgggccacgctggtatcgtagggggcgctgataagtaccagtgcgtcacagcgggcctcgaacggcgtgccgacgatgactgcaccgtccacaaaggccaattctgccccgctctgctcggcttcttgcaggcgcgtttcaatgcggtgcaaaatttccggctgggtgatggctgttaaggcccgggtgcccgccggggtggcaaaggcgcggtctgccagcagacggcggcggacattgccattttcgtcagcgatgtcggcaccgaatttttcttgcaattgggcaatgcagggcgaaccaggcagcagcatctcgcgggcgataaggtccgcgtcaatacaaggatacccctgccctgctaaaaattttgtcgcactggatttaccgcagccggagcggccggtgatgcctatgactttcatagttcgaccacccggaacgccgcagcgcggatgaggcggttgtagaccgccatggagacaccgtcctgctcagggcagcgggcgtagacgatctcggcaccatgcttgtccaagtcgcgcagggcggtgaacaggtggtgcgcctgggtgacgccatcgtgatttttgccgtactcgataaagggcacgggcagctgggcgccctcgccgtcaaaacagagcgcccacacgccgggggccgcgtgctgctcgacgtaggccttatacttggcgaaatcgccgcgcaaaatcgtgacctgcgccttgggggcgtagtgcttgtacttcatgccgggagagcgggccacttccccatccttgagcttttccagaatcgcggggctgacgaggacttcttcgcccaggacctcttccatctgctctttcgttacgtagccggggcgcagcagcatcgggtgttcgccggtaacagccacgaccgtggactcgacaccgacagcgctctcgccgccgtccaggatcagcggcaggcggccgtccatatccaccagggtatcctgggcgttggtggggctgggcttgccggagaggttggcagacggcgcagcaaacgccacaccgctggccttgatgacagcctgtaccaccgggtgggacggcatgcgcacgcccacggtatccagccctgcacaggtcacgtcgctgacctccccgccccggggcatgaccatcgtcagcgggccgggccaaaaggctttggccagcttgtaggcacggtcgggcacctcggacacgatgcccttgagcatctccatgccgtagatgtgcacgatcagggggttatcctgggggcggcccttggccccaaaaatctttttgactgcttcgccattgcgggcgtcggccgcgatgccgtagaccgtctcggtcggcagggcgaccagctcgcctttttgcagcagttctgccgccagtgcaatgcttttgtcattcaccggcaaaacctgtgtattcattatgcgtcacctttgtttgctttgagtttttcttcacggtcggccaaaatcagcgggtccagcacccggtccaggtcaccgtccagcacgctttgcaggttgcgcagcgttaagccgatgcggtggtcggtcacgcgatcctgcgggaagttgtaggtgcggatcttttcgctgcgatcaccgcttcccacctggctttgccgctgggcgttataggcttcatcgtaggcggcctgcttttgctgcagcaggcggctgcgcaggacttttaaagcgcggtctttgttttcccgctggctgcgctgatcctgacattctaccaccataccggtaggcaggtgggtcacgcggatggccgaggacgttttgttgatgtgctgaccacctgcgcccgaagaacggaaggtatcgatgcgcagatccttggggtccaattcaaactccacttcctcggcttcgggcatgacggccaccgtgacggtagaggtgtggatgcggccctgagtctcggtctccggcacgcgctggacgcggtggacgccgctttcaaacttcaggcggctgtagacatcggggccttctacagaaaagacgatttcctttacacctcccagctcggtggggttctcgctgatggtctcgcacttccagccgcgtttggcagcgtacatgttgtacatccgccacaggctgtgggcaaagagcgcggcttcttcgccgcccgcaccggcacgaatttccagaatgacgcttttttcgtcatcggcatccttggggatgagcagcaggcggagattctcttcgctctgtgccagattccgggcgatttcgcaaagttcctgctgtaccatagcggtaaacgccgggtcggagtcctgctgcaggacctctttggcctcctgctcatctttttgcagggccgtatagcggcggtattcttccatcaggggggtcagttccttgtagtcacgcatcatctgggcgtaggcgtctgcatcggcagcagcctccggcgtggacattttataggccagttcttcgtaccggcgctcgacctcgtgcagttcagaaaaaggctgcatggttcctcctttggggtatcgggttgtggcgggcaaaaatcaccgctactgttccccgccccgcaggacttttttgatgttgcgctcgatcttggcacgcggcagcatgatctcgtgcccgcagccctggcagcggatcttgaaatccatgccgacacgcagcacatcaaaacggttggcaccacaggggtgcggtttcttggtctggatcacatcgccgacctgtacatccatggcagcacaccgccctttctttgctaaaattcagtaccctttattatagtacatcacggtttgttttgcaaacccactgcataaaagtttacaagggtccccggccctgccgggggcatacaccatacaagaaaagaggagccgaaaatgctggaatatcgtgccgaaggtctttgccgcaacgccaaccatctgcgccgtgaggagctgtatcactgcatcaccaccggcgaagtattgcagagcaccgcccttgcctttgataccgagcgccgcctgcgctttgagctgggcggccagcgggcctacatgccctttgaggaatgtgtggatgtcggcccgcaggaggagatcaaggatattgccgtgctgacccgggtgggccgccccacctgctttgtcatcaccggcaccgaggtggacgagaatggcgaggaggtgtttctgctctcccgttcgctggcccagcggctgtgccgtcggcagtatctggataccttggaagccggcagtgtcattccctgcacggtgacgcacatcgagaattttggcgcgttctgcgatattggctgcggcattgcagcactgctgcccattgattgtttgtcggtgtcgcgcatttcctcgcctgccgaccgggtacaggtgggccagcaattgctgtgtgccatcaagaaccgggacccccagggacgcatcgtgctgacgctgcgggaactgctgggcacctggagcgagaacgccgcctgctttgcccccggcgagaccgtggtgggcattgtgcgcagtgtggaggattacggcgtgtttattgagatcgcgcccaacctggcggggctggccgaggccgaccacagtctgcatcccggccaggccgtgagtgtgtacattaaaaacatcctgccggacaagatgaagatcaagctggtggtggtgaacaaaaatctcgcccagccgcttcggtttgagccgcactactttgtcacccgcgggcgtatcaaaaagtggacctactccaccccgcagagccgcaagcagatcgagacggtgttttaagctttaaacaaatccgatttgctatcttgccacttctgtttttgccgtgtataatagtatggaaaacacaaaatacgaggaagtgatcagatggcagaagcatttaccgcaggtgtaaagcccggtggccttacagatgatacccagatccgcattttactttgctatcttatcaaaacagccggtcccctgacgcgggataccctgcagggtgcgcttttgcaggagcagctggtcaattactttgaatttgccgacgctttggccgaggtgcagaagcagggccttgtcacctgtacagacgagcagtacagcatcactggcaagggtgcttcggtggccagcacactggcccatgatttgccccgcactgtgcgggagagcgccatccgcgccgtaatgcagatccagagctggcggcacaaggcagcctccaaccgcgcccatgtggaagaaaaagacggcaagtatgtggtgtggtgcaatatcggcgacctgggcagcgatgtgtttcagctgcagctgaccatgcccgacaagctgaccgccgagatgacgaagaacatgtttattgcacacggcagcgatatttactcgaaactcatggatatgctgacccagccggggacggatgatgatcggccgccggaggcgctgttgtgatatggcgggccgatgcaagcatcggcccctgcagagcagctgcagcattacagggctgcggcataataagcagcatacaaaaacggcctgtccgcagggacaggtcgttttgttttgcttattcgcagccgaggtaggctttgcggacctcgatgttgttggcaagctcgtgggcttcgccttccatcttgatcttgccggtctccagcacgtaggcacggttggcgatctccagggccatcttggcgttctgctccaccagcagcacggtcacaccgttgcggttgacctggcggatgatcttgaagatctccttgaccagcagcggagacagacccatggacggctcgtccagcagcagcatcttgggcttgcacatcagggcacggcccatggccagcatctgctgctcgccgccggaaagtgtaccggcgggctggttgcggcgctctttcaagcgcggcaacagatcaaagaccatatcgtagtcgttctggatggcctctttgccgtcgcggcgggtataggcacccatctgcaggttctgcataacggtcagcccgctgaagacacggcggccttccggcacctgggccaggcccagacggatgatcttgtgggcttccatcttactgatgttctggccgcagtagtcgatctcgccgctctgcactttcagcaggccggagatggcgtgcatggtagtcgttttaccggcaccgttggcgccgatcaacgtgacgatctcgccctcattgacgtggaacgaaatgtcacgcagggcctggatggacccgtaaaaaacgttgatatttttaacagaaagcatctcacccatgatcagtcacctcccagataggccgcaatgaccttggggttattgcggatcgctttgccgtcgccgcgggcgatgacacggccgtagtccagcacggtgatctcctcgcagatgcccatgacaaagttcatatcgtgctcgatgagcaggatggcgatgccgaactggtcgcgcacactgcgcacggtctgcatcaactcgtcggtctcgttggggttcataccggcggcaggctcgtccagcagcagcagtttcgggttggtggccagggcacgggcgatctccagcttgcgctgttcgccgtagggcagctggctggccttgaggtctgccttatcttccagtccaaagatcttgagcagcttcttcgcctcacgattcatctcgtgctctttctctttgtaggcgggcaggcgcaggatgccggtccacatgccgtactggatctggttgtgcaggccgaccttgacattatccagcacgctcatctcgttgaacaggcggatattctggaaggtacgggccacaccggccttgctgatcagttcggggttcttgccggtgatgtccttgccgtcgaggacgatgttgccctcggtaggcttgtagacgccggtgagcatgttaaacacggtggtcttgccggcgccgttggggccgatcagaccatagaggtggcctttctcgatggaaaggtccagctgagcaacggcctgcaggccgccgaaagcaatacccaggttgcttacttccaacaatgccatgttaagccgcctccttcttgttcttcttgggtgccctgtcggccgcgtccttgcggaaacgggcagtcaggcgcttgcgcattgcgatcatctgcgggctctggttgaagatcatcacaacgatcagcacgatggcgtagatcagcatgcggtaatcgttcatgctgcgcagcaactcgggcaggacggtcagcacggtggcagcaatgaccgagccgcgcaggttgccgatgccgcccagaacaacgaacaccaggatcaggatggaggtgttgtagtcaaacttcttagcgaccagagaggagtagttcagcgagtaaagcacaccggccataccggcaaacacagcggaggtcacaaaagccatcagcttgtacttggtgatggggataccgaccgaacgagcggcgatctcgttatcacggatggaggtgatggcgcggcctgcgcgggagttgaccaggttgaggatgacagccagcgtgatgataaccagcacgatgccgatggtgaaggtggaagccttcttgattccggtgatgcccatggcgccattgatcagcactttgccgtcggcgtcgagattcagggaggcagtgtctttcagggagaagtgcaggcccttggaatccacgcccaggttgcaggcgttcatgaagttcttgacgatctcaccgaaagccagtgtgacgatggccagataatcgccggacagacgcagaacagggataccgaccaggaagccgaagataccagccacaacgccgcccaccacaaaggccagcagcagcgctgcaggcttggggaaggtggtgtcatacaggctgacccacaccagcgtaccggcaaaagcgcccacgctcataaacccggcgtggcccaggctcagctcgcccagcatgccaacggtcaggttcagggagacagccatgacaacgtatgcgcagataggcaccagctgacccgcgaaggagttggtgaccatgcctgcggcggacaagatctggatcagcagatagaagccgatgacgatgccaaaggtgatgatgttgctcttggtggagcggttcaaatttttcaagttcatcgcagccacctcacactttcacgttgactttcttgcccagcagaccggtcggtttgacgatcagcacgacgaccagcaccaggaagacgatggcgtcagacagctgggtagaaatgtaagctttgctgaggttctcgatgatgcccagcaggatgccgccgacgaatgcgccggggatcgagccgataccgccgaaaacagccgccacgaaagccttgataccaggcatagcgccggtggtgggctgcaacgtggggtaagaggaacagagcagcgcaccggcgatagccgccagtgcggagccgatagcgaaggtcagcgagatggtgccgttgacgttgacacccatcagctgggcagcgccgcggtcctcagacacagccagcatggcgtgaccggcgggcgtgtagttgacgaaccacatcagcaccaccatgatgaccacgcaggccacaatggtaacgatagtctcggcggagatggtcagctgaccgccaaagagagaaacaggcttcatgccggaaacgacagaagtaaagctcttggggttggaggaccaggacaactgggccacctgttgcaagagatagctgacaccgatggcggtgatcagaaccgccagggatggtgcctcacgcagggggcggtaggccagccgttcgatcaccacgcccaaaatcgtgcatacgatcatggacaggacgatggacagcaccgggttaagccccgaagcgccaaaggcgaagtaaacgacataactgccgatcatgatgacatcgccgtgggcgaagttcaacatcttggcaatgccgtagaccatggtgtagcccagggcaatcagtgcataaacactgcccaggctgataccgttgatcaggtaagaaaagaattgcattgcgtacacctcactctattttgccgctttgtcccctgccaacagagtttgccgcagctggccgtttggggaacataaaatcatagtaccacaaacaaaacggcaaaacaatggtttttgcgtgtatttgtgcgaaaaactgctgtttttttcagcaatacagaaaaaccataagaaaaaaggagctgcctggacatacttgtccggcagcccccattggcaacggaatctacctagagattacatggcagtgtaagcgccgtctttgatggcaacagccttaggagccttggaaacagcgccggaagcatcccaggtcatgccctcgccggtcaggccgtcgaaagtcatggagccgaactgggtcttcagagcctcgcagatgtcgctggcatccatgtcgccgttgatgttgccagccaggacagcctggtagatggcgtagacgacatcgtaagcatcagcagcgaactggttcggggtgtcgccgtaagtctcctcgtaagcggtaacgaaagcctgggtcttctcgtcctttgcgtcagcagcgaacggagtcaggagcatcaggccctcagccagagaggtgtcgaagccttcgatggccaggataccgtccatgccgtcgcagccgaagaaggtgggctcatagccggtcttgttggcgccgatcaggatctgggaagcctcctgatagtagatgggcaggaagaccagatcagcaccggcctcctggcacttggcaacctgggtggacaggtcagacttgttgtcagaggtgaaagcctcgtcagcaacgatctccaggcccttctcggcagcctcagcctggaacttgtcgtggacaccgcggctgtaagcgtcggaagaatcatagatgatgccgaccttggtacccagctggttgtctgcgatgtagtcagcagaagcaacgccctggttggggtcggtgaagcagatctggaagacattgtcgccagtggcgatgacgtcaacagcagaagcagacggggtcatcatgaagatattgtcgttggcagtctcagctgcaacggccagggacggggtggtggtaacaggaccagccaagacctgcaggccccagtccttcagggtgttataagcgttcacgctcttctcagcgtcatgctcgtcatcctcgaacttccactcaaagacatcgctgccgttggcggcgttgatctccttgacagccagctcttcagcgttcttaacagcctggccatacacagcggcagcgccggtgatggggccgatgccgccgatcttgatgggggtgccggtgtaagcgccggagccctcgcctgcctcagcagtagcggcagtggaagctgcatcagaggatgcagcggtgctctcagcagcagaagaagccgaggagccgcaggcagccaggctcagcaccatagaagctgccagaacagaactaacgagttttttcattgtgatttccctcccaagaaattttcgcagcaccggcatttcgccgccggggtcgcacaaccccggataggatgctggaatatactagccattatagacttttatcccctaaagtgcaatggcccgattttacagagttgacaatcaattttttaggttttatgtagtttttacacaaaattcagttacaaaaagttatcaaaacggcaataccgcaaaaagttcaagtatttttttgtaaagttcttgcaaactgcgccgaaatttgccataatgaaaagagtattacactttaccacaaaaacgaactgtgaaaggggcacattcgcagatgaaacttttggaagatcgcattttgcaggatgggcaggtccgtcccggcaacgtactgaaggtcgactgctttttgaaccaccagctggacgtggatctgctggacaagatcggtgaggagttctaccgcatttttaaaaatgacggcgtgaacaagatcctgaccatcgaggcttccggcattgccatcgcctgcatgaccgcccggtatttcaacgtgccggtcgtgttcgccaaaaaggccaagagcaagaacattgacggcgaggtctatacctccaaggtgcagtcctttacctatggccgcgagtatgacatcaccctggccaaaaagtttctgaactccggcgaccgtgtgctgattttggacgactttttggcaaacggcaaggccatgaagggcctgctggatgtctgcaaccaggcgggctgctcggtggccggtatcggcatctgcatcgagaagggcttccagccgggcggtgcggaactgcgcgctgctggttacaagctggccagccttgccatcgtcaacgagatgagtgatgaccatctgactttccgcgagcagtaaaaaacagattttcgcctgccagggccatacccggcaggcttttttgttgtaccgcagcggattttgtggtatacttgcctgtagccttattataaaggaaaggggggccttgttttggcggatcttgccaaagggcggcacacggcgacacggtttgctttgggggcggcgctgggcgtgctggtgtttctggccgtgtacggcgtttcgccgctggatgtggcgaacgatgccttttgccgcggcggctatattgaaaaggacatccaacagcactacgccgggtggctgttctaccgcgaaaacgcaattggttttcccttctgcgtgacgaaagcggtcaacgcacctgcgggcgtcagcgtggcgtataccgattccatcccactgctggcggcgctgctgcggccggtggccaatgcgctgggcggtacgttccagtattttggctggtttacccttacctcctttgcactgcagggcgggttcggtgcgctgctatgcgggctgttctgtgagagcgtgcctgcctgtgcggccgggagtttgctgttcagtgccagcccgattctgatcgagcgggcattccggcatacctcgctgggggcacaatggctggtgctggcggcgttgtactgctatttttgcgggcggcggcaggggcggtatcgtcttcccctgctgtttgccgtcaacgtgctggcggtgggcatccacccgtattttctgcccatgacttacgcggtcacgctggcgctgctgctggaatatgcggcgacgcacaaacgctgggccgggcctgcggtgtttttgggctgtgatttggcctgcacggcggtgctgggctgggcgctggggcttttgtatggcacggccaccagcggcgggcaggcgctgtacgggtatttctcgatgaatctgaacgcgctgtggaaccctgccggggtaaacggcgtgctctacagtcggtttttgcctgcgcagaaccaggtgggcggcaactatgatgcgttcgcctacctgggattgggcgtgctgattgccctgcccatcgccgtggttgcggcgcgaaaacgcctggctgcgctgctgcggcggcactgggcgctgtgcgcggtgtttgtggtgctgacggcgtttgcggtgagccatgtgattacggccaacggcgtgactctggtcacgctgccgctgccggcgtcgctgatcaagctgttctcggttttccgctccggcgggcggctgttctggccggtgtactacgtgctggtcctggcggcctttgccggactggcgaaactgccccgcgggaccgtgtgggtcatagcggcagtggtggtgcagctttgggacatcagcccggcacttatccagcggcatgaggctatggtgcaggcgcagcagagtgaggccttccctaccacactggaaagtaatttctggcaagcggcgagtggatacgagaagctttattcggtacaggggttgcaggacgatgcactgcacctggcactgtttgccgctgacaacggtatgaccaccaacaacccctttgccgcacggtacgatgatgccgctttggaaaaccagcgggccgccctgctggcggcgctggcggagggtcaggcagagccaaacgcgctgtatttgtttgaggacgagggcgactttttgcaggcagtggagccggtgcgaaacgccgcctggtgcggcaaggtgacgagccgggacggcagctgcaattggtatgtgattgcccccggcttgcaggggcagacgtttgatgcgctgtgtacgctctacgatgacagctatcccctgcggctggcggattataccgatgcgctgtggaaccgcggcgtgttggattctacccgcaagaccgtctgctttaaggattctccgtttacacggcggaaattggaaaatgcgcagtatctatgcgcggacggccaagcctaccgcattacggagcttgatgaccacgacgccggttggctgatggtcactttggatataaacgacgccacgattttgtgggatcaggagttgacgacccaatgaaagaattgcatgtaaaaagcctgctgcctgtgcggctggacaagtatctgatggaccagtaccccgccttaggcctgggtcggctgaacaaggccctgcgggagaataagatcaagctgaacggcaaaaagcagccgctttccacccgggtgcagaacggcgataccatccgcctgtttttgagtgacgaccagttggaaagccgccccacccccgccgccgtgtttgtgtatgaggatgacgacatcatcattgccaacaagcccgccggcctgacggtggacggcggcgacgccgacacgctggtaaaacgggtgcaagccaaactggccgccgagggcaagcccacccacgccgtgctgtgccaccggctggacaccggcaccagcggcctggtactgctggccaaaaataacgccgctgaggcatttttgaccgaggccatcaagaagcgggagatcgaaaagcggtatctctgcgtgacctttggccgccccaatccccccgccgctctgctgcgggattacctgctgaaggacgccgaacgcggcatcgtgcgcattaccgacacgacggcgggcggcgcgaaggaagtcatcaccggctacgagacactagccgtcagcggacggctggccctgctggaagtggaactggtcactggccgcacccaccagatccgtgcgcatttggcgcatatcggctgccccattttgggcgacagcaagtacggcaacaacgccgccaaccgcgaactgcggctgaagtaccaggcactgtgcgcatgggaattgaagttccccgccaaaatcagcgacgagcgttttgcccacctgaccgggcgggtattccatgccgagaaaccgtggtattgccagcaggttgaggatgggacgctgaaataaacacgttcattacagaacaaatccgtcatgcacacgcatggcggatttgtttttattccatcattttaatttgcgcgtccagactttcccatgtgtacagggtgttcaggacttgcagcagttcctttttgctcaggcgcggaggcagacccaagcgggccagcagggcgcggcggcggtcggcgctgttggccgtgccggagatgccccactcatatagatcggtgtaggcaatggcggtgcggtcggtatcctgcgctgtagtttggggcgcaggggcgctgtccagcgcagtctgcaggccttgcaaaatcaagtcatcagcgatgccctcgacgcccagcagcccctccttgccgggggcctgtttacgggcctccttgccgtggaccgctgggacgtaggcctgcaggacatgctcggccccgactaagccggtgacaaagtggcggatgcggaagcccgcatcgtcggaatcggtcaaaatgataagtccttgggcggcggcaatgcgcttgagcatgttttgcagctctttatcccggaagactcgggagccgtcggtcgtcaaaatcgtcgcatcgacgaggtttgtcagccgcgcggcgtcgtattttccctccaccaggacggcttgttccagtttcagcatcaggacctccctgccagtgccagttcgcacagcgctttctgcatcagcaggtcggcgtccaacttgctgctttttaaatcggtgtccagcttttgcagcacttccaggcatttttccaattggcggcgcttgaagcgggaggccgtgcgttcggtctcgcccaggcggtagctccacttgccaccgtagccaaaatccttggccacatcggccaggctgcggcggctgcgcttggcctgcaggacgcggtacatatcgatgtagttgccgatgagggcgccggtgatcatgattggctcgttttgcagggccagcagtgttttcagcttttgctgggcctggtcggtgcggccagcggctaccagcttgaccatatcaaaggtgtcagcatccagcgtgacagtgcccagctgagccaccatctcggcggtgatggtaccataaccggagagggccgccagcttgtcgatctcatttttcagcaaaaactggtcctcgccgcagcggtccagcagggcagcttccgcgcccttagcaaactgagcgccgcattcgtttgcccaactgcgtgccatctcctgcaaggcggcgcggccgggtttattgagctgcacgcagtagcccagcttctcacaggccgtgatcagtttttgctcccgcttgccggggcgcagcttgccgaacttttcctcgatgacgctggtcatgacgaagatggcgttttcggtgtcggccagcgtatcgcagaggtcctgcaggtccttgtccgagtaggtggacgggcggatgaggggcatcagcaccagccgccgcccaccgaagaaggagatggtgcccgctgccagcacgatctcctccacccggggcgcggggccgtccagcacggtggtctcggggtcatcctcgttcagcaccttcagcgccttttgggcggcggtgtggacgagggcctcgtcggcagcgtaaaagtagtacagcccgcagccggagcggagccgtttattcagttcgttttcactgtaaagcaacgcgttctgcctccttgatctggagcgagcggccgggccgcagttggataaagggaatgtcctgcccatagtatacctgctggacgcccggctggtcaagccagcggggcgaagatgcggtggtcaggatggcggcaggctgtaccgaatccgacagcgcccccgccgcgcagaggacgtccaccgccactggcgcagacagggcggtgctgcctgccatgacggcaatgtgactgcggccatcccctaccacggccagattgccgccggaggtgtggtagatgtccatcgtcaggccgtttaaaataggccgggtggtgtaggcgcccgtagtttgggcagtgcatattttctcggtgtcaaaggtgatttctgtgccgctgcggcgcagatccaccgtaagcacctgctcggcggcgccgtggtcagccaggtagctgcgcacggcgcgcaggttggcttccccgccacggaacagcaccaccgcctggccatcctgcacacagacgaccgccgggttgcctgcggtgcctacaagcgccatagtaacaacgcctttctgcatctgcacacccagcacaatggccactgccgcgcaaaccacccccgccggcaggaaccagcggaacctgcccgccgcataatataccagcgccagtatgcccagcaggaccagcaccagcagcgtgtactcccgcgggaggtacagccgggccaacggcaaggcagcgcaccaggaggccagcgcgtaaaaaatccgtagccagaccgccagcaggaaactagccatatgggccagcggagcctcaatggcaagcgggatggcgacaatttgcaaagccagcacgacaaggcccagtaccagcgcgggctggagcatccagaccgtgagcaggttggcaaggacgcccacgccgctggttgtcaggccctgggcgaccagcaccggcagggtcgccagcgatgccagcgccgccgtctgcacagtggaaagcacagtcagcccggcgcggcgcagttgggcctgccagccctcggcatcctggccggggatatgcgcttcttcccaacgggtaagcgccacggatgcctgcacgcccagcacggcgcagaaggaaagctgaaagccgatgtcgcagggcgcgtaatggttttgcaggcccagcaaaacggccgccgcacccgtgagggtgagcaggtcgatgggctggtagaaccagtctcccagcagcaccagcagaaagacgatgccagcccgcaaaaccgagatcggcaggccggtaagcagcatataaaacacggctaccgccgcccgcacaaggatcagcggccgataaaaccgacggcgacggccaaaagagaacagcccgcacagcagcgccagatgcaggcccgatacggccagcaggtgcgagatgcccgccgcgcggaaggtatcctgcacggtgtccggcagggtggtcttatcccctaacagcatggcagcttcgaggcctcctaaatcccgcggcagccaccggcgcagcaacgctgaggcatttttccgcagtcggtagagtgcaaagcgcggggcgcagctgtcggcacccgttttatagccgccggtgtactcgccttgcagcaggatgccgcggcttaatcgggatgcccggtaggcatctttgggcaggtcggtcatggtaaaatcggcggtgaaggtctcccctggctcctgggcggggaatccattgctgcgcattttaaaatggcagcttttgccgttgatgccggtgatcgttaatgtgccccgcagctggccgttctggtaggcggctgtggcatccgtttcaacagtaaccatacaggtcaccgtctggcctgccagcgcccgcacagggcggaacaccgcaaagctgaacgcgcaaaaccagcaaagccccgctacggcaccaagtaccagcggaagagctctgctgcggcgggctatacttaaaaataaaagcaatagcaaaagtgccgccgcaggcaccaggaccagcggcggcatgtttgccgcaaacagctcggcccctgcaaagcaaaggccaaaaatggcaagtttgcgtttcatcttacttaatgggcaaagagcggcagcggctcgaggaagaagatgtcggtgcgcttggcggcatccccctcggccagggcggcgcagcagccaacaacggtgccggtgctcttggcggccagggtctccagggcgtgcagagagccgccggtggagatgacgtcatccacgatcaggatgcgcttgccgttcatataatcgatgtccttcttgtcgatgacaagggtctgcttgccggcggtggtgatggactgatcctcgatgatgacaggctctttcatgtagagcttggcacccttgcgggcggggatccagtacttgccgctttggcgggccatctcgtaagccagggggatgcccttggcctcagcggtcaggatcacgtcaaactcgggggctttcttcagcagcgcggcggcgcaggcctcggtcagctccacatcactgaacatgatgaaggcggcaatgtccagatggtcattgaccttgcagatgggaagttcacgggtcagacccgcgatatgcaaagtataggtatcagccatgatagctacctcatttcgttttataaagtgatgctgcggctgacatcagcccggaggccatgccaggctgcggcctgccagcacatggaagtgaagatgcttgacgctctggccgccgtcggcgcccacgttggtgacaacgcggtaaccgttctcggccacgcccagctggcggcacaggtccgcaataacggcatagatgtggcccagcagggcggcatcgctctcggtcagggcggcagcagagtcaatgtgctgcttggggatgaccaggaagtgggtcggggcctgggggtcaatgtcgtagaaagccagcagctgatcgtcctcgtacagtttgtttgaggggatctgccctgcagcgatcttacagaacaggcaatcgtccatcggattttccctcctttattctggaatccgaaacagcttgcgctgtggatttactgcatttcagtcttgacgatctcgggcacggcgttcagggcgtcgtcgatcttggaggtatcgcggataccggccatggcgaaatcgggcttgccgccaccgttgccgcctgcgatggcagcgatcttcttgaccagagcgccagccttcaggccgcgggcctgggcgttcttggagacgccaacggccatcatagtcttgctgccgtcgctgccgatcagcacggtgacagcgttgggggccttatcgcggaccttatcgaccatgtcgcgcagggtgtcagcgccggtgccggtcaggtaggcggagacgatgcgcacgccgtcgatgtcggcagcattctcgaacaggccgtcgatcttggcggaggccatctcggctttcaggatgtccagctgcttgttggtctctttcagttcagcggtcagggcttcagcacgagccggggcatccttcaggttgttggccttcagggcaacagcggtcttggccagctgctcggtgcgctcatccagcaggttcagcacgccgtaggcagtggtggcctcgatacggcggatgccggcagccacgctggactcgctgaggatcttaaagcagccgatctgtgcggtattggtcacatgggtgccgccgcagaactcggtgctccagccgccagcatcgacgacacggacaacgctgccatacttctcgccgaacagagccatggcacccatcttcttggcttcctcgatgggcaggttctggatgatgacaggcagagcctcgaagatcttctcgttgacgcggtcctcgaccttgcgcagttcctcaggggtaacagcgctgaaatgggtgaagtcgaagtgggtcagcttatcatcctgatagctgccggcctgatggacatgctcaccaaggacctcgcgcagagccttctgcagcaggtgggtggcggtgtggttgcggcagatggccatacggcgctgggtatcaacagaagcggtgacttcatcgcccacatggatggtgccgtccagcagctcgcaggtatggacaaagtagcccttgggggtcttcttgacctgggtgactttcagcttggcgtcgccgttggtgatatagccgtggtcagcgacctggccgcccatctcggcgtagaacggggtgcggtccagcacgaccagcacgccgtccttgctctcgcctgcctcgtcggtggcgatggcatcggccaactcttcgccgtcagacagagcgatgaccttggcggattcgctcagggtgtcgtagccgtcaaactgggtagcctcggcggtcagctcaccgaacaggtcggcgctccagccggagatgtccttggccaggcgctcggcgcgagcgcgctcacgctgcttggtcatctcgacatggaaagctgcctcgtcgacagccagaccagcctcggcggcgatctcacgggtcaggtcgagggggaagccgaaagtgtcattcagcttaaagacttccgcgccggacaggaccttctcatggacttccttcaggtggctcatcatgccgttcaggatattcaggccagcatcgatggtgcggccgaagcgcagctcctcggtgccgatgaccttcttgatataggcttcgtgctcacgcagctcggggtagccggcctcgctggactcgatgacagtgtcgaccagctcggtcaggaacgggcggttgatgcccagcatgcgaccatggcgggcagcgcggcgcagcagacggcgcataacgtagccgcggccctcgttggagggcaggatgccgtcggatgccataaagacggtggcacggatatggtcggtgatgacgcggatggagatgtcgtccttttcattctcttcatacttcttgccggcgatgcgctccacatggtgcagcacggcggcaacggtgtcgacctcgaacaggttgttgacatcctgcataacgacggccagacgctccaggcccatgccggtatcgatgttgggcttggccagcagttcatagttgcccttgccgtcagcatcgtactggctgaagaccaggttccagatctccatgaagcggtcgcaatcacagccgacgccacaggtgggtttgccgcagccgtacttcaggccgcggtcatagtagatctcagagcaggggccgcagggaccagagccatgctcccagaagttatcctctttgcccaggcggaccatgtggtcctcggggatgccgacggacttggtccagatgtcgtaggcctcatcgtcgtcctgatagacggagatgtacagcttatcggcggggatctccagctctttggtcaggaattcccaggcccagggaatgacttccttcttaaagtaatcctggaagctgaagttacccagcatctcaaagaagcagccatggcgggcggtgatgccgacgcgctcaatatccggtgtacggatgcacttctggcaggtggtcacgcgatggcgcggcggctcttcctggccgaggaaccatttcttcatgggggccatgccgctgttgatcagcagcaggctgggatcgtctttcggcaccagcgggaagctgcccaggcgcagatggcctttggtctcaaaataatgcagatacttttcgcgcagttcgttaagtcctgtccattgcatgtgtgtgttctcctatccattgatttacggtgaaaggccacaaaaaagaatacagccttcgcccctgtacagggacgaaggctgtgtaagcttccgtggtaccacccggtttgcaatgtgccgcatggacacactgccactttacccgcgttaacgccgcagttacgctcggcttaaataccgaaagctccggggtggctttgccggggtacagccggatacctttcacctagtggtatcctctctacggactggcctgatcggcattggccctttcatcgccattttccttttaacaaagctattatatgcccctttttacggcttgtcaactggtttttccgggtgtttagcgcaatggggtcattcttattcaatcggatgttggctgttcaatcacttgcaagccttcggcaattttggcaaagagggcggcgctggaagtttcgggttccagtacgccgtcctgcaagaccgtgatggtatatttcggcgtttgcaccggggtgaagccgctgaaccagtaattgagcagctcgtcccctgctgcatcaaactggcctgtctgggcggtgccggtcttgcctgcggcggtgccgccggcgggtttggcagcgtggccgatgccatcctcgaccacgctttgcagcatgctgcgcaaggttttggcggtggcggcatcacagacgatgcggggcgcagggagttgaaatgggtcggtgagggtgccgtctgcatcggtgacgccgtagcagaagcgtggcgtgtggtaggtgccaccgccggcgatggtgttcatcatggcggtgatttgcaggggcgtggcggtgaagctgccctgcccgaagctgaacaccgccagctggccggtgctttgcagttctttagcggtgggcagcaccccggcgctggcggccaggtccggagctatgggcacagcggtgccaaagcctaattcggcagccgccgtgcccagggcctgcccgcccaagatctggcccagggcgacgaagtaggtgttgcagctttgctccagcgcaccgcgcaggttgaccgtgccgtgggctttgcccagggcgcagcggtaggtctggccgtccacctcgatgctgccggtgcaatcatgggtgaaccaatcgagcccattctcgtaggcggccagcgccgccgccaccttgaacacagaacccacgctgaaagtggagaacgcccggttgaccagtgaagtatcatcggcgcggatgctgcgggctacgtcgtcggggtcgtactccggcatgctgacgctggctaacacctcgccggtggcggtgtccatgacgaggatgcagccgcggggcatatacagctgggccaggccttcgcacaagcgctggatgtccgcgtcgagggtcagctgcacctgggcgtctgtgccctgctgctcaacttctatttccggcgtgccggtgcccagcagccgcccgcgggcggttgtccggcagacggcggcggtctggtcgcaggagtttgccagcacagcgtcccaggcgcgttccagcccggtgacgccgcggccttcctggtcgaggtagcccagcaggtgcacagcaatagggctgggcagcgtacgacggggctggtccagcagcagtacattggccggggcaccggtttggccaatttcgaccaaaaaggggctggtggaattgcggcgctcgtacagcagggtctgcgcctggtaggacacgtagggcagcagagcggagtagctgttgtcgccggggacgcagagggcgtagcgagtggtatcgatgcctgtgagcggacggtcggtgcgatccaggaagttgccgcgggcgcggggtaattctgtggtttgggtggtctgccgcccggcgctggccgcgtaggtggtatcggtgcctacccagtacacccgcgccagaatgaccgccgtcagcaccaccagcacacagcacaatcccgtaagccgccgcaatgacacaaaaccgccccctttccccggttagtatggccgggtggagggagcggcaaacaattattgttctgcttttctgcgctgcagcaaccagataataatgcaagtcaccgcgatgcagggcaggaagccgaaggcatcgatgcctacatcagtcagcagcatggcgcgggcggggacgaaatattggtgaatttcatccgacatggcgtacagcgtgcagagcgctgccgccagcaggccttgctgccatagggcgatgcgccgtgtccagaggtgcaccgtgaccgccatgctgacgcccagcgcgcagtagatatacacgtgcgcccatttgcggatgttggcgttgaagttctgcgcgctgaaccaagacggcgtgatggccgaaactttgctgtgctgcacagtatccgccactgccccgctgagctggtaggatgtctcccccggctgggacgagaagaagaagatcagcgccatgatactcagcgtaacggccaggaccagatatttggcgtgtttcttcatggcgctgtccccctttgcacaaaaatgtaagatttatttagtataacacagagcggggcaaaatacaaacacaagcccggcatccgtttgcggcggatgccgggcttattcgttatttatggggtctgtaccgcttagtacataccgcccatgtcggggttaggggcggcgggggccggcggctcgggcagatcggcgaccaggctctcggtggtcaggaccatggctgcaacgctggcagcattctccagagcggagcgggtgaccttggtcgggtcgacgatgccggcctcgatcatatcttcaacatactcttccttctgggcatcgaagccgtagttggccttgttagccttcaggatgttgtcgatgatgacgctgccttccaggccagcgttcttggcgatctggcgcagaggagcctccagagccttgcggacgatcttagcgccggtgcgctcgtcgccttccagctcgttaacgaccttgtcaacagcggggatagcgttgatggtagccgtgccgccgccagcaacgatgccctcttcaacagcagccttagtggcgttcagggcgtcctcgatgcggagcttcttgtccttcatctcaacttcggtagcagcaccgaccttgatgacggcaacaccgccagccatcttagccaggcgctcctgcagcttctcacggtcgaagtcagaggtagcggaaacgatctggctgcggatctgagccacgcggtcagcaatggcctgcttgtcaccggcaccgccaacgatggtggtgttctccttggtgaccttgacctggcgggccgtgcccagcagctgcatggttgcatccttcagctcatagcccagatcgctgctgatgacggtaccgccggtcaggatagcgatatcctgcagcatctccttacggcgatcgccgaagccgggagccttgacggcaacgacattcaggccgccgcgcagacggttgatgatcaggttggacagggcatcgccctctacatcttcagcaatgatcagcagcttacggccggactggatgacctgctccagcagaggaacgacgtcctggaagacgctgatcttcttgtcggtaatcaggacggagcaatcgtcgtagacggtctccatcttctcggtgtcggtgaccatgtagggggtcacgtagccgcggtcgaactgcatgccttcgacgacctcggtgtaggtctcggcagtggtcttgttctcctcgatggtgataacgccatcggcagtgaccttctccattgcgtcagcgatcagctggccgatctcagcgtcgccggcagagacagtgccaacacgggcgatgtccttgctgccgttgaccttctggctgtgctccttaacggaggcaacagcggcggcgacagccttctgcatgccgcgcttgatgtccatggggttggcaccggcggtaacgttcttcatgccctcggtgacaagagcctgggccagaacggtggcggtggtggtgccgtcaccagctgcatcgttggtcttggtggcgacttcgcgaacgagctgtgcgcccatgttctcgaactcatccttcagttcgatctccttggcgatggtaacgccatcgttggtgatgagcgggctgccgaacttcttgctcagcaccacgttgcggcccttggggcccagggtgaccttaacggtatcggccagctggtcgatgcctgcgcaaagtgccttacgggcgtcctcgccctgtttgatctgtttagccataaagaatcgctccttttatatcaaaatggaaaagtctgaaaattactcaaccacagcgaggatgtcgctctggcggacgatggtgcattcttcaccgtcgaccttgacctcagtgccggagtacttgctggtcaggaccttatcgccgaccttgacgatcatctcgacttccttgccgtcgacgttgccgccggggccgactgcgatgacctcagcaacctggggcttctctttggcggagccggacaggatcaagccgcccttggtggtctcttcttcttcaaccagtttgatgacaacacggtctgcaagaggtttgattttcatagtgaaatttcctcccaataaagatttctctttgaagattttagtttagcactcattctctctgagtgctaaatatataataaccacttcgcatacaaaaatcaagaggtttcactataaaatttttgtgaacaaaaaatacggtagggatgttttaccattcctaccgtaattgggcaacaccgcacaattctaagtgccgatacggcgagcgaggtatgccagctgctaagcaaaaagcgcaggtaatactttgtgtattaccgagcatttttgcaacacagatagcatgccgcagccgccggagcggtgctttggaattgtgtggtgttaccccttattgtttcattgcgatatttttgtaccgcgggcgcataatgccgtgctcgacatgcggctctcccccgttgacggtatcctcgtcgatggtcaccttggtgatggtggcatcagaggggatgtcgtacatgatagggataagcagatcttcgaccacgctgcgcagaccgcgcgcaccgctcttgcgctccaccgtcttgcgggcgatggcatgcagggctgcatcggtaaagaccagctcggcgttatccagatgcagcagctctttgtactggcgcaccaggctgtttttcggctcggtcagcacgcggaccagggcatcctcgtccagcgggtccagcacggtgacgaccggcagacggccgatcagctcggggatcaggccaaacttgaccaaatcgtcgggctcgaccttcttcagcagcttctggcgggtctcatctttatccaacgttgtacgcagctggctgccaaagcccagggaggcgttatcggtacgcttctggatgagcttctccagaccatcgaaggcgccaccgcaaatgaagaggatgttcttggtgttgatctggatgaactcctgctgcgggtgcttacggccgccgttgggcggcacgttgctgacagtcccctcaacgattttcagcaatgcctgctgaacgccctcgccgccgacatcgcgggtgatggaggggttctcacttttgcgggtgatcttgtcaatctcgtccacatagatgatgccgatttcggccttagggatgtcgaaatctgccgcctggatcagcttgagcaggatattctccacgtcctcgcccacgtagccagcctcagtcagggtggtggcgtcggcaatagcaaacggcacgttgagcatcttggccaaagtctgggccagcagggtcttgccggtaccggagggacccagcatcagcacgttagatttttgcagctccacgccggtctgctggccggagaggatgcgcttgtagtggttgtacacggagactgccagcacacgcttggcatcgtcctgcccgatgacgtactgatccagcccagccttgatctcggcgggagtaaggatattgacgcttgcgagcgggtcggtatcatagcgtgactgggctgcaccgggctgtgcctgctggcggcgggaggccccggcgcgcggaggcggcgggttctcgccatctttgtacagcatgttatggcacatgtcgatgcactcgttgcagatattgacgccggggccgatcagcagctgttcgacctcattttgggagcggccgcagaaactgcagcgcatctcgcgtccttttccgtccttgccggacgtttgatttgccatgttcttcccccgaatcagtgtttatagaggatctcgtcgatcaggccataggcctttgcctgctcgggcgtcatatagttatcacgctcggtgtccttctggatagtctccagcggctggccggtatactggctgagcagggtgttcatcttgttgcggatgtgcaccatgtggttggcgtggatctggatgtccgtggtctggccggagatgccctggccgccgatgagcggctggtggatcaggatctcggagttaggcagggcgaaacgcttgcccttggtgccgcttgccagcaggaaagcgcccatcgaggcagccatgcccacgcagatggtggagacatcgcacttgatatagttcatggtatcgtggattgccataccgtccgagatggagccgccggggctgttgatgtagaagtaaatgtccttctccgggtcctggccttccagatacagcagctgggcaacgatcacactggcagaggaggagttgacatcctcgctcagcacgataatacggtcattgagcagtcgcgaaaaaatatcgtagctgcgctcaccgcgagcagtttgttcgacaacatagggtacaaggctcatggggttttccctccttaacaggtaaaataggggttaccaaagaaccgatacggcggcagatgcgcaccgtatcggcccttttacatctttagttcagaaaacgcgggagatcactcgcccttgttttcctcttccttcggctcctcgtccttcttggcggcagccttcttggtggtcttgcgggtggtcttcttggcgggcttcttctcctcggcagcaccggcaacgatgttagccttggacttcacgaagtcgatagccttgttgacagccagatccttcttgacggcagcagcgtcgaccaggctcttgaccttgtcagcctccatctggtaagcatcggcaatgcgcttgatctcggcctcgaactcttcctcggtagcctcgatgctctccttggcaacgacagcctccatggcgagacgcatcttgacctgcttgtcggcctgctcacggaactgctccttgaactggtccatggtcatgcccatgtactgcaggtactgctcgagcttgaggccctgctgggagatgcggtactggaagtcctgaaccagctcctcgatgcgggagtcgatcatggcatcggggatgtcggccttcatgttgttgacgacctggtcgatcagatcgttctcgaccttctggtctgcctgcttctcgtggttagcctggatacccttgcggatagagtccttcaactcgtccagagtgtcgtactcgctgacgtccttggcgaaatcgtcatccagttcgggcagctccttgtactggacctcgtgcagcttgatcttgaaggtggcgtccttgccagccagctcctcagcctgatactcctcggggaacttgacgttgacgtcaaactcctcaccggccttgtggccaacgacctgctcctcgaagccggggatgaaggaaccgctgcccagcaccagagagtagtgctcagccttgccgccgtcgaaggcaacgccatcgacaaagccctcgaagtcgatatcaacggtgtcaccgttctcggcagcgccctcacgggtcagcagacggccgttgcggtcctgcatgcgcttgatctcagcgtcaacatcggcctcgtcaacagtcttgacatctttgttgacagttaaaccggcatactcgcccagctcaacctcaggcttgacggcaaccttgaccttcagggtagcgccctcatcctcagacatggaaacgacctcggcgtcgggacggccgacaacgtcgatgttggcttccttaacggcagcctcgtagttctcggggaacagatcgttgatggcgtcgtactggaacaggtccttgccgtacatcttctcgatcatagccttgggagccttgcccttgcggaagccggggatggcgtacttcttgccctcgcgcttgaaagcggcgttgacagcggatttgaaggtctccgcgtcaatagagaactgcagttcgaccatgctcttttcgagcttttcacaggaaatcagtttcatttataaattcctccaaaaataaatgtacataaaaatacaagttattatagcatgttcccgccaagaataccagccctgttttgaaaattttaacaaatcagagctcattttccgaagaaaatgacggttttgccgggtttcagccgattttataggggcagaacgccaaaccatccgccgaaatcaggcggtaggcgataccgtccaccgttccctgcacagcgtaacgaatcgattttccgtgcaggtgaccataataacattcagtcacaccgaactcctgcagcacctccaccagttccttcgcgctggcaccggggtaaaccggcgggtaatgcagaaaggcgattttgcggggtgtgtcccccgctgcctgcaggctcatccgcagacggccggcctcccgcgccatcagcttttccccttgggcagctgcatcgtcaaaaggccagccgcgggtgccgcagagggccgtatcgcctatgatgcaggcattgttatgcaggatatgcagcgtatcgaagccggaatccaccagaaatttgtccatcttgcgggtggtggtccaccagtagtcgtggttgcccttcagcagccatttctggcccggcaggttctggataaaggcaaagtcggctttggtatcgttcaggttcatggcccagctggtatcccccgccagcaccacggtatctccggggctgatgagtttgcgccagttggcttcgagtctgggcagatacccctcccagccgggaaagatatccatgggtttatctgcccctaaggagaggtgcaggtctccgatcacaaacagggccatacacgcccccctttcataaaattgcggtagctcagcgcagggctgcggcgcggatctctgcaggctcgatgacggtgttgaagcgtaccggcagtttatccagttcacgcaggctggccggggccgcggcgccggtcttggcggtcagcgcggccatagcggcaaagtcactttccggagcggtctcgcccagagcggacagtacatcacgcgggaacttgaacgggctggcggtggagagcaccaccatcggcgcgtcgctgcggttggcttcggccacatggaacgccacggcggtgtgggtgtcgcagaggtagccgtcgcgctcaaagcgtgcgcggatctcggcggcaccggcagcgtcatcggcgtaaccggcggcgaagctggcctgaattttcgccagcgtctcggcatccacggtgtacttgccggtggcggccagttcctgcatccagccctcgaccttttcggcactgccgctggtgtgcagcagcaggcgctcgaggttggaggagatcaggatatccatggacggcgaggtagtcttgtagaaggtgcggcgggcatcataggtgccggtcttgataaagtccgtcaggacgttattcttattggaggcacaaatcagcttacccacgggcagacccatctgtttggcgtagtaaccggccagaatgtcgccaaagttgccagtgggcacgcagaaatcaacaggcttgccccatgcgacagcgccctgctccgccaggcggaagtaggcgtagaagtagtagacgatctgcggcaccaggcggccccagttgatggagttggcgctggacaggcggatgtggcgggcttccagctcggcggcaacggactcatcggcaaagacgcgctttacgccggtctgagcgtcgtcgaagttaccctcaacggcgtagacctggacgttatcgcccttctgggtagccatctgcaaatgctggatctcgctggtgccggcgttgggataaaagacctcgatctcaatgccatccagatccgcataaccggccaaggcagccttgccggtatcgccggaagttgccaccaaaatgcgggtggtctcggtgcggcccaggttctttttggcttcgaccagcagtttgggcatcagctgcagagcgtaatccttgaacgcgcaggtggggccatgccacagttccagcgcgtagacgccgtcgctgaccttgacggtctcgcctgccttgccgccgaacgcctcaccgtaggtggcggcagtggcactgtgcaagaagtcggcgctgtaatcagtcaggaagcctttgagtacctgttcggctagggccgggtacggcagggacttccagttttccaaatctgctttggggaaggattccggcacaaacaggccgcttttgggtgccaaaccgcgcacgatcgcctcggacgaagaaacacggagtgcggaatctctggtactctgaaactgcatatcgaaaaccctcctattttttagacctttataaaacctctatattccagctttggggcattgccgccttagcattggaacgcatccgggatacaatggatctgccaggcatcgcctgcgggggtaacttccaccacgtcaaagcggatgctggcgtctgcataagggctgtgctgcaggtagtattgggccgccaaaatcaggcggcgctgtttgcgggcatccacggccgcggccggggcatccagcatgcggcccgcccgagtcttgacctcggcaaagacgagctggccgtctttatacaaaacaaggtccagttcccccatgcgggtgcggtagttgtggtttaacagcaggtaaccgcggcgcatgtagtacttggcggccagggcctcgcctttacggccgatgttctcagtcatgccagtaaccctgctttttcaaaaagctacggcggtaaaagggctgtatgccgtaccgggcgatcagctcataatgcagcttggtgggatagcctttgtgtttggccagctggtactgggggtactgcttgtccagttccagcatgtagcggtcacggctgaccttggccaagatggatgctgccgcgatggacgcactgttggcatcgcccttgacgacggattctgccgtctgggcaaggccgggcgggcagcggttgccatcgatgagcacatgatccggccggaggtccagccctgctacagcctgcgccatgccgtccatagtagcccagaggatattgcgctcgtcgatctcctgtggcgtgatgaagacgatcttataggcaagggcgcggcgggtgatctcgtcaaacaaagcctcgcggcgcttttcggtcagctttttggagtcgttgaccccctcgatggggttatccgggttcaggatgacggcggcacagcagaccggcccgcacaaggggccgcggcccgcttcgtctacgccgcagataacaccatgggcggcgcgcttttcggcgtcaaaggcgtaaagggaatcactggatggcttagtcttcgtcgtccgtgaagtccgggtcgtcttcggggaagtcgtcttcggcatagtcgtccacctcctctgcggtatcgcggtggggcgggcgctccagcgagagacggccccacttgctggcgcggaactcccccaccagcatcttggcggcgcgctcggtatccacctcgccgccggagatcagcatgccgcgcttagcgccgatggcctgcaaaagatcgtagggcggcagttccagtacgctctcgtccagcttgtagcgggccaacagctgctccgggtagatgccccgcacactggaaagcaagccgcaggccagctcctcgatgtcaaggatgtcgtcgcggatggagccgatgaaggcgaggttggaggctgtttccagcgagtcaaacttcttccacagcacaccgggcatgtccatcaggtcgaagttatcgacggagatccactgcttgccgcgggtgacaccgggcttgttggcagctttggcgcgggtggtgcctgcgaaggagttgatgaaagtggacttgcccacgttggggatgcccaccaccatcacgcggatggcggcgcccaccatgccgcggttgcggcggcgggccatcagggcggaaagttctttctcgatggggcctttggcggcggtggcgcggccccgctgcttggaatccatggccaggcagccagccccggcacttttaaaataggccagccactgcttggtgatttcggggtcagccaggtcgaccttattgaggatatacaggtggggcttgcccgccgtgatccgctcgatctctgggttcaggctggaaagcgggatacgcgcgtcgaggatctgcaaaacgcagtccacattgcggatctctttttccatcaggcgcagggtcttggtcatgtgaccagggaaccactggatctgacggctgttgatgatgtcactctggctcattgcacagctcctattttactgaaaggcaggatgcgccacagggccgtgcccaggatgtcccgcgtgtcgacgcagccaatatcggtgctgcggctgtctttggacccgttgcggttatcgcccatcaggaacaggcagttgtccggcacggtcagggggaagtccatcccctcatacgtatacgtaggctcggcggtgtagggctcgtccagggcttctccatcgcggtagacgataccggcggtgaagtcgatgtcgatggtatcccctgctttgccaatgacccgcttgaccagcggcttgccatacgggatgtagctgtccacgatgacgacatcgccataatccggggtcttcagcggcgtcatcagcaggcgctcgccatttaacagcgtgggctgcatcgagtgaccatccacctgcacgacccgcaggctgaaggtgaataccagcgcaatgaccgccacggccacggcgagggcatcgtaccattctaaaatgtctttgttgcgtttatagcggtctttaaagggcattgccatgggctgccaccctccttagatgcaaaaatacgaaaaaagggagaacgccaaccgtcctcccctttttttgcagtatgctcagatgcgtgccttgaccttggcggccttgccggtgcgctcgcgcaggtagaagagcttcgcacgacggaccttgccgcggcgaacgacctcgaccttctcaacgaacgggctgttgaccgggaacacacgctcaacgccgacaccgtaagaagtacggcggacggtgaaagtctcagcgatgccgccatgcttcttagcaataacggtaccctcgaaagcctggatacgctccttgtcgccttccttgatacggacggagacgcgaacggtgtcgccgacttcgaactggggcttgttctctttgatcataccctcggtaaaatgcttgattgcgtccatgttatgaattcctccatgtttttgcgacgttcatacacgaatgtttcgtcagaggaccgcctgtataatgatttgtcattatcccgccgatggctcggcggcactaacgctttagtattatagcatcttggcagtggtttggcaagtggttttacacaaattgccgggtaaaaatccggcaaaagtgcggaatcagcgccggttttttctgtgcaatatcacttactcaaaatccacgcctgatttgttataaagatgcgtgcgcaggacacggcactgccagatgggtgcgccgccgtgctgctgtaaaaagtccatcagcagcgagggattcaggttcagtgcttctccgctgccgcagggcagcttgaccgagaactcgatgttgtccccggcttcctcgcagtcgatatggctcagatactgcttgaggtccagcgttttctggccgcgcttggtctttttggtgacctctgcctgctcagcattgttgtaggcctcgatggcagccaggccgctttttggcattgtgacggcgtagacagccgtttcgatctcggcgaccttctccacagccggggccactttggtaatgacgatgccgcggggcatcaacggctgcaaagcgtttttccaaacctcaccgtcgatcatctcctgttcggtcttgacctcgcagctttcgcacagactctcctgtcctaaagatagcggacaggaaaaggacaggtagatgtgcgggttatagccttgggtgtaatacaccggcagatcgctcatttttaagatacggtggaacacccgttgcagatccagcagcgagatgtaggcggcctccccgcatttctcaaagaagattcttactgtagtcaaagcagggacctccgatcagtttattggcaccgcaggcactgcactggcggttgcagggctgggtcgtctgggcagccagcgccttattgtattcccgcaccaggtgggccttggtgacgcctacgtccaggtggtcccagggcgtgacctcgtccaggccgatggtgcggtagttgtagaagtccgggtcgatgccgcaggcagcaaaggcgttcatccagcggtcgtagtcgaaatattcctcccaggtatcgaagaaggcgccattctcaaaggcggtctcgatgaccttaccaaggcggcggtcgcccttggcgaagacgccctccagcacactggtggtagaatcgtggtagttgaccttgatcttgcgggaatgtacacagctaagcagatatttctgcttttcccgcagttcctcgcgtcggtcctgggcgcagaactggaacggggtgtccggcttgggcacgaagcaggccacactgatggtgacctggacgcccttgcctttcggacggtcggggatggtatagaacaggtcgaccacctgctgggcggtgtcagcgatgcctttgatgtcctccatcgtctcggtgggcaggcccatcatgaagtagagcttgactgaggtgtagccctcggagaaagcgatgcggcagccgcgctcgatctgctcccaggtgacgtttttgttgatgacatcccgcaggcgctgggtgccggcttcggccgcaaaggtcaggccgctcttgcgcaccttggtggttttctccaccagtgattgggagaagttgtccacgcgcagcgagggcagcgacaggctgacgtggtcggcctcagcccagctgttcagttcatccagaatgtcctccagccgggaatggtcggaggtggaaaggctcgaaaggctcagctcgtcatagccggtgttgcggcaaagctggcgggcgctctcgctgataagcttggggctgcgctcgcggaagggacggtacagctggcctgcctggcaaaaccggcagccgcgcacacagccgcgcagcacctcgacgcaggcgcgatcctgcacagcgccgaccagaggcaccacaaagtttttaggcggctcatagtcgtccatatttttgacgatggccttggtgacacgtgcaggcacgccggggcggttgggcttgacggcctcgatgcggccgtcctccttatacgttacatcgtagaaagacgggatgtagacgccggggatcttagccatttccagcagcagctgttctttcgtccacccctgttttttgccctgctccacggcggcacagatgtcctgcagcatctgctcaccctcacccagctgcatgacgtcgaagaaatccgccatcggctcagcgttgcagacgcaggggccgcccgcgataatgagcggccagctgccgtcacggtctgcagcgcgcagcgggatgtttgacaggcgcagcatggccaggatgttggtatagcaaagttcgtattccagcgagaagccgatgatgtcgaaatccgtcagcgggtctttactttccaggcagtagagtggaatgtccaggcgctccatctgctccttcatgtcggtccagggcatgaaggcacgctcgcaccaccagttttcgtggcggttgaggatgtcgtacaagatcttctcgcccaaaaaggacatgccgatctcgtaggtatccgggaagcagaacgccatgcggacatccactttgtctttatctttatacacgctgcccggctcgccgccggtatagcggcccggtttctgcaccaggctcagtgcttctttaaatttgggagaaaattccgccattatggtgaaccatccttatggggcttggcccctgttttacctgtattgtacccgatttgtgcccgcattgcaaggcgggcgcaaaaaaggcatgctgcattataaaacgcagcatgccttattctgcatgttaactctgaaaaatcagattagcccttgatggcagcagcgacttcagcagcgaagtcctcattgcgcttctccaagccctcacccttggtgaagtgagtgtaagaagcgatggtgatctcgccgcccagagccttagcggtatcagcaacgtacttcttgacgtcgatgccgccgtccttgatgaaagcctgatcgaccaagcagctctccttgtagaacttgcccagcttgccgatggccatcttctctttgatggcgtcgggcttgttggcggtcttgggatcgttagccatctgggccagaacgatctccttctccttagccagaacgtcggccggaacatcggactcgttcaggtagctggggttagcagcagcgatctgcatagcaatgtccttgccgaaagcagcgaactcgggcttagcagcaacctcgtcgctggtctcgaacttgacgatgacaccgtgggtgccgccgccatggacgtaagcagcgcaatgaccctcgtaacgggcaaagcggcgaaccttgatgttctccttgatgaccaggatcagagccttcagggcatcgtcaacggtgccctcgcccatcttgcaggccatcagggcctcaacgtcggcggggttctcgtcagcaacaaccttagccaggttcttggtgaactcaacaaacttatcgttcttggcaacgaagtcggtctcggcgttgacctcaacgacaacagcgcagttgtcgaaagaaacggcatagaccatgccctcagcggcgatacggccagccttcttgttggcagcagccaggccctgctcacgcaggatctcgattgccttctcgaagtcgccgtcagcctgggtcagagcctttttgcactccatcatgccgcagtcggtctgcttacgcagttccataacgtcttttgcagaaatagccataatctctcttgtcctttctgtcttatactaataggtgttccgggcacacggggatcaggcctcggtcttctcctcagcggcgggagcctcctggacgccctgcttgccttccagaacagcgctggccatggcaccggagatcagcttgacagcgcggatagcgtcgtcgttgccggggatcacgtaatcgatctcatcgggatcgcagttggtatcaacgatagcaacgatggggatgttcagcttgcgggcctcggagacagcgatgcgctccttgtgggggtcaacgatgaacatagccttcggcagggtcttcatgttcttgacgccgcccaggtacttgtccagcttctccatctcgagctcgagcttgacaacttccttcttgggcagcagatcgaaggtgccgtcggcctgcatggtcttcagctgctccatacgatcgatgcgcttacggatggtgcggaagttggtcatcatgccgcccagccaacgagcgttgacatagtgcatgccgcagcgggtagcctcgtcacggatggaatcctgagcctgcttcttggtgccgacgaacaggatctcgccgccctgagcagcggtgtcgcgcacgaagttgtaagcctcatccagcttcttaacggtcttctgcaggtcgatgatgtagatgccgttgcgctcggtgaagatgtacttagccatcttggggttccaacgacgggtctggtgaccgaagtggacacctgcttcgagaagctgtttcatagatacgactgccatagtaaaaaatcctccaataaatttagttttaccctccgcatggcgttttatgttttctaacgctttaacgaaaaaagcgcacaaaaaaacaacgcaatgcgtgtgtattgccgtagtataataccacaagcccgcgcaaattgcaagtgttttttgcaattttgtgcgggcttgtgcgaattatttgaattgggacgctcagatggagatggcgtttgcgatctcgatcatgtcgcggtcgatggtcttgtgcatcgagagggccacattgacatcgtagtcgacgatcttatcgccggagacggcgacaacgcggttgtagatgcccttatcgatcaggtcgatggcgtggtagcccatcagagaagcgttgacgcggtcacgcaccgtgggagaaccaccgcgctggatatggcccagaacggttgcgcgggagtcgacaccggtagcagcctggatctggttggccagctcctgggcaccgatgacgccctcggacacgatgatgatgaagtgcttcttgccggtgacctgggtctggcgcatgcgctgcaggatgtcacgctcgaagtcgaaggggatctccggcagcaggacagcgacagcgccggtagcgatgccgacattcagggcaatataaccggcgtggtggcccataacctcaacgacgctgcaacggtcgtggctctgggtggtgtcgcgcagtttatcgatagcctcgacagcagtgttcatggccgtgtcgtaaccgatggtgtattcactgcaggcaatgtcgttatcgatggtgccgggcaggccgatgcaggggatgccctggttggccagcgcacgggcacccatgaaggagccgtcgccgccaatgacgaccagtgcgtcgatgcccagttctttgcagcgggcaaggcccttggcctggccttcctgggtcttgaactccaggcagcgtgccgtatagaggatcgtgccgccgcggtggatgatctccgatacgctgcggacgttcatttcgtaaacttcgccattgatcaggccgttgtagccacgctggatacccatcatgcggtaacctttgctgatgccagcgcgaacgattgcgcgaacggcggcattcatgccgggggcgtcaccgccgctggtcagaacaccgatggttttaatttccttagccataaaacaagcccctcctattttgggcacattgcgccacattgccagaagctagaataaatttttaacaatctctgtgacgtattcattatagcacaactctagcgtctagattatggataattcttgcaaagtgcatggatttattttgcattttgttcagtcgtctgaacttttacatgatctttacccaaaatgcgttccaattcggcgcgcaacagcgggtcatccttgatggccatatggcgggccagcaccttttgaccggtgtccgcaaagcggaaatagaccttggtagtgccgccgtcaaagatgttgcacagcaggttttccaccttgtgcatctccggaccctggcggctgggcaccgtcaggaaatagccggcggtctctcccccgccggtctcgcggcggactttttccacccggtttttaccgaaagattggctcgggtcgtagtgctcgatgggctgcactccctcgacgattaggcgggcggcttcttcctcttttacagagacgcggccgttggccacgacgacggcgttttcctgcagggcagcgcggcactcggccagcacccgcggaaagatcagcagttccatcgtaccggtcagatcctcgacggtggtaaaggccatcagcgtgttagacttggtggtcatgatcttatttttgacgaccgtacaaagaatcgtgacgttctggttgtcaaaacgcttggcgtcctcgccctgcaggtcggcgatggtgcaggtggagatttggctgatctgggcgcggtaggcgtccagcgggtggccggacaggtagaggccagagacctctttttccattttgagcagatcgccggcgggatattccggcgtgttggggatcttgtaatcgctggcggcctgctcctgttccccgcccatcatgccgaaaaggtccatctggccttccaggttttggcgggcgtcggtctcgacgcttttcaggataccctcggcgctgtcgatcatagcacggcggctgggctccagcgcatcgaaggagcctgccttgatgaggttttccagcgcgcggcgattcagttcgttgccgtgcagccgcttgcagaaatcgtacaggctgcggtaggggcggtttttgcgctcctttaccaccgaatcgatcaggttgcggcccacgcttttgacggcgttgagaccgaagcggatgctgtcgctatcgacggtgaagccgccgcgggagacgttgatgtccggcggcaggaccttgatgcccaagcgctggcactcggaagtatattcgataactttcgacgtattatcgagtacactggtcagcagggcggccatgaactcgtgggggtaatggcacttgaggtaggctgtctggaaggccacgtaggcgtagcaggccgcgtgggacttgttgaaggcgtaggaggcaaaactgatcatatcatcgtagatctggtttgccactgcctccgggatgccgtttttgacgcagccagcgcactccttgcccggctcggtgcatccatggacaaaatgttcgcgctcggcttccatgaccttgagctttttcttgctcatagcgcggcgcacattgtcggcctggccgaagctgaagcctgccagctcacggcagatctgcatgacctgctcctgataaatgacgacaccgttggtcacatccacgatgtgggccatctgcggggtctggtaaacgaccttggacgggtcctttctgttgcgcaaatacgttgggatggaatccatcgggccggggcgatacagcgagatcagggcgatgacatcttccaggtttttcgggcgcatgctcatcagcacctgggtcatgccggtagattcaagctggaagatgcccatcgtctcgccgcgggtcagcatctcgtaggtggcggggtcgtcgtagtcaatgttggccacccggaaatccgggtccttggtgtggcgaacggccatctcggtatcgtggatgacggtgagggtgcgcaggcccagaaagtccatcttcagcaggcccaggcgctcgatctccaccatgttgaactgggtgaccggcaggccgtcgttggtggacaggggcacgtactcggtggccggttcacgggtaatgacgacgcctgcggcgtgggtggaggcatggcggggcatgccctcgacttttaacgaagtgtcgatgagttcatgcacctgattgtcgccgtcataaagggctttcaggtcggggctgacctccagcgcctttttcagcgtcatcttcagctccatggggatgagcttggccacgcggtccacatcctggtaggtcatgcccatcacgcggcccacatcgcgcacggcggcacgggcggccatcgtaccaaaggtgacgatctgggccacatggtcgcggccatacttttcgttgacgtagtcgatgacctcctggcggcgctcatagcagaagtcgacgtcgaagtcgggcattgaaacacgctccgggttcaggaagcgttcaaagatgaggttgtagcggatggggtcgatgtcggtaatgccgacgcagtaagccgccaggctgcccgcaccggaaccacggccggggccgacgggaatatctcggcttttggcgtagttgatgaagtcgtagacgatgaggtagtagttggtgtagcccatcgttttgacgacgttgatctcgtaagaaaggcgctctttcagcgcgtcggtgacttcgccggggtagcggcgctcgagtccctcccagcaaagcttctcgaagtattcctggttctccatgccatcgggggctttgaagtacggcagtttcgtctcgccgaaggtgaactcaaaattgcactgttccgcaattttgttggtgttttcgcaggcttccggcaccatcgcgaagaggtcgtacatctcgtcggtgcttttgaggtaaaactcatcggtctggaattccatgcggtcggcgtcggcgatggtcttaccggtctgaatgcagagcaggatgctttgcatcttggcgtcctctttggtaatgtagtgggcgtcgttggtagcgaccatggggatgccagtctcccgggccaatcggatgagctggggcaggacgacctggtcttcctccaggccgtgatcctgcagttcgatataatagttgccctcgccgaaaaggtcgcggtagtaaagcgcagcctgttttgcacgctcgtagtcccctgccaggatggcctgggggatctcgcccgccaggcaggcggacagacagatcaatccctcgtggtgctgttccagcaggtccttatcgatgcggggcttggagtaaaaaccctcagtaaagccggcggagaccatcttgataaggtttttgtagcccatctcgtttttgcacagcaggatcaggtggttgttgccgtcgatgcggttgaccttatcaaagcgggtacgggtggctacatagacctcacagccgatgataggcttgatgcctgcggccttggctgcatcaaaaaacgccacacagccgtacataacgccgtgatcggtgatggcgcaggccgtctgccccatggctttgaggtggtcaaacaggcggtcaatacggcaggcgccgtccagcagactgtactcggtatgcacatgcaggtgggtaaattgtctttgggtggtttcaggcatggtcaagtttccttagtgctttcggctcgtgtgggcttttcggattcagcggtttcgtccaggcggcgggcagcctcttggatgcgttttaagcggtgggacagccccgccttgctaacaggagggtcaaacttttgggccagcttagccagcggcaggtcggggtactgcatccgcagtttggcggtcaggcgcagattttccggcagggtgctcatggcaccggcggcctgcagcttttcaatggccagctgcacctgcacggcggcttggacacttttgcccaggttagcggtctcacagttggaaaggcggttggtcttattgcgcatatcgttgtacatgcgctggtccatgatacgcatggcggcgttgcccgcccccatgaaggtgagcagatcctcgatatggtcggccgatttgatatagaccgtgttggctcccttgcgcagggcgcgatgggggttgaagtcgtgctcggccagcatggcctccaactgttgggagagatagtgccgagtggagaggaactccagattgtagctcttctccgggtcggtcatcgtaccacagcaaagaaacgctgcagcgatgaaggattgcacgcagtgctggcacttgaagttctccggccggatgcgcagggtcggttccttgccggtgtggccgaaaagctccagcaggcgctcgacctccaccacatccttgacgctgaactcaaacaccgggccggtggggcgctccttgcgcagcacatccccccggatgccgcagcggcggtacagcttttgggcaaaggcagccacgccttcgttctcggtttgcagaacgatgccgcggtcatcgaagtatttaccaaaacaggccaccgcataggcggcggccacagagcagcatggtttggagatcctatggcgcaggatctcgttttttacatcttgtgagaagctcataaaactcccgataaagcgtaaattttattttttacagggtgcgcttggcgtcgcggtgctgtacgctgggctcgtagcccagtttttcacagaactcgccgatcttgcgtgcaaaggtgatggagcggtgcttgccgccggtgcagcccaccgcgatcatcagctggcttttgccctccttgacgtagagcggcagggcgtattccagcatgctctcatagcggcgcagcagctcctgagattcgggggcagccatgacgtagtccaccacttcctcatccagaccggtgagatttttcagctccggcacgtagaacgggttgggcaggcatcggacatccagcacaaggtctgcctcctggggcagtccgtacttgaaaccgaaggacaccaccgtgagggccatcgggctttcgccgtggtccagaaacaggctgcacacccgctccttgttctgggcggtgctcagcagcgaggtatcgatgacatactgcgcccgtgcccgcagcggctgcagcaggcggcgctcccgggcgatggcctcggtgatgggcagcttttcgctgatggtgatggggtgctggcggcgggtctccttatagcggcgctggatgaccgcgtcgttggcgtcgagaaagaggatctcatactcgaacttacgggcgtccaggtcggagagcgcctgttccagctgctcgctgctgcgcacgccgcgcacgtccatcacgacagccacgcggttcagctggttttcgccttgcagggcaaagtccacgatacggggcagcagtgccaccgggatgttatcgatgcagaaaaaaccaatatcttccagcgcgttgacggccattgatttgcccgcgccggacaggcccgttacgatcacaaatttcatgcgtactcccccctttattttactacgcgaatttcccgctccagcgtatagccggtcttttgcagcacgatggccttgacctgatcggtcaggctgacgacatcggcgcaggtcgcgccgccgcggttgatgacaaagccgcagtgcttctcgctgatctgggcaccgcccacggtaaagccccgcagaccgcaatcctcgatcagcttgcctgcaaaggcgccccgggggcgcttgaaggtgctgcccgcactgggccattccatcggctgcttgtctttgcggcgctgcagatagtcctgcatctccgccagaatggcggcgctgtcgccgggctgcaggcgcaccgtggccgaaagcacacaccaatcggggtgctgttcaaacaggctggtgcggtagcccagggccaattctgcggcaggcagcgtgcgctcggtaaggtcgctgtccaaaaaggtcacgttttccagcacgtccttcatctcgccgccataggcaccggcattcatatacacggccccgccgatagtgccggggatgccgcaggcaaaggcaaggcctgcaaggccctgctgctgggcagcggcgcaaagccgccccagcgtgaggccggcgctcgcggtaaggcgggtggagccgtcaggctgtggttccgctgtagggccgaagttcagcccgcgcagatcgatgactgcgccgtcgtagccctcatcggcaaacagcgtgttggagccgttgcccaaaaggtaggtgcgcacaccgtttgcccggcaaagcgccagcgtacggcgcagctgatctgcgtttttcggcgtacaccagaataccgccgggccgccgatttggaaagtggtatgggatgccaaaggctcctgctgggcaaacggcagggcgctttcctgcaaggcctgacgcaaggtttcgatcgtttgctgctgcatggttcctcccgctgaatacgaaaattaaaatcagatagagttttcaagggccgcggcaccgatgacgcccgcatcgttatgcagcgtgcaggcgacgatcttggggaagcggccggtggtgatgttcttggtctcgttctcggcataggcgcggacgggggccagcagggtctctccctggttggaaacaccgccgccgatgcagatgatctccggctcaaaggtgttgatgacgttggcgatgccgacaccgacatactcgatccagctgtccacaacgctcttggccacggcgtcgcccttggcagcggcgtcgaaggagagcttggcgttgacatgatcgaggtcgggggtcatcttccacatgatggtctctttatgggcctgcatggcgaccttggtctcgcgggtcagggcgctggcagaggcgtaacgctcccagcagcctttgcggccgcaggtgcactggatgccgtccttcacgatgacgttatggcccatctcacccgcagcaaagttgaagccgcgcaggatcttgccgcccaggatgatgccgctgccgatgccggtgcccagcgtgatgacgacggcatccttgtagcccttggcgccgcctgcgatgtactcgccgtaggcggcagcgttggcgtcgttctcgacatagaccttgcagcccagcatggcttccaggtcggggccgaggttccagtcatagtagccgaagttagtgttgaagcccacaaagccagtggtgaaattgacgctgccgggggtaccgatacccacgtattttacgtcggtgaaatcgaccttattctctttggcaacggtgcggcacaggtcagccaaggccttttccagttcctcggccgggcgcggcaaacgggtggcccaggtggttttgccgatgatcttatagttttcgtccaccagaccggcggtcatggtggtgccgcccaggtcgataccaattgtgtacttgctcatactagtattcctccaacttcttccgcacaggctttgccgtgcaattttaattctgctgtgagatttgcagtggtagcgtttatgatcagctcctcggggaagttcatctcctccagcatgccgtagagagccgtcaggccgtggcgcagctgccaggtgctgtgggcatcactgtccacggcaatatggcagccgttttgcaggcaggcggccagcagggctttcatgttggggatgccgtccttgcggacgttgaacgagttgccgttgagctccacgaccttgtggttggcggcgaacgccttggtcaccaggtcgtaatcatagcggtagttttcctgctcggaatggccgatgcagtccacgtaggggttctcggccacggccagccagatgcggttggcctccttgcgggtcagcagacccggcacgcaggggctgtggatggatgcgaccacccaatcctgatattccaggatgcgcggtggcaggtccagatggcctttggcgtccaccacgttggcctcggccccatagagcatgaccatgccgtcgatggtgcggggcaaggcaatggggttctcgaaatgccagcggtgcggcgcatcgggcatggcgggcgcgtggtcggtgatggcgagggccttgtagccgcagtctttggcggcagccgccatctcgtttagggtctggaatgcgtgggtagcgcacagtgtatgggtgtgcaggtctgcaatcatctgcatgaaatggtgttccttctttgctgttgacgcggttactggaggttggcgtcgtcgttcaggcccagctgcttcagcagttccttggcggcgttgtagcccatctccttctggcggttgttgatggccgcggtctcgatgatgacggccaggttacggcctggcatgacggggatcagcatcttgggcaccttgacgccgaggatgtcggtgtactcggtctccaggccggtgcggtcgtagtttttggtgcggtcccagggttcaagctggataaccatctcgacctcgacgctggaacgcaccgagccgatgccgaacacgcgggccacgttgacgataccgatgccgcgcaattcaataaaatggcggatgttttccggcgcggtgccgaggatctgcttgtaggagatgcggcgcagctcgacagcatcgtcggcgatgagacggtggccgcgcttgaccagctcgatggcggtctcgcttttgccgacgccggaatcgcccaaaataaggatgccttcgccgtagacttccaccagcacgccgtggcgggtgatgcggggagccagctctttattcaatgtggtgatgagcatgcccatcagggcggaggtcatctcggtagacataagcagtggcacgccgtactgcttggcgaactgcatcatctcagaaagcggctgcatgccgcgggtcaggatgacagcaggcggctggaaagagaacagcttttccagatgggtgttgcgcagcgaagtggacagttcttccagataggacatctcggtcaggccgatgatctggacgcgcttgttatcaaaattttcgtagtaaccggccagcaggatacccggacggtacacttcggtcgcggtgaccatgaccttttccagttcgcagggggtataggcgacggtcagattggcttcttccgccagttttgccagagaaacagagaactcagacatgcagggattcccctttccatacttcctttttgccgggcgcgtttgcggcagtccggcacacatacttactttgtattataccgtaccagccgatttttgtacagaggtttgtgccgagtactatgacaaaaaaatatccgctgttttgggcaaacagcggatagggatttttacgggaagagtttttgccgttcttcccgcaggcggcactggagccagagcagggcttcggacgcggcgtaggttgccagcaggtagacacagaacaaaatcgccgtatcgcggcgggaaagtgcggccagatcaaacccacgcaccaggcgctggatgatgacatgatgggtcaaaaacactgcataggagagcttggccgccttggcgcagaccgcacggggcagcggcttatccagcagcggggccgccacagccgctaggccgataaaaatcagcgcactgaacatggagcagagcaacttttcatccacgggcagatttatcagccccaagacaagcaccggtgccaggatggcctttatctgatctttcagcgtcaagaaggtcatgccaaagaggaattccgggatatgtacagctaccaggccgttatcccagccctgcatatggagggggatgcagacgaacaatgttacgaccccggtcagcaccggggccttgcgcagagcccgctgcaaaagcgggaacagcaggtacaaaaacaggatgctgccgaggaaccactcgcctacacaggcgaaatccatacccacccagccggcggccacggcgaagttatctaaccccaaaaaagtcagcaccagcgtaatggtcttagccccggtgtagcagccgggctggctgaggaagcggatggaaaagcagaccacccatgccagccagaacagtgggaacaccgccttggcccgcttcttgtaaaactgccacgggctttgttccggcgggacagtgagcgccagcgatgcgcccgacacgataaaaaacagcgacgagccgaaatcaccaaggtaaatgccctgcaccagcgtgctggtgaacagcttgtgcggcagggtgaaatacccggtaacggtggcgttgaagtggacaattaagatactggcgagcgccacggctcggatcaggtccagataaaacaggcgttgttttttgataaggctctccccctttttattttttgagtttgtgcttgactaaacggccaaactgcttcgccacggccttcggatcggcagcctgctggtaatgcagggccagctggtcagccgcagcggcgctttgcgcggcggtggtaaagctggcgctgaaaaaaccgttttgctgggctttcagcggcagcagccaggcatcctccggggcggtgatggcgggcagagtgtcgccgtccgccacagcggccagccgcaccagtgcccagccgcaggccggggccgggggcgggtcctggcccagcggcacgttgactttgccctgcagggccgggcgcgccgcctgccaatcggcatcgcggctttgccgggcggcgggccaaaggggcactgccgggcttagcacacccagcatcggctctttagcaaaaagggcggcggcctgagccagcgcttcatcggctcggcgggcagcttcgcgggtgtaccaggcggtaacggagtcagccttttcaacttccgaaatcggcaggtgcagcagggccaagccctgggcagccaactcgggcgcaggctcaacgggggcggcatcgggcaatacgtactgccagtgcaattcccgggccagcgcctccagcggctggcgctgtaaaagcgcggccagcagcaggtccacggggtagttggtctcctgttttacgtaatcgtacagggtgcgggcggcggtaccgtcggtgcggcgcagttcatccgcatagggggtaaaaaagctgcggcgcttgaaaaacgggcagccccggttttccagcagttcccgcgggcaggccatgatgggattgacgaaaacgtcctgcaaatctttcgtatccacgtaggaatcccagcggcagccgaggtttgcaaaatgcgcggtgaatcgtgtctcgtggttagcaatggattcctcatagcttttgggcagcggcattttctgccaatactgccagaaatcctcgctatgcaaaagcggtgcgcggacggccaaaaagtgggattgcagatgttccggcacttccccgctgcggccgccaaagcgtcggctcttcatggcgtagtggcgggtcaagccccaaaaggccagctccgggcgggcctccatggcagcgaacatcgaggccagcgagcagacggggcctgccagcgtgaagttcatcagcaccagttcgtcgtagcgggctaggcggccccggccgatgacagccagcgcttctttataggcacccacgtcaaggcccttattttcccgttcgcggcaggtcaatgtcaccgacgccgcccaggcacggtccgccgggcgcagcgtgccgttggagataaagaacacctcgccataatgggccatggcttccacggccacacggcaggcggtgtcgatctggcccagcgggtcataatggaaataaacgatcagccgtttcatggggcttaatcctcatacgggccgtggtgggggccgaagatggcacgcttggtgttgatgatgcccttgtaggcggactccggcaggttatcccgcagccagttgcgggcgtgacggcggcggctgttggcgtaggggccatagacgccaaacaaatgacgcttggccgcaaagccggcagccgcgctggaagccccccagaaggtggtacagtcaaacacgcgggccagcgggcggatcatgccagtggcataggcctgcatggtgtcattgcggatcacagcatagtcgcggctcatgacgacggccgggtaataaccggcagcctgggcaacaaacgggtagacacgctcaatggcatggctgatggtaccgtcctggggcagcggctcgggcgggaaatccgtatgctgccagccgtggtcgaacagcggggccagcgccttggggcggaaccagaacacactgccgtagggcgcaatgggcgattcctcgcccgcaatgggcacatccaacttgagtgtctctttcagcagctttttggtgttctcgaagttgggaccccagccgccggaacacatattcatgaagtagaggccatgggccgggaacggcgggcagaggatgccaaggtacgggtcattctcgaactcgcagagtatgttcagcacatgggcggcatttttgcagacgttctcgttgcagacatagccgaagctggcacctacgctgcctggcttggtctggatggcctttttatcgtgcatgaagcaggcgtaatcataaccgcgcagctgcggggccaggtcgcagaggaacgcacccacatcgcggccgcgattttccaccacctgcacggtgacgctgtgcagaggcagggcagcaaaggccttttcgatcctctcttttttgccgggttcgttggtggagatgaacacgtccgtctccggcgggaacttggcggcaaaggccatactctggtccagcatatccataaaataaaggtgcatggccagggcgatcctgcggttggcgcggatctcctcggcctgggccttgttctgcaccgtgggctggatgatgcgggtcaaaccgaggttacgggtaaactcgtgcgggtgcatggtgcggatcatgtttttccagatgaggtccagcggataatccgtttcatcccgcaggtaagcgtacaactcctgcaccggctcaccggccgtatcgttcaagtaggcttccagcgtgtgcataaagctgcggcgcttgaacagcgggcactttttctcccgcagcagcttggtcgggcagaccagcagcggatagtcagtgaaatctttcaggtcatcggtcttgacatagacatcccacttaaaaccgcgttcctcgaactgcttggtaaagacagcctcgtaccgctggacggaatcgttgtagtcggcgatcatgggcatgttgtcccagtactgctgcagttccgggctttttacaaaacgctggcggtaaacgatgaagtgggactggatatgcaccggcagatagctatagatgtgcttgcccttgaaaggattggacttggcgccgtggtggatggacaggccccagaagtcgagatcctgattctcggccatggcgtcaaacatctctttcagcgggcgcacggggcccatcagggtagagttggtcatgacgatctcgtcaaactccgacagcttatcccagccgtaggaatccagcgccgttttgtaggcccagacatccaggcccttgttctcgcgcacgatgatgttatccgtaaactgcgagaaggccgcgcggccctgggcgctgagtttgccgttgcagaccacgaccagattggtcaggttttttgcaagatctgcgaggtagtaggtaataaagtcatctacatcgccgtttttctcgtagaaaaagaaaatgcctaatcgtttcatagctgatcctttgcaagaatttgtttgattttggtcgcgtcgccccaggtgccggggctgtcatacgggcggtccgggaaggcaccgtagtccagcttgatcttgtagttcttatcccgcaggaattgctcgacccggtcggccaggctgcggggctcgccggtgcagacgttgatgatgccgttgatctcctcctgcacgctggcagcgacgatcatgttggcaagctcgtccacatcgatgaagtcatagaggtttttgccgctggtgaacgggaaggtctttttgccgtccagttcggcctgagccagtttggcaaagatggaactgccgtgggcttcgtcgccagtgatgtagtaggcgcgcagccagtgcagcttgcaggggctgccgtccagcgagagcatcaggctttggcgcagggcgtttttggcgatgccgtactggctttggggcttgcagggggtgctttcgttgatggcaccctcccagtagcccacttcgtgcatagtgcccatgacgcttaaatctttcaggccgcctgccaccaggtcgttcaggaatgtgacgtgggcggacaggtccttcatatgggccggagagttgtggcgaaaaccgtcccgccaggccagatggatgcagatgtccgggctgcccaccttgcggtagatttccttgtcaccgctgaagatgggcacatcgcaaaactccgcccgctcatccacgcctttaaaagagaagtcagacgcgatgaccttgcagccgcgatccagcgcatttttgacaacgtggcggccgatatatccggcggcgccggtaaccagaatcgttttcatggcagtttcctcctgcggtttttcgggcggttggcccacagttcatacaggcgttgcagccgcaggttgtacagcagcagtgcgccggtctgctttttatggtgcttggcttcgtgccaaagatccagcggcggggccgggtaacgggccagcacaccgcgtaaagtgcgccagccgtggcggcgcagcgtaccgggggctttggcatctgccagctggtgcatcaaaaaggtgatagcctgggcgcggcggtcgttccagacggccgcgcgggcagcttcggggcagcgggcctgaatggccttatactcggctgtcatccagcggtccagcacgccgatgcgcccctgcaaagcctgtacggtctggcactgggaggtgctttgcccactctcgaaatggcggtagacaggctgcggcaggtagtgtactttgtcggtgcgggcataaagtccggcgttgaagatgaaatcctcaaggccatagcggcaatgctcgtcaaagcgcagattgccgatggccgagcggcggtagagggcattccagacgaattgcgggccgctgctttgcaggaacttgcggtagtcgccgtcggcggccaggtcacaggccgtgccccccgggtggggctgcggggtctcggtgccgtcggggctgatgtggatcagctcgtaatcggcacggacgatgtcagcgccggtgtcctccgccttttgcagcagcagggccagcgcaccgggaagcagcagatcgtcgtcgtcgcagaaggtcacatacatgccctcagcgacggaaagcccccggttgcgggcggcgcagataccggcgtttttctgggtgatgacctggatgcggtcgtcccgcagggccagatcgtggcaaaggccgggggtggcatcggtggagccgtcatcgaccagcagcacctccagcccggcaatatcttgggtaaggatggactgcacggcagcccgcagggtggatgccgcattgtagatgggcacaatcacactgatacgcggcggcataacgtcctgcactcctttcaaaattcattttttcattttggcgtaaagccggtcatagggcaagggcagcggggccaggcgctttagaaagccgatcttccaccgggcagcggagaggtcctgcttggcctggtttgcgtgggtgagataataaccgaccttgcgcggcgtggccagcgggtagacgccgccgtcctcgacggtcaggtcgcccagcagggcggtctcccctgccgtaggctggccgaccagccgcagaaaaggcgagatggcagtctgcggcgggatagcgagggtttgcagaaacgacttttgccaatcctgcgcaaagcgcaggattcccttttgcagcgcgtccagcagcggcgttggcggctgggaggcctgctggacggtgatggttttatcggtttgggtgtaaccaagggtcgcgcccacatcctcggaaatcaggcgttccagcatgggctggcctgcccagtagagcagcggcgcgggtcggccgtcgaatagaaaaacggcggtctcatcttcgcgcaagcgcccgcgcagtcggtcgtcacaagagagctgacagccatgcaattttatattgcacacagcctgtaacagcacctgggttgtgccgccgctgccgatgtccacaaggatgtccccttcctgcaggttttgccgggtgaggtaggcggacactgcggcggcactttggggcgtggccagcgcttgcagcagcgggcgggcggtatcgggtccatgctttaaatcataggatttttcttgcaggtccatcgggcaggcggtaccgcaataggcggcgatctgcgcaccggtaagggattggcgcggcagagcggccagcagcagatcccaccggtgctgcgccaatagaagcgggcacaggctgcggcgggagacctgcaaataggcggtctgctcctgcgggtacaaaagctcgtagacctggcgcatcaggtacatatcccgcgccagaaagtagattttggcattggggtactgctgttcccaagcatgcagccattggcagtaggctacagccagcggaccgagagtggcaaagctaaggcgctcggcctcggattcgatgcccggcaagcggtttgcggtgaaagccgccaccgcaccggcaggcaggctttccctcgggacctcctgcgtgggaaggtgccagctgcggatgccggccagcgccgaaccggcaacatccgcccgccagttgtcgccaataaaaaggacctcttttgcctgcgtctgcgttttttgcagaaacaggcggaacagcttgccgctgcgcttctgcacgccgtaatcggccgagacgaagccgccatcgaaaaagtcgtagccgcacttggccagcatggcgtccagctggaccttgggcaggtacatgtcggaaatatagtaaagccgtttaccctgggcatgcagggcgcgggcggctttcagcaccggcaggttgggcacagcgcaggcgatctcagcggcgcattctgccgccgggtcgtatccggccaggcaggggcgggcataaatttccgccagagtcacttccccgcttttggcggcacgggcttcggcttcggcctggatgcgggctttggcgaagtccgcgcccaacagggcgaacaggtcggtggggcgggccacatcgcgcttaatgagcgtatcaaacacatcaaaggccaccaccgggtacagcgcagccttgtgcaggatcgtttcaatcagtttcatggcaggtagggtgttgcggggcggaaacgcacccccgcgaagaatcctttccaaataatgccgatgcgccaggctttgcagccttgggggctgcaaagcacctgcgcagtgtgccaggcgtctttggccagcagccacagccagccgcgcaggccctcgcgccggtacagtaccacgtcattacggtaaaaatagcggtagcgctcccaccgggcgggaacgtcggcggcaatgttcacgatgccggggttctgcatggcatgcacgacccggctggccgggaccacgtagcacggctgtgcccgggaaatacggcgggtgtactcccaatcgtcggaccagatgaagaactcggcgatgggcaggccgtaccggcgcacggtctcggtacgcagaaacagcgaaacaaaactggccatgaccgctgggatgcgctcgccgtcaaaaccgggcaggtctttgtagggtgtcacccgctgcaggttcatgggctggtcagtgccgtctggcgctaaagcacggctggaaagccagccgtattggccttgcaagttgcggtcggcctgtaaaaaggcttccagcgccgtgggggtgggcagggtgtcgtcgtccatgagccagagggcgtcgtacccggcaagggcagcctcccgcacgccgtaggcgaagccccctgccccacccaggtttttgccggtgttgcggtaaacaaggttgggcagggccatttcggccacagcttcggcggtgccgtcggtgctggcgttatcgaccagaaagatggtcaaatcctgcgcggtctgggcggcaagggccgccaggcattggcgcaatagcggcaggcggttgtaggtcaccaccaccgccgcaacagaaaatcgttcagtcatcttttttcggaaaaaatttacgttttaagaactgggtgcccttgtgcagccagttctggtgctccatatacacgatgtccagctcttcgtagctgatgttgttggtgatgagccaggcgtcaagcaaacgttcactgacgaagccgaagacgcggcggtcgttggtggagtagccggtcatgtccagctcccgctccagctcaaacaggatgtcgaacagccaggtgcagtaatgctgcagcagttcccgcttcatcacaaacatattaaagtggtggccgtgggtcttggacatatacatgtcgtaggccggcagatactccgggcatttgcgctcaatgatcgcccgggtgacggtcaagtcctgcttgtggtgggcgtggatgtactgggtgtagttcgtctcgatgaaatagtggcgttccttgggcagcaccacgttggtggtggccaggatggcgcacagttcctcgtggctgatgacccggcgctttttggcatcgaagatgctttttttgcggctggcaaaatagcggcggtaatgcacgataccgatataatcggaatcaatgttgtgcgccgcccagtacagaccggtcagctcacagaaattggcgttgcgctccgagatattctcgcccgtatcatcgccgatataaccgcaggccgggtggatggcatggcccatctgcaccggcagatacataggatcgtccggcacccagtaaggcttatgtgttgctacaatgatcgttgtctgcaaagtggtctccccgcttcgttgcaatacggccgggcgttcgtgcacgcggcctttccctatctctatactttcttttttaacttttctattatactaaaaacatagtatagcgcatttttggcggaatacaagttacagaacggttaagttttttgtataaggacgactgtacgccctgcgcgtgttatgcgtcctcggcctcgaaggcttcctgctcctcggcgagcttttcccactcgtcatatagttcctgctggtggaagcgggtgtcgtccagttcgtcgcacttatcccgcagcagcaggtggtcgcgcaggacctcggggtcgttgatctcgttttccagttccacgatgtgcgcgcccagttcctcgatctggttctccacggctttgatgcgggcgcggacctcggcccggcgcttgcgctgctctttgccgtaggcctgctttttgactgtgtcctcggctttctgctgttcctgggtcttgccgttatcgcggttttgcagggcagcaaagttcgggtagaaggttgccttgccgtcttcaaggtacaggatcggacagcccagggtctgcatcaggtagcggtcatgagtgaccagcagcagcgtgccggtgtaggccgccaacgcctgggtcaggctttcgcgcatataaatgtccaagtggttggtaggctcgtccaggaacatcaggttgggtcgctcgagggccagctcggcaaagcgcaggcgggccagttcgccgccggagagggcggcgcaatccttgaacacttcctcgccccggtagccgaagcgggccaggtggctgcggacttccagttcggtaaagcgggggtactggttccagatggcatcgatgaccctgccggcgcgcttggcctgctgctgggtgaagacaccaggcttggcgccgctgcctaggcgaaccataccgccggaggggcggcgcttgccgtccagcacttgcagcagtgtggacttgccggtgccgttggggccggcgatgaccagcttgtccccgcggtggaccgtgtaatccagcgcatcgatgagggtgcgttccccgatgcggacggtgaggtttttcatgataaccagctcgtcatagggctcgatgtcgtactcaaagcggaagttcagctcgtaggcttcggcggtcggtgcttccacgatctccagcttttccagctgcttgcggcggctctgggccatcttggtggtggaggcgcgcacaaggtttcggtcgacgtattcctgcagtttggcggccttttccacagcggcgtcatgcagtttttgctggcgctcgtcggcggcttcgcgctggggcagataggccgagtagttgccgcggtaggtcttgatggtcttgccgcgcagctcccagatgcgggtgcagacggcgtccaaaaaatagcggtcatggctgacgaccagcaccgcgccgcggtaggtcttgaggtagttttccagccattccatggtttccaggtccaggtggttggtaggctcgtccaggatcagcagatcaggacgctccagcagcagacgggccaggcgcagacgagtctgctcaccgccggaaaggacgcccgccagtttgacccaggtatccaccgggaaacccataccgttgagcacctttttgatctgggtgtccatattataagcgtccatggcatccacgatggcggtgcagtgggcgatttcctcggtcagggctgtgttatgcgggtccgcagccaggcggcgctgcaggtcgtccatcttctgcatggcgtccagagccggggcgaaggccagtttcatcgtggcgtaaatgtccagcgtgggggccaggcgggcattttgctccagatagccgcaggtcacgccggtgccaaaggcagcatcgcctgcatcgggcaggctctcgccgcacaggatgcgcagcagcgtggttttgccggtgccgtttgcgccaatgatgccgatgcggtcgccgcgctcgaccccggcgttgacgtccttcagaacttcatgttcgccaaagcttttgcccaggttttgcagttccaacagcatgggggtgtttcctctcctctattgtatcctcttttgcggtatgtcgcgttttttcacaacgatgccgctgcccttagggaaaggcagcggcatactgcataagccgccgggcagtttatgcttcattgctgtggcggcggttgcgcacgccgatgttttccagttcctccggctccatcacgatcttgtacagatcctcataggagccgatctcaaatttggggtggatgttcgacttgttttcctcgtttttcaggttgaaccagcaggtgtcgaggcctgcgttctggccgcccttgatgtcagccagcagatcgtcacccaccatcagcacacggctgcggttggtgatgcccaggtccttgaggacatgctcaaacagcttggccgaaggtttggccgcaccgactttctcggagatatagacaccgtccatgtagcgctcaatgccggaatcccggatgcgggcctcctgcaccatgaccgcgccattggagacgatggccagagtggcgacctcgctcagttcctccagtgcggtcagcgcaccggggagcaggtcggcatgggtggaaagcagttcctcgtagcggtcattcatctggacagccttgccgttatcgggcaggtccatcgctttcatgaagcgaccgaaccgctgctggaacagcttgggtttggtcagctggcctttggcgagcgcatcccacagctcgcggttgacggcgtggtagatctcacaagcgcgggcatcatggggcagctcgtactcggtcagcatatcggtcagggcctggcgctcagccgcgtcaaagtccagcaaagtgttgtcaacgtccagaaggacgcaagtgtaaatggccattttaaaatgaccctcctgtttctggtttattggccgtccggtttggagtcggggttcggggtcggcgtcggcgtcggtgtcggcgtgggggcggcgttgacgtgtagcgtaaagacggcatcggcgccattgttgacggcgtggatatggtaggtgccggcctcgttggcggtaaactccacctgattgccggtagctttccagctggtctcctcacagctccactgcacatcgccgttggcgttctgcacattggcggtaaaggtcaccttgttgcctaccgtggccgtgtcgggtccactgacggtgacggaggtcgggtcagcctgcacggtgactttgatctgcgcggtggagaaggtgccgttgatctcgatgcccgccttgatggtgtactcgcccgcattggagccggtgaaggtgaaggtgccgccgttctgttccagttcgtcgttgaccgaccactggacgttggagttactgtaatccttgccgcccagcttgaccgtggcggtgatggagatgctctcgcccttcttgatggtgctgtcgcccttgtccagcgtcagctcaacgcgggaatcattgaacatggccgtgaccgaaacatccttgttgataacgtcataacgggtggcatcggtgacgccgtcgctccacttgtagaaggtgtagccatcggcaggcacggcggtcacgctgacctgggtgccgctggcaacctcaagatccagactggaaacgccggtctggttattgccggtcagggtgcccttgccgttctcgacacggtagctggcggtcagtttattgggggtagcggtcggggccggggtggcgctgctgccgttgcctgctgccgaggccgcacgctgcgggatctctccgcggtcgccgcgggtatcctccacattgtgggcgtggttcttgatgtaatccagcacgacattgacgccggagccggagaatccgccggtggaggcatccacgtagctgtccacagcgtagcccttgtcgttcttcatgacttccggcaggttcaggtacttgaagcccatatcgttgcaggcgacagccagctgctggttgtactggtcaatgtaggtctgcttctgggcggcgtcggcggcgtccttggagacgggcgcaatggcgcaggctaccacgtcgcaggcggagtaggccgacttgatgctttgcaagatctgcttgtagtcgttgacgaactcgtccacgctgacagaaccgtccagatcatcgctgcccaccatgacgtagacgtgcaggggcttcatcttggcgatggcctgggggatggtgtagctgttggagtcgtcggcgaagttgacgcaggtctcacgcagcacctgggagactttcagtccatccttgccggcgtactggtttaaggtgatgctgctgtctttggacatggacaccgcctgggtgccgcccacaaagacggtatcgttgatgtagttgccctgggcactctcctgccccaggatggagccgaggctggtatccagcgggtactgggtgggatcatacagatcagactcgccaaacaggcccagctttgccggcagtatccacgataccaaaaagctaagcaccacggccagcacgcagaacgccatgaccacgcaggccttgcgctggatggggctgagaccggttttttcctcagatcgtttacggctcatcggttatggtgacctccttataaaacgcggcccggtttgcggcaggccgcccatttttaaatgtacaaaagcgcacagcaccagtattagatagtagcattatagcatacttttttgcgtttgagtatcccttttataaaattgttacactttgggcagcatcgcataactctaagtgccgatacggcgagcgagccataccaaccgtcaagcaaaaaacgcaggtaatactttgtgtattaccgagcccttttgcagcgcagatggtgtggcgcagccgatggagcggtgcttgggagttgtgcagtgttgccctgcacaaacaaaaaaccgcgtacctttcgatacgcggtttttggcaggggtagaaggattcgaaccctcggcacgcggttttggagaccgctgctctaccaactgagctatgcccctatgtaaaacgcccgcagtgcgaaatggcattgcgggcgttaagctggagctgctaagcagatttgaactgctgacctcatccttaccaaggatgcgctctaccaactgagctatagcagcaaatggcgacccgaatcaggctcgaactgacgacctctagcgtgacaggctagcgttctaaccaactgaactaccgggccatacccagcttgttgaaccccgtggcgcttgccgtggcggctgcaacgacaattattatagcgggcaaatgcccaaatgtcaacactttttttgaatttttttcggattttttcaagctttttattttttgccgtttctccgtttgtttttctgcgcagaattgcttttttttccctgccgtggtatgatattctcagcttttggggcggaaaaattgtttttcctgccctaaaaaaattctgtgcaatccatttttgtgccgccaaaacatcatagccgcggccaacagcaggatgatgccgctctcgggcccatactgcacccaggcgatgggcactgccagcgtggggatgagcaccgcccccagcggcaggtagcccagtcccagcacagccagaccccctgccaggcagcacaatgccccggtgacgggcaggtataagatcagccaggtacaggtaacggctacgcccttgccgccccatcccttatgccacaggctgcagttgtggcctgagatggctcccgccccggcgtacagcagcgctgtatgccccagcacagggcctgccagcagccagcacagcccgcaggccagcacggttttggctacgtcgccagccaatacggcaaagccggggcctttgcccaaggtcgccatgatgttggccatgccggggttgccgctgcccagatcacgggcgctgcggcccgttaggcggcgggcgatacattctgccgtgaggaagctgcccagcaggtaacccaccagcaggcagaggatgcgcagtgtgatttccatggtattttatccccttttctttatacataagtatgggcagctttgggggcgtgccatacagattgaggtgtttttatggatctgcaaactttgcagcaggaatgtctcgcctgccagcgctgcggcctgtgccagacgcgcaccaacgtggtgttcggccagggcgtgcccaatgccgaggtgctgtttgtaggcgaaggtcccggcgccagcgaggacgagcagggcctgccctttgtgggccgcagcggccagctgctggaccattatcttgaggccattgatttaagccgtgagaagaacgtgtacattgccaacattgtaaagtgccgcccgccgcaaaaccgcgacccgctgccggaggagtccaaggcgtgcatcccctggctgcgccagcagttccagatcttgcagccgcgcatcgtggtctgtctggggcgcatcgccgcacagcagatgatcgggccggagtttttgatcacccgggaacacggtaagttttttgacaagcagggcaccttatttatgggcacctaccaccccgccgccctgctgcgctaccccgtaaacaagcccgcggtgtttggcgatttcgtagccctgcgggagaaaatcacccaggtgtgtgaccacacctactaacttataaaggagatgccacccatgccggagacagaacccctagcgcttaccctgcccatccggcggctggtggagtttcttttgcgcagcggcagcatcgacagccgctttaccggctttgaccgcgccaatgagggcgcacgcctgcaccgcaaattgcagcgcgccgccgtaaaggaatacccggattacgaggccgaagcggccctgcggcaggagtttggctgcgagggcatcacctacactttagagggccgcgccgacggcctgtttaccgaccgcgacggcatgcggaccatcgacgagatcaagaccaccaccctgccgccggagttcatcaccggcgagcagagtcccgagcactgggcccaggcacagtgctatgcggccatatacgccctgcaaaacgatctgcctgccatgcgggtgcggctgacctactatcaggtggacgaggagttggagttcaactttacccacgattatactgccgaagccttgcaggacatcgtgcaggggctgctgacccagtacgccccctgggcgcggcgggcagcagcctggcagcgggacagacgcgccagtttgcaggcgctgacatttccctttgcgggctaccggcctggccagcgggcgatgatcggggccgtatacaagacctgccgcgagggcgggcagctgctgtgccaggcccccaccggcattggcaagacaatgagcgtgctgtttcctgccctgaaagcgctggaagacggcgggccggtgttttacctgacggcccgcggcaccacccgcgctgccgccgaaaacgctgtggctgtgctgcatgaccacgataccagcttaaagctgcgcagcgtgacgctgaccgcgaaagataagatctgtttgcaggaccgccgcgagtgtacgcccgaagcctgcccctacgccaacggctacttcgaccgggtgaaaacggcgctgtgggatggactggacacgcccactctgaccgccgacgccctgcgggaactggcacgcaggcatagggtgtgcccctttgagctgggactggatttgagtttgtggtgcgatgtggtcatcggcgattacaactacctgtttgacccggtggtgcatctggcgcgcttttttgagagccggggcgactacctgtttttggtggacgaggcccacaacctgcccggccgtgcccgggacatgcacagtgccagcctttgcaaaagcgccttttttgacgcccgcaagcggctgggcaagggcaaaagcagcctgaaaaatgcgctgaccaagatcaacaatctgtttatcgagtggcggcatcgctgtgaggaagccgagggccgcactttttttgcgcgggaacgcgccgatgcttttgaccgctccttacagaaactttgtgagcccttggaaatttggctggacgaacaccgcgaccccgacgaaacccacgaagccctgctgcagttattttttgatgtgcgcggctggctgcgggtggccgatacctttgacgagcattttgttttacaggtatctgcctacggcagcgaagtgcgtgtgagcatgctttgcctggacccgcataaatttttgcaggcggattttgccaagggccgcgcggcggtgctgttcagcgccacgttaagccctgccgggtactacaaggacctgtgtggtgtgccggaggcgcgggccgtggccctgcgcagcccctttcctgcggaaaatttagggctgtggtgtgcgcggaacatcagcacccggtacaaggaccgggcggacagcgtgaaaaagatcgccgcgctgctgtacgagatggtgtgtgcccgagccgggaattacctggcgttcttccccagttacagctatctggagcaggtgcgggaggtgttctgcactgctcacccggaggtggagaccctgcggcaggataccgccatggatgaagccagccgcgcggactttttagcgcaatttaccgccgcacccgggcgtaccctgctgggctttgcagtgctgggcggcctgtttggtgagggcgtagacctggccggagagcggctgatcggcgcagccatcgtaagccccggtctgccccaggtcggtccccggcaggagcagctgcgcgcccactttgaggagacgcgcggctccgggtttgactatgcctaccgcttccccggcatgaacaaggtcttgcaggccgccggacgggtcatccgcacgccggaggataagggtgtggtgctgctgatcgacgaccgctttttagcgcctgatacccggcgtttgatgccgccccattgggatgggttaagggccgtgggcagtgccgaggaattgcgggcggagttggaatggttttggaataacaaataaaatagcagaaaagcaccgcagacggagcgcttccgtaggcggtgcctttttatgggtacacggtttggtgtaggggcggatgacaagcatcgacccctacatacagggccgccctttttattccggcttgcgcatgcgcagcaggctgtagggcatcagcggggtggcgcaggggatggtatactgcatcatcgggtgcggggtggcgtcgacgctctcgccctcggcgttcttgatccactccggggtcagggtgacgacactgccgtcaggctccaacacctcgatggaatcccccaggttgaacttgccgcgctgggtgcagtgggctacgcccttgtcccagccgtccaccgtgccgatgaagtcccagtcccgcacataggtgtggctgggggtctgctgggcctgctccttgccgaagtagaagcccggcgaatagtggcggtggctggtacggttcagctcctcgatgacatcatcgggcagctcaaagttatcattgtaggggtcgcgcaggtaggcatccagtgcgcggcggtaggcgctggtgacagacgcaacatagtaaaacgtcttggcgcgtccctcgatcttcaggctgtccacgcctgccttgcagatcaggtcgatgaacggcgcggtgcaaaggtcgttagcgttcaggatatagctgccgttgtcctcgctctcgccgatctccatatactggccggggcggtgctcctcgaccaggttatatttccagcggcagggctgggcgcactcgccccggttgccgctgcggcctgccatatagctggacagcaggcaccggccggagacgctcatgcacatggcgccgtggacgaaagcttccagttccaggtcagcagggcagttatcgcggatgagggcgatctcggtcaggggcagttcacgggccagcaccacgcgcttggcgcccagttcgtagcataccttggcggcctcgtagttggtgatgcccgcttgggtggagacatggcgctccacctggggggcgtattttttggccagcgccagcacacccaggtcggcaatgataaaggcatcgacgccggcctcggcggcattctggatatactggggcagcttgttcagctcctcgttggtgggcagggtgttcagcgtcagatagacctttttgccgcgggcgtgggcgaagatgcagccctcgtgcagctcgcccaccgtcaggttgaccggggcggcccgcatgccgaattccggcagagcgcagtagacagcgtccgcgccgtacatgacggcgtatttcaaagtttccaggctgccggcgggggccagcagttcaggctgttgcagcatgggtattcctccgtttacaaactggatcaggcccaaccggccttaacgcagttctggtagtgctcgtcggccgtcttggcgtagaagtactggccggcaacatcagtgccggggtggccggtgacgaagaagtagtagccctcgtcgatatactcctggtcaggattcagcgcagcctcgatggcggcgtaaccggggttggagatggggccggcaggcaggccgctgatggaataggtgtcgtacagggccagcacatcgtcggggatggcgccctgatccggccagccgtagtactgggccgtgggagagttccaaaggtagttgttctcgctgtcccgcatgatatagctgcaggcgttggattccagcttatgctcggcccactgcgggtcgtcggactcaagacggttgtggaagcaggcgctgaccttggcatcctcactctcgagaccggcctcctcctgaatgaagctggccaacttgaccgcgtcgtcgagcgtggtgcccctggcggcgatggtatcggccagggcggcggtcttgctggcgaactcgctgtacatggtatcgacgtagtagtagacgtcttcgtccgtgtagacgttgtaagtttcggggtagagataaccttcgcacttcatcaggcggccgttatcggggatctggttccagaaatcatactggctgaaatcggagccgtcggtgccgttggcgcagttgaggaaggtgtccacatcgtccaccagcccggcatccacaaagatctgggccacgccgacagcggtagtaccctcggggatggtgatgttggtggtggcgcggcgcacgacctcggagagagtcttgataatgtcgttgtagctcatgccagagcgcagcgtaaagtcgccatactggatgccgtcggccttgccgctgtatttggcgtattgtttaaagagccagtcatactggatgatgcccgcatccttcagctgggtggcaatgctgctgacggaagagccctgttcgatggagacggtctgctcggcacccaggtcggtgccgccgtcgatctcgctgtagaactgcatgcctttataggcaccaaagcccaccagcgccaggatgatgataacgatcaggcagcccacggggaaatggcggcgatgttcctcttcttcctcgtcgtcatcttcctcatattctggctcgggtttcggcttgcggcggggcttgggggccggggccggagtaggctgggtcttgggctgcggcgcgggggcgttctgcggggtctccccgctggtacggctgattttcataagctttctcttttctgttttgtaatcctgttataggcggtcagcgtttatctgccgttacagcagcatgcggaaatacacatcggtcaccgggaattctccgtgcaaaaaggcgatcatgccatacccgcagcgccgcccggcccccaggtagagcgtctggttttcggccagcagcacgcgggcgttttcggcgccggtcttttcccgggcagcctgcagcagctggtcagcgcagtggtcgttatcggcctgcaattcaataaactgcaaagtatcgcctttggtgtaatagagcccgtagccgcgccggtcggacacaacggtcaggccgcgtcggtacagctgagtcatcatctcgttcatggcagtctccggcagagtgatgcagccgggctggcagcgcaggcggcgctccatcaggtggcgtacggtcaggctgtcgaactgagcctgggccagcaggttgcggcggatgggtttgctcaccacccgcagcggcagcaggtttttaaagccgaggtccgccaggtgggaggcatcggcggcggtgtccggcgtcatcacggcgaaatcgcagccgttctcggcaaaggcgcgcagggcgccctccaacagtttgggcagcagtttgtccgccgggacgcctttgtccgccgccaggccggtgaaccagatgcccttgcggtgggcgtaatgcaccggcacagcggccagcatcagggcgggcggcgcaccgggcttttccagcagcaggatgttttccagccctgccacccgctgcagccagccggcggcgtcctcggcggaatcaccggtggcggcgcggcgcagccgggtcaatgcggtaagatcttctgcggcggcgatccgcagcataggcttctcccctttccgcgcagttcctttgcgcgcaatttaaaggaccttttccagttccttgaggatctcatcattgatgctttcaatcgtgcgcatccgacgctcttcactgtccggggccaccggctcggtgcactcgatgcgtttccagcccaaagtgcgggcgcagtactcggcggcggcacggctgcgggcgatatactcccggtccttctcctggatgtcctttttctcctcgtggccctggtagcgttcggtcagcagccactgggagacctcggggtcgacagccagatagatgacctcatccggggtcgggatgccgatcttcttgtactcgaaatcgaacagccagttcaaaaatccgtcccagtgcatcggcggcagtttggagcactggtgtaccgcgttggaggtggtgtaccggtcggacaggactaaaccgccctcgcggtagaactcgccccagtcggtcttgtagctggcaaagcgatcgacggcgtaaaagctggaggccgcgtaggcgttgacatcgtcgggatgctcgccaaactcccctgccaggtacattttgacgagggccgaggaattgctctcgtaattcgggaaggtgatctggcgcaggtccgcgccgcgctggcgcaggtggtccgcggtcaacttggtctgggtgcccttgccggagccgtccagaccttcaaaaatgatgagtttacccattcgggagtgcctcctttttgagtgcagcatatttttcccgtacttcggcctgtttgccgcagcacatgcggccctccgggcaggggccggtcaggcagcgtgggcctgctgcggcaaagatatgcggggccagcggcagcacgagtttgagcatttcgtcggccacagcgcggatctcccactgggcgcggttgcagcagcgcaggttgaagaagttttgcaggctgcggcagttcatcgtcatgaccatcttggtctcgcaggcgttgggcagcacaaagcgggcgtcctcgttggcctgcttggaggccttggcccgtgcagccttttcatccatgccctgggccacgaacttagcggtgtgggcatcctccagcgtgtggacgagctcgaggtatttttttgcgtcgtcattcatcgaagcgatgaactgggccttggcttcggggatggcctcgatctccggcgggatgacatagcggaaatcttcgagccggacatagcgctggctctgcacgctgaagctgccgatgcggtggcgggtgacctgcgccaggaaggtgcgggacacgccctcgatgccgaaggtgaagctggcgtgctcaatggggctggcatggccgacatcggaaagtttctgcaaaaaggcggcggtcttctcgggggtcaggccctccagcaaagtatcgatatgcgcgtcagagtagcagagcttggctgcggctgctatggtgcgctcggggtcgttggtatgggcgatcagttcaaccagcatgatttcttcttccttttatgatagtccttattcctcggtcagttttttcagcggagcgtagttggccatcgtcttttttacacccacgcggtcgaactggatctcaacgatgcagtcgcctgcgatgggggtagccttgatgaccttgcccttgccaaacacgcggtgctcaacaaggtcaccgggggcgtagctgacggcctctttctttttgggcgcggcggacggcgtgcctgccagcgtggaggtgccagcccccgccggggtggcgtggtgggggttattgctgcggccatagccggtgccaaagccggtggattgcacattgtggcggccgccggaatagttggggctttcgtgtccgccgctggcaaagccgctgctgtaaccgccgccaaaaccgccgcgggggcgggcgttatactcgctgttgaggtagccgcgggatgcgccggagtagccgctgcgcccgccgggcacgttggtgctgtaacttccgtaaccggcgccgaacccaccgccgctgtaggccagctcggggctttgggtctcatccagcaggtcggggtcgatttcagacaggaaggtggacggcgggttgcggcgggtctggccgaagatcaggcggctgcgggaggaggaaaggtacagttcctttttggcgcgggtgatagccacgtagcaaaggcggcgctcctcttccatgtcctcttcattatagcgggccatgtcgccggggaaaacaccgtcttccatacctacaacaaagacgtaggggaactccaggcccttggcggagtggatggtcatcatcgtgacgctgtcggcgtcctggtcatagctgtccaggtcggagatcagggcgacttcctcgaggaaacctgccagggtcgcgtcctcgccgttctggtcgacgtaggtcttgaccgagctgatgagctggcccaggttctcaaggcgggcctggccttcctctttctgggctttcagcatagcctcgtagccggattttttcacgacctcgccggcgaattcatccagcggcagcgtgaccgagaggtcgcacagctcgcggtatatctcatagaatttttccagcggggcggcggcacgctgcagttcggggtattcccgcacatggccgatgatctccagcatgggcacaccgtttttggcggccaggtcgccgatcttttcaatggtggtggcaccgatcttacgggcgggttcattgatgatgcggcgcaggcgcacatcgtcccgcgggttgacgatgacggccaggtaggagttgatgtccttgacttccttgcggtcaaagaagcgctggccgcccacgatgcggtacgggatgcccgcgcgggcgaagtaggtttcgatggggttggactgggcattcatgcggtagagcacggcgtggtcccgcaggtgggcaccctcccgcagatgctcgccgatgatgtcggccagatggctggcttcgtcctgctcgttggaggcggtgtagtggtggaccttttcgccgttgccgttctgggtccacagagtcttgcccttgcggcctgcgttgtttttgatgacgctgttggcggcattgaggatgttggaagtggaacggtagttctgttccaggcggatggtcttggctcccttgaaaacctgctcaaagttgaggatgttctcgatggtggcgccgcggaacttgtagatggactggtcgtcatcaccgacaacgcagacattgttggagccgcccgccagcaggcgcacaaggttaaactgggcaatgctggtgtcctgatactcgtccacaactacgtacttgaacttatcctgatagtagcggcgggcttcctcatcgttttgcagcagcttgacggtgtggtagatcaggtcgtcgaagtccatcgcgcccgcctttttcagccgggcggcgtaggtggtgtagattttggagatgagcgccgccttggtgtcgcggggggcctccgaggcaatatcctcggccgagagcagcttgtctttaaaggagctgatctggctgacagctgacttaaccggcaggaatttgtcgtcgatcatcagatccttgtagatctgcttaatgacgcgctgctggtcatcggaatcgtagatggtgaagcttttggggaagccgatgcgctcggcatcccggcgcaggaaacgtacgcaggccgagtggaaggtggacgcaaagacgtcgccgccgagggtctcgcccagcatggcgcgcagacgttctttcaactcccctgccgccttgttggtaaaggtgatggccagcacgttccaggggcgggccgggcgcacggcgagataggccgtttcgcgcggcaggtcgcggccggtggccacggcagtgcgcaggtcgttgagatcctgctcggtgacggggcgggccagctctttgctgccgtgggccgagccaaagcggatgatgttggcgatgcggttgaccagcacggtggtcttgccggaaccggcacccgccaaaatcagcagcgggccttcggtggtaaagacggcctggcgctgcatggggttcagtttggtaaagcgggcttcgatatattgatcgcgcagggcgagatattcactggtaagatcgggcatggagttttttccctttctggtcattccccggcaaaggggtcgtggttattttgcaggcgcttgtgccaggctttgggggtggcatcgcggaagccggcggtaaggtagcagccctcgctcaaactgatggccgtaccgcgggctacgcagttgagcgggtcgggggcgatggccacatccacatgcagttccccagcgatatagctggctaaaccccgcagcaacgaaccgccgccggtgagcagcacgcccgacgaggagacgtccgccgccagttccggcggggtgctttccagcacggcgcgggccgcggcggcaatgcgggaggcaagctcctgcaccggctcgtacaggtcgcgggtgtagatgacgtggcgggcgggcaagttcgtctcccaggagtggccgcgcacttccatcacgccctcaaactcgcttttggtgcagcaggccacctgctttttcagggcttctgccgtcagcggaccgatggcgatctggaatttttcctgcacatactgggcaatgcagcggtcaaaggcgttgcctgccaccggcacgctggcggcttttacacggccacccatgctgatgacggcaatgtcggtggagccgccgccgatgtccacgaccatgcagccgtggggttcgcgaatctgcaaaccggcacccagggcagcggcaaccggctcgtccaccagaaagacctgcttggccccggcccccatgaccgactcgaccacggcgtcagcctcgacgccggtaatctgcgcgggcacgcagaccgcgatgcggggtttgaagatgcgggaacggcagacctcgttgacaaagcggacgatgagctcattggtcatgcgatggtcctggatgacgccgtcccgcagggggcgcacaaggtcgatgtaggcgggcgcacggcccaccatctgcagggcttcgtcccccaccgcaatgatggtattggtgcgggtatccaccgcgccgatggtcggctggcggaagacgacgccctgttcttcggtagctatgataatggaagtagttcccaaatcaataccgatgtcatattgcttcatttgcgtttctccgtagatttctgcagggatttcggcagttcttcggtggcagccacggcggctgcggtgatttcgtaggctccggcctgctgtaaggccagcgcacaggccgagaccgttgcgccggtggtgatgatgtcatccaccagcagcacccgcttgccgctcaggtcggtgccggggcggcaggcgtaggcatcctttttgttggccaggcgctccgcgcgggtcagctccttttgaggctgtaaaggctttgtactgtacagcggcgcaagcaccggggtctgcattagtatgcccagccgccgggccagcaaaagcggcataccggcggtgccgggcagcggctcccgcggcgggaccggcacaatgtagtggtaacggggcattcccaccggagccagagctgccgggcggcggcccggtgtgtgggacggcatggcgccccagatcagtacggccatgcggtcggccaactcccgagcacgccacagttccccgccgcgcttgcaggccaaaatcgcatggcggacctcgccgctgtaatagtaggcggcgacagcgctgttcagggcgtaaaaggcatgttcggtctccggcaggcggggcggcagatgcacaaggcgtttgtcggcagcctcaaagcaggccgggcagaccgtgccctgcacagcatcgcggcccagcactgcaccgcagaacgggcagcggcgcgggtagagatacagcgcggccttttcggccagcagctgccaatccgggtggttcatgcctggtcatcccctgctttgtacttttcggcggtggatgcagcggcgtcggccagcaaaaagcgcaggccgctgtagcgcatgttctggcgcacattgcgcaccatggcttcctcggtacgggcggtgccggtcagcacgcacaacttgcgggcgcgggtgacgccggtatataaaaggttgcggtagcaaaggcgggcgggcacatcggccaccggcaggatgaccgccgggaactccgagccctggcttttgtggaccgtaacggcgtaggcgggttccagctcggccaattggtcagccgagtagacgtacttgcggtcgtccatcatgacggtgacggcgcgggcgtccgggtcaacagcggtgatgatacccaggtcgccgttgtaggcgcctaccccggcctcggcgccgtcgcgctcataggtgatgtcgtagtcgtttttgatctgcataaccttatcgcccagacgcagaatttttgcgtttttctcggtgccgatctgcggtttgccgcgcatgggcgggttgaggatctcctgcaagcgtcggttcagctccacactgccggtggggccgactttggtcgggcaaagcacctgaatatccttgaccgggtcgaacccgtaggccttgggcaggcggctgctgaccaggtcgcagaccagcttctggcaggcaaggccggtggactcgatcataaaaaagtcgtccttcggcccgcctttttggggcatctgcccttcgacaatgcggtgggcgttctgcacgatcagactttgctgcgcctgacggaagatgtcggtcaggcgaacagtgggcacgacgcccgtgcgcaagatctcgcccagaatgttgccggggccgacgctgggcagctggtcggcatcgcctaccataatgatacggcagtgataccgcgccgccgccagcaatgcctgaaacagcttgacgtccaccatgctcatctcgtcgaggatgatgacatcgtattttaacaggtttttctcgttatggatgaaccgcacgctgccggtggtgtagtccacttccagcaggcgatggatggtggaagcgctgtggtgggtcagctcgctcagccgcttggcggcgcggcccgtgggggcgcagagggcgacacggtcatacagggcctcatacaagctcaaaatggcgttgaccgtggtggtcttgccggtaccggggccgccggtgagcaccatgacccggctggaaagggctaagcggatggcctctttctgcaaaggtgcgtactcgaagccctgggtcatttccaacacacggatgtcggtctccagcgttttgggcggctcggtcgggaaggtggagagctggcccaagcgggcggcgatgtcttcttcggccgaaagcagatccggcaggtagatgtattcgatgttttggtaggtgcgggtgcgcaggtcctcggtggagaggagttcgtccagccctgcctcaatgctggcaggttccacccgcaggaacttggcggtggagtctaagagtttggcccgcggcaaacaggtgtggccgttgttggcgttgtggcgcagggcgtacaacagccccgccgccacccgcagtcggctaccggaatcaaactgtaaggcggcggcgataccgtccacctgggcaaactttaattgcagcgggtcaccacaaagcaggtaggggttctgggtcagcgcctccaccgtgtgggggccgaaggcgcggtacgccgtgaccgcctgctgggcagaaagaccgtatttggtgaaccaggccaccacctcccgcacaccgtacatgcggcggaactcgttggagatggcggcggctttttccggcgtgatgcccttgattcggcagagactctgcggtgtctcggagatgacgtttaacgtatcctcaccaaacatagacacgatctttttggcagtggaggggccgatatagggcagtacgccgctggaaaggtagcttaacagcgcggtggtatcctggggcaggctggcctcgcaggtctcggccttgaactgctccccatagctggggtggttgaccatgcggccgtagacggtgacactcatgccgttatccacactgcccacattgccggccacgatgacgtcggtgccgccggcgtccacttcaaacacggcgtagccggtctcggtgttttcgtagatcatgtgttccacaacgccttccagcttcatcagccggtcctgcggttggttttccacgtagcggtcacctccccttttggtgttggcagcgggctgcatttcggcacactaccacaatatttttattataccccaacaagccccttttggcaaacagaaaaagcacgggacaagcccgtgctttttgtcgtatttgatggttgaaattttgcagataagatgcttagggcaataccgcataattctaagtgccgatac

SEQ ID NO: 8022 - DNA, 220 bp, Unknown
  gut microbiota DNA sequence
gtaacagcttgtatattatatctcataaaagttcttttgtcaagaacttttttcgatattttttgaagtctttcggcttcaaaatcgccatacaagccgtagctacaagctttagcggctgtccccctcgcgagacagcttgattattatagcaaggagtatgacctttgtcaagcacttttttcggtttttttgacaaagtttttattgtacttttggg

SEQ ID NO: 8023 - DNA, 290 bp, Unknown
  gut microbiota DNA sequence
acaccgatctgcttgatgctctccacggtctgttccatcagctcatcgtccagcaccttaaagggatgaccttcaaagggatgcaggtcagaaagcggcatctccgtccgcttctccttagccgcagcgtcggcagctgagccactgcggttttctgttgtaatactggtttttgcttttgccattcagcttcttaacctccttccagcggtgatagatgtcattcttacctgcgaaaaacgccttttttgccttgcacttcatagatcaagtacctccttaacgacctg

SEQ ID NO: 8024 - DNA, 1972 bp, Unknown
  gut microbiota DNA sequence
ccatgtgggtcgcggacatgaactttgcctgcgacttcatcacccggcatttcccgggtgtgcaggttgccaaacctgcgggcacctacatgctgtttttggactgcactgactggtgcgctgcccatgacaaaacgccggaggacgtgctgcacgccggctgggatgtgggcgtggcctggcaggatggccggatgttccaccacccctgcgccatccgcatgaatctggccctgatccgcgccctggtggaggaagctttcaaccgcctgagcgcctacgtatttgtgtgaaactatggaaaatcgtgaacgtcttggcagccgcttaggctttatcatgctgtcggccgggtgtgccatcggctgcggcaatgtatggaagttcccctggatgtgcgggcgcaacggcggcggcagctttatgctgctgtacatcctctgcctgctggtgctgggcctgcccgttatggtgatggagttttccgtgggccgcgccgcccaggccagccccatctatatgtaccagcggctggaaaagcccggccacaagtggggcttgttcggcgtgttcagcctcatcggcaacattgcgctgatggccttttacacggtggtcacggggtggatcttctactattttgtaaaattcctcaccggcagcaacgccgatttcggctttgcccagatgattgctgacccaaaggtcaacgtaacctatcttcttatcacagtgctggtggcatttttgattttaagctgcaacctgcagggcgggctggagcaggtgaccaagggcatgatgatcgccctgctggtgctgatgctggtgctggcggtccacagcctgacctttgccggtgcggcccaagggctgcgcttttacctggtgccgaacttttctgctatcgacggctcggtggtggtagccgccatgaaccaggcgtttttctcgctgtccgtcggcatgggcggcatggccatcttcggcagttacatcggcaaagaccacagcctggtgggcgaatcgctgcatgtcatctttctggacacctttgtagcagtgctggcaggcatcatcatcttcccggcctgcttcacctacgatctggaagtcactgccgggccaagcctgctgtttgacacgatggccagtgtttttacccacataccgggcgggcgctggtggggcgcactgttctttctgtttatggtatttgcggcgctttccaccgtgctgggcgtctgcgagaatattttagccatgatccgggagctgaccggctggtcccgccccaagggctgcgccatctgcggcgtgggtatttttgccctggcgctgacgacggccctgggctacagcgtgctgcacttccagcctttcgcccccggcaccgcctggctggacttttgggattttgttgtatccaacaatgtgctgccgctgggcagcctggtactggcattgttctgctgcaaccgttttggttggggatgggacaattttgttgccgaagccaacaccggcaagggcctgaaagtgcgcccctggatgaagcccatcttctgctattttgtacctgcggcgatcctgttcatctatctgtatgggatgttcacctttacctggcggtaaaaacagggcaaattggcgccgaatttgcgggggcagaattatggtttaccgcacctgcacagaacacaattcagcacattttgaaatttaaatcgaatttttcagttaccgtataacaaatcaagctataacaaaatttaaaaacagcgaacctgcgcgttttatgttccttctgttgttgagagaacacatttagcacagttttcgctgttttttgttttttatgggcatatcacccactagatgtggtagttatggcacaaaaaagtaaggctgaacaaaagcatataaacaaaaaggacgcgccttttgaactgcaccccatttgttagacagt

SEQ ID NO: 8025 - DNA, 1039 bp, Unknown
  gut microbiota DNA sequence
aacgggagtcgcccacttaaaaagaaaaaaatcaataaatcgcgtcttcccgccagtgggccaggcggtggacggtgtcttcggattcaacgaagccgtctttatcatcggcgtgggcatcgggggcgtaggatcgcatcacgccgggggaacggccctgcaggtattctttggcctgtttttggcggcaggggacggtgtgggtcaatgtttcctcggagataatatgcttctttttcatcgtgattgctcctttcacgggcaggccgatgacgagcatcggcccctacggtgggggatactttccataaagtaagtgttcccgcaattccactggccattcccgccaaaatatggtatactgtttcctatgccaaacaaaggagcgaaccaaatggaagtcacgatcaatcaggtcatcctgcacctgctggacccaggcgcgtcggagccgatgctgtccgaccggcccatggagatggatgccgacctatttgaatatttcaccgccgtgctggagaaggctttcgccagcgacgaggtcaaaaactgccggttcctgccggactctgcctttgctgccgagatggcccacaacaacgattttgtcgatatttcgcgcagaattgcgggcgtcatctttgagcagatgctgcagtatcccaccatcccggcgggcgatctggccgtggtggattttaactacggcgcggtgccccactacggcgtgctgaagctgaactaccgccccggctacacccacaacacccaggtgctgggcaacgggcaggtcagcagcatggtgccccagcgcacgctgctgcccggcacccccaaggccgatgaagccgcgctgatcgaccgcgccaacggcgtggtgcggttgatcgagaagaagtacaccatcgacgacaagaaggatttttacctgtctacgcgggtttttggctgcaccgaggccatgcaggagaaggccaagctgaaggccgtctgcgagaccgccgtggccgccgtgaaggaagcctaccccgagaccgac

SEQ ID NO: 8026 - DNA, 151 bp, Unknown
  gut microbiota DNA sequence
tgggccgttacctcaccaactagctaattggacgcgagtccatcctagagcgaataaatccttttcccgcagtgccatgcagcaccgtgggcttatgcggtattagcagtcgtttccaactgttgtcccccactccagggcaggttactca

SEQ ID NO: 8027 - DNA, 4567 bp, Unknown
  gut microbiota DNA sequence
ctcttggcgcggagatccgccggagcggtgcttaagccgttaggcgggaattgtgcggtgttgccttatatttcgttttggctctgttggagaaggcgcagcagcggaaagctgcgcgcggcgggccgtactgcgatcgcggctataagaaaaagcggtgttgaagtgaaacgcgcctgaattattacttgcatcttcgcgccaaaacggataaaattgaccttaataaagtaaaaaagaaggcgcagagatgactgcaagtgaaatcgaggcgttgggcggctactagggggccacgccgaagcccgcggactttgaggcgttctggcaggcgcgcatggccgaggcagacgcggtgccgctggactataccgtcacccaggccaaagaggtgcccagctgggacatctgcgactttttggacctgtggtttaccggcatggcaggtgcgcgtatctacgccaaatatctgcggccgcacagcgataagcccgtgccgctggtgctgcagttccacggctaccccggtgcgtcccgctcctttgccgagcaggcctcctttgccgggatgggcatggcgctgatcgccatggattgccccggccaggccgggtacagcgtggacgccggcggctttttgggcaccaccgtgtccgggcacatcgtcgccgggctggacggtccggccgagggcatgtactacgtgcggctgcatcagaacatccgcattttgtgccgtatcgtgcgccagctgcaggagatcgacctgcggcgggtgttcgtcaacggcggctcccagggcggcgggctggggctggcctgctgtgcgctgaaccccggcctcatcaaccgcgccgccatcctctacccgtttttgagcgacttcaagctcgtgtgggacttgggcgcggacgagatcgcctacgagggcatccgctactacgcccgctggtttgacgccgacgagcaccagcaggaccgctggttccgccagctgggctatatcgacagcaaaaactttgccactctggtgcagtgcccagtgctgtttggcacgggcctggaggatgtcatctgcccgccccagacccagtgcgccgtctacaacaatttgcactgcaaaaaaaagcggtatcttttccccggttacgggcacgaggagattgcagaatttgacgatatgctgttagactttttctgtaaagaggaggctgtgctatgactatcaccgaacagaaagcctttttgcagacttacaccggcaaggcgcaggccccggcacatccggcccaggattgggcagacgccgtgaaggaactgcattttgaagcgcagactgccccagtggaatttgccaacgcttacggtatgtatgagcggctgacaatcacttacgaaggccgcaccgtcacggcgcgtgtcatccgtccggcttcagcggggcagcatcccctgcttttgatgtaccacgatctgaaccgcggcgtgcgcggctggcaccacatgacgcgttttttggcgctgggctttggtacggtggcgctggaggccgagccttacaagggcgattggctggctgaccccgcgcaggcagagttccgcacgcggtataaggacgcgctggccgtggccaaggccgcgctggcgctgccctgggtggacgcggaacgggtgtatgcttttggagagggcttcggcggcggactggcactgctgacggcctgcctgctgccccaggtgaagcgctgtgcggtgctgaatcccctgcccggcgattttgccggagcgggcgtggccggacaggacgacctcgaccttgccaattttgcgcccctttgccgcgccgaggtgctgttgggcagctgcctgatggacacctacgcgccgccccaggggcaggcggccatctacaaccggctgggcggccccaagcagtggaagatgtaccccaagtatgtacatgaacgtgtcaactttttcgagaatcagatgctgtttttcttcaagaatggcatcgcggagtaagccctgacgcaaaactttatagcgaaaaaatgcgccgcagtttgtacgctgcggcgctgtttatttctggttagcggcgttttttgccagcatattgcctacggtgcggcgcggggccagggcggtgcccagggtgcggatgttctccccagccacaggtgcaggcactttttttgcggcaatttccattgtccgtgaaacttttttgcggtatactacggattatagacaggcggcccgccaggtggccagattggagtgaaagaccatgaaggatgacaaactctgcattttcccggatgccctgattgccatgatcgtgaccgaagcgcaggaccgcgccctggcccagatgcccggccccgaagcgccgctgggcgaggtgcaggcatccgatgcgtttttgcgaaggatggatgcgctggtccatactgccaaccgcagggcgaatcggcagtatggacggctggcgatcaagcggttcctggttgctttggccacggcgctgtcgctgttttcctgcacgctgctgcccgtaaaggccgtgcgggaggcggtggtagagaccctgctggaatggcacgaccagtttgtgacggtctccttttcggatggggatgcctcccccgtgcccgcgtttcgtgcatcgctgtcctatattccgcaggggttcacgctggtagaagccagcgacccggccgccacgcagttttattatgcgcagtatgccgacgactcaggcggctcgtttgatgtgatcattgcgccgatcaacgatacgcaggcccagataaacaacgaggatgcggcctattattccctgcaatttgacggtcacgacgcaatttggtgcgttatgaatgttgacaattctaacgttcttgtgtgggaaagtgaccgtttggcttactcgatgacgggcaatttggatataacggagcttatcaaaattgccgagggcattgtgctggatacgctataaccgggaagttacgattcaggaggaaacttcgtgcttgttttctatcttgctgcgctggacagcgatgacaataaaaataaatttgaaacgatttaccgcaaatactaccgctttatgctgcacactgccgcgggcattatcaaaaatcccacgctggccgaggatgccgtacatgaaacctttgtgcagctgctgcgcgagatcgacaccctgcgcatcgacaacgagcgggcgctgaaatcttacctttacatcgtgacgagggagcggagcattgattttctccgcaagtgggagcgccgcggcacctggcccgactacgaaagcctggccgcggccctggaccattacgttgagccggaggaagtggcgctgaccaatctgcagctggaccgggccatcgccctgctggaagaaatgccgctgatctaccgccagacgttggttttgcgggtgaagggctactccatctgcgagatcgccaaaatcaccgattccagcgagccgaacgtccgtacccgcatccaccgcgcacgcgccatgctgctgaaatcctttgcggagcaggcggagtgagggcgttatttttcactatataagcacaccctgttgtttttgtaatcagtacccgtatagtcaaatctaccacagggcagccattggcatctataagaatcattactctaccgttttccctccataacccaagcaaatgcccttgcggtccgtaggtcggcatctttgaagtgaccgcccgcgttccattccagcgtgcaggctttgccgcgctggatcaaggcgctgtgcagggtacggatgttatcgcctactgccgccatcgtctgatttttggtatgttcctcgcggtcaccaaggctgaggtaaacacgctgcgcctggatagggtgcgccgcttcgtattctgaccagccgggaaaccatacggacggcgaagccgccgccacgccatacagcgcatctgtctgtgtttccgcccacagtgcaaacaacccggccagtgagtagccgcccaaaatagccttgccatcttcctttacagaatactgtcggcggatgcgcggcacagcctgttccagccatgcaagcgtgtcccccgccctgccgccgaagccctgcttgccccacacaggcggcgcaggccagggcgacaaatcatcgttccagttttcgacttggacagcggccagcaaaaacggttgtgcggtttgccgatgtatagcttccacttcccgcgccatcccggcaaaatcgtgttcgtccgccatttgcagcagcaagtattcggcgccggtatcaccatagatacggcagcttctgttttgtatctgcaataactggttatccataaaattgattgtgtattatcagtcgatggcggcgcctttggccgcacatacgatcgttgtcatggagttggcctcgatctcacaggcaataaggctgcccttgatgcgcagtgtgaccggcatgcattgttccgttcggttcagcagcacgactgcgaatgtccgggtagagattcagcagctggacttcttg

SEQ ID NO: 8028 - DNA, 20893 bp, Unknown
  gut microbiota DNA sequence
aatctacaaaaacgtttggcaggatcaccggcaggatagtttagaagaataccagcaggaacaaaaaaacggagctgccaatagtgaaaaggtagaggaagcactcagctggcaagagtcgttcccaaacgatgaaatcagccgggaatttctggacagatttgtgccgagaatcttctccatcgatggacagaaattcatctgggaactaaatctatttcaagagtcatgcactgttcaatgcaatgtgcgcggaacgtacaattaccattcgatttcggcggaaaaaatcatgccgggaaaaacaaaagcgaagaaaggggatggggccgtcaataggatacttgaggatgcaaacagtacgcgcttttgggtacatacctatgatgacgacccaataagcaggctgcaatcaagaacccgcgccagtaatttgacccgttcttggtcgttcacactggattatgataaggcacgttcttgtcaaaattcgcgtggctgcgttctttggcctaggcaatagaaagacctcaccgtagaggttgttctataaaatactttgagcccctgattaccgtacttaagtaatcaggggctttttgtatgcaaaaatgccctttgtctatgtgctggacaatgcggtggtctgcaaggtaaaatgcgcaggaagcgaaaagctgacggattgtaccccaccagtatgccaagaaaccgaggacgcagaatgaccggcaaagagtttgaacagatcatccgcataagcttcgaacgaaaaaagtttacgaacttgataatcgacaagaagctgtttcggaactttgcgcatgtctattgcaaaagcgcagtgaaccccggcatgtttcattataacttaaagaaaaagaccgaagttgtaaagcccttttatggcttttacttcggtctttcttttttaggggatgtgcaacagccccgtcctgtttttccgcttgatgtgtatgcaccggaaatcatttttcaaacagatgcagcagatatccgtagccctcggcctccattttttcataggggacgaaacgcagggccgcgctgttgatgcagtagcgcacgccgttgggcgactccgggtcgccggtgaacacgtggccgaggtgggagtctccggcgcggcttctgacctccgtgcggcgcatcccgtggctcagatcctctttttccactacggcagggccctcaatgggctttgtaaaggcaggccagccgcagccgctttcgtacttatccgtggaggaaaagagcggctcaccggtgacgacatccacatagatgcccttttcaaatttatcccagaactcgcctgtgaaagcgcgctctgtgccgctctcctgcgtaacacggtactgctccgccgtcagcttgtcccggatggattccgccgcgggcttctgatagtcgcccggatcgatgcgcagccgggaaaacagctccatctccgcgcgcgggatgtggcagtagccgttcgggttcttttcgaggtagttctggtggtactcctcggcggggtaatagttcttgagtggacctatctccacgaagaacttttcactgcgtccccgctcaatctccgcaatgcgctccaccgtttccttcgcgctttcgttggtgtaatagacaccggtctgatactgactaccccggtcgttgccctgctggttctccaccgtggggtcgatcacatagaagtaggccagtagcagggcgtcgagactcacctgcccggggtcatactccacccgcacggtctcccggaagccggtgtttcctttgcagacggtcttgtaatcggcgtccgccccgcaggtgccgttggcatagccgctctcggcatcgatgacgccggggatggactgcatcagctgttccatgccccagaagcagccgcccgccagatatatgacattttccgtggtatccatatacatgcttccttcaccggacatatcagagggctggtcggtcatttccttctcgtccgttttctgcggcatatttttctgcccggaggcgcagccgctcagcagcagtaccgcggtgagcagaagcggcaatactctccgatacatggtgtatccctccctcctgaggagatgaatccgtttgtcagcccatatcggcggcaagagcctggtcgataagtttttgtagcgtctctgcctgcttcttttccgtgagggcgcctacgatgggttcacccacgatattgccgctgcggtcgaccacataggtggtgggataggcaaagatgttggtggtaaactttcccgcctcaccgtcggagtcaaaatacacattctgataggtggcgcccttcttggcaagcacatccttcgcctcggaaattgccgtttcgtcgccgtccagcgtgaaggtgttgacgccgatgagggagccgcccttctccgccagttccttgttcagcgcatccagatcggaaagttcgcctacacagggattgcaggtggtgaaccagaaattcaccacggtgacggcgttggcggagaacagctcgtcgctcttcaccgtgttgccgtccagatctttcccttcaaaggcggggaacttctgcatactgccgtcgtcgggagggttgctcgtgtcgctgcccgcgggcatgctcatatcgccgtccgtggatttctgcatgatctcgggatacttctcttccaactcggtcagcctgttttcaatattgctgatcttcgtggctgactccttcagccagtcatactccttgtcggcgaactgctctttagcggcctcgatggtatccagcaggaagtcgccgtagtttttcccgtcctcgaccatggccatgcccttgtcagccttcataaagaccttttcccacagctcggtattttccgacaggatcgcgttctcctgatccagcagctccttgtgcagggtgagcgcttcatcggcgtttttcggctcgtcagtcatggcggagccgttgccgctcatgtcgcccatcttgtcattgttcttcgtgccgcaggccgccaaggccagcaacatcagtacggcaaaagccagtgcaaaaattctcttcttgttcattttgattcctccatcgttgttttctttgttgtttctttcccgttgccgaagccgtagcggaagcacacggcgttcgtcggacaggcgcggatgcacatcccgcagcggatacactcagtatggttgggcgttttcgtcacgtccacatccatcttgcaggctctggcacattttccgcaggagacgcacttattcttgtccaccttcatctggaagagggacacccggttgaacagtgcgtaaaacgcccccagtggacagagccacttgcagaagggacggtagaataccacgctcagcacgatcaccgccagcaggatacagaatttccatgtaaacaggctccccagcgccgcccggatgccggaattggcaagggacagagggatggccccctccagcacgccctgtgggcagaggtatttacaaaagaacggatcacccatgcctacatcgttcacaaggaacgccggcagcaggaagaccatcaccagcagtacagcgtacttgagataggtcaggggcttgagtttctttgtggagagcttcttcgtcgggattttatgcagcagttcctgaaaccagccgaagggacacagaaaaccgcagataaatcgtcccagcaggactcccagcaaaatgaggaaacctgtgatataataggaaaagctgaacttggaagacccaaccaccgcctgaaacgcaccgatgggacaggcaccggaggccgctgggcaggagtagcagttcaaccccggcacgcagacgtttttccctgcgccctgatacaggcctcctttgaggaaattcggcaggtgcaggttggtcaataagactgcccccgcctgtatccagccccggaagcgggacaggagttgtgacgcgcccgaagatttcttacccaatgcccacacactccagacataatttaattgctttgctcagcaccgtcgccgtctcgccgcgccatacgccgaaacacagcatagcgataccaacaaccagcagcgcggcctgcacggccgacttttttacatggctcaattccatcaccctttcactttttctgccaccatcatagcgcaagagagttaaagtcactgttaagaacgaaaatttaacgcaaaccttatctaattttgctataattaaaacgacataaaaatgaataaaaaaggagggctctcatgcaccttttagtaattgaagacgaacgcgccctgtgtgaaaccatcgtccgcagcctacggcgccaagcatacagcgtggactgctgctacgacggggagaaggcgttggagcttctgggcgtggaacgctacgatctggtgctgctggatctgaacctgccgaagaaggacggcatgacagtgctgcgcaccctgcggcagaccgaccgggagacaaaggtgctgatcctctccgcccggggtgaggtggaggacaaggtggaggggttagatgccggggccaatgattatctggcaaagccctttcatcttgccgagctggaggctcgcattcgcagcctgaccctgcggcagttcacccagcaggatgtactgctgacctgcggggacctgacctttgacacccgctcccgtaccaccaccgccaacgggcagacgctgacgctcacccgcaaggaaacagggatactcgaatacctgatggtgcatcagggacggcccgtgagtcaggaggaactgatggatcacgtttgggacaacagcgtggacagcttcagcaattccattcgcgtccacatctccgccctgcgcaaaaagctccgcgccgcgctgggctatgaccccatccgcaaccgcatcggcgagggctatctgatgggaggcgaggaggaatgaagcgactttctttgcagtggcgcatcacactgatgtccgtcctgctcattggcatcacctgtgtggtcatgaatttgctgctctgctcctccggtgtgtactatatggacaccattgcggacagcttacagggcggcagcacggtgatcctgaatgagggcggagcggcgagctttgacccggaactcatagcgcccaacgaggagttgaccatcgtcgtcgatggggcgcaggggagcttccgcaccaccaactggtacatcacggctgtggtaacgctactcagcggcatgctgacctattttgtcagcggacgcgcgctcaagcccctgcgcagctttgcctcgcatgtggagcaggtgcagctgaacaatcttgccgatatgaggatcgatgaagacgtcattccagaattccagcagctgagccgctcgttcaaccagatgctggagcggctgaacaatgcctttgccgcccagcggcagttcaccggcaatgccgcccacgagctgcgcacgccgttgacgctgatgcaggcgcagctggacctgttttcctcagagcaccccgacgtgctgccggagactgcggagtttctcgccctcctgcgggagcagacggaacggctgacccggctgaccaagactctgctggagatgagcaatctgcggcaagtggcacggaacgagcagatccagctcgctcccatgatcgaggagatctttacggatctcgcgccactggtggaaaagcgcggcatcacgctggaggcggatggcgacggcgttatgaccggcagcgatgcgctgatctaccggctgatcttcaacctgacagagaacgccgtcaagtacaatcgccccggcggctcggtgagggtctgcgtcatacaggaaacggaaaaactcctgattcgcgtttccgataccggctgtggcattccggatgagtatcagcagagcatcttccagccctttttccgtgtggataagtcccgcagccgcgagtacggcggtgcggggctggggctctcgctggtgtgggagatcgccaatctccacggcggctccgtttgggtggaggagagttcggagaaaggcaccaccattgcggtggagctgccggtacagtgatattgcacttgaaatctccggtgagcagtttgcagaatacagaatctgtatctcgttacaaataaataggctgtgcagcgggagcgactttcgggtcgctcccgatttttactgtgtttccggttcccaaacccgaaaaggaaagatgcggtggtttgcaaagtgaaattgtcagaaagcgaaaagcgctgtgacaacgaccccatagcgtacgaagaaggcgatgaaatgcaattttaactttaacaaaaaatccaccgggggcgttctgcccccggcggaaataagttgcgcttatgacgttagattggcgttggatatgccgtttagttatccatatcctcaaacgcttccagcccttttttggcctctgccttggcgtcgccgtgcttgacgaagcacatggtcacaaagctcagcgccacaaacagggcggcgtaggggaacagcacacggtagtcaatggcccgcatcagggagccggccacgatgggggttaccacctgggcggccatcgagaaggtgtagtagtacccggtaaacttgccgatgtcgctgccgcggcacatctccaccaccataggcagggagttcacgttgatggcggcccaggcaaggcccaccagcgcaaacaccacgtacataatgggctggatggaactgtaagtggtggtcagcacgtagcccagtataaagcaggcggccagcagcacgataccgcactgaatagtccgcttgcggccgatcttagcggccagcgcaccgatgggaatgtacgagacaatagcgcccgccgtggcaaccagcaggcaggtggaggccccgcccaggccctcgcccatgacagcctccacatacttggtaaaccacgtagtaacgccgttatagccaatgaaccacagcgagatggacaccagcagaaagctcaggctgcgcttgaccggcgcaggcagcacctcgtggccggtgccgtcgtcagtggcaaggttccactcgggatgagcggcttccagcttttgattttctgcttccagcttgggctccttgatggtcagatacaaaacgaccaccgccacaaccatgatcatcgagacgatgaagaacagcggccggtagctgacatgctccacgcccttggttttggacgccgggtacagcacagccgccagccccaggtacaaaatgccgcccacggcgcccatcaggttgatgatggcgttggcgcggctgcgcaggggcttgggggtcacgtcgggcatcagggccacggcgggggagcggtaggtgcccatggataccagcagcagccccagcacgataatgaacagcactaatgtaccggtgctggggctggcggcgtaacggtcgtccagcagcgggatcaggttcatcaagatggctgccgctgcggtgccgcccacgataaacggcatgcgccgcccgatgcgggtgctggtcttatcggacagcgccccgaaaaacggcagcaaaaacagcgccagtacgttgtcagcagccataatggcaccggcaaaggtttcgttcagcttaaaggtgtcggtcagaattaaggtcataacgctgtcgtacatctgccaaaacgtgcagatcgacaaaaacgcaagacccaccagaatggtacggcggctgttcagcttcacggcgattctcctaactttggggcgcagttggctcctgtaattgattctattgtagcattgattgcgcgaaatgtctacaattttaacatcgcagacgagaactttgcttgaaattgacgaacgagagtgcatgtccacccggattatgaacattttccaaacaattctgcaaccctcttgcatcctgatgcaggagggactattattatcacgatgaaataattaacacatgataataattagcaggaggtgctttatgccaggttcagagatcccggatctgcagggggtgtttcggtttgtctcgcggctgcacacaatgtccaagcgcggcatgcgcggcgcgttggcagactgtcccagatgccatttcggcatgctggaaaacctgcacattctaatcgagcagcgcggcgtagagggtgcaatttatgtttccgaggtggcccgtgctatgcggcagcctatgccagccgtttcccgcgggctgcgcatgatggagcaggatggcagcatcgtgcgggaaactgatcccaacgaccggcgcaaaactttcgtgcgcatcaccccgcagggcgagcaggcacgcctgcaaagcgaggcggcactgaacgcctactttggccgcatcatggcacggatgacaccggaacagatcgatcagatgtacgccctgcgcggtgtgctgttggatgcaattgaagcagaaaacgacgccatgcagaaaaaaatcaacgcacaaaaacagggaggacctgtcgatgacgaaaatatttaaacagctggcacgccattgggcggcatgcctggccgtggcggctctgctgatcgtgcaggcctactgcgacctgtccctgccggactatacaagcaagatcgtggatgttggcatccagcagggcggtatcgaaagctcggtaccgtataccgtccgcgatactaccctgcaggcattggaactgctgatgaccgaggacgaggccgccctggccgaccagtggtacagcgggcctgatgccgacggtctgcgttatctttctaaggatgccgacactgctgcggcggagttggaatccgctttcaccacacccgatgtggtgttgtacatggctgcggcccaaaatgctgcccgggtcgccggcagtaccgagacggtgacccccaccatctacgacctggatgccgtcagccagcagtttgcggcgatggctcaggcacccggcgcacgggagatgctgcaaaaccagcttgccggggccctctcccagttggatgggaccgtggccgacaaccttgccagccaggccgtgctgctggtttccctcgaatacgaagcccagggcatcgctcacgacgtgcagatagcgtatctgctgcgcattggcgggcagatgctgggcctgaccctgctgatggttgccgccgcggtggcggtaggcttcatcgcatcccgcgtgtcagctgctattggccgcgacctgcgccgcaaggtgttctccaccgttgtgggctactccaacgcggagatcgaaaagttttccacagcgtcgttgataacccgcaccaccaacgacatccagcaggtgcagttcgtctgtgtgatcctgctgcgcatggtggcctatgcgcctattttgggcgttggcggcattttgcacgtggcagcgggcaataccggtctttcctggatcatctttgtggcggtggctgcgctgctggtgcttatcaccatcctgatgaacgtggctatgccgaaattcaagcagatgcagacgctggtcgaccggctgaaccttgtcagccgcgagatcctgaccggcatcatgcccatccgcgccttcagccgcgaaaagtttgaggaagcccgttttgataaagccaaccgcgatctgatgggcacccagctgtttaccaaccgcaccatggctgccatgatgccttttatgactctcatcatgaacggcaccagcctgctcatcgtctggttcggcggtaaggccatggacctgggtaacatgcaggtgggcgagatgatcgctttcatcacctacacaatgcagatcgtcatgtccttcctgatgctggcgatggtagccgtcatgttgccccgtgccggtgtggcagccgaccgtatcgacgaggtcatcaagacgccggccaccatccgcgaccccgataccgccaccgccaaaccggcgctggaacgcaaaaactggaatggcgaagtggagttcaaggatgtcagcttccgctatcccggcgccgacagcgacgcactggagcacattacctttaccgccagacccggcgagaccacggccatcatcggctccaccggctgcggtaaatcgacgctgctcaacctgatcccgcgcttttatgatgccaccggcggtgcggtctgcatcgacggcgtgaacgtgcgcgatatgccccaggccacgctgcacgacctgatgggctatgtgccgcaaaagggcgtgctgttcagcggcaccatcgacagcaacctgaaatttgccggcgagcatatcaccgatgaggacgtgcgtaccgccgccggcattgcccaggccaccgagtttatcgatgccaagcccgagggctatgcaagccccattgctcagggcggcagcaatgtctccggcgggcagaagcagcgtctttccattgcgcgtgccatcgccaaaaagccgcgcatctacctgtttgatgacagtttctcggcgctggattacaagaccgatgtggccctgcgccgtgccctgaaagcccagacagacaacgccaccgtcatcattgtggcccagcgtatctccacagtgctgcatgccaaccgcatccttgtattggacgatggctgcatcgtgggcgacggtacccacgcccagctgatggaaagctgccccgagtatcaggaaatcgcccgcagtcagctgagccagaaagaattgaacctgtcgaaggagggtgagtgatatgccaagacccggacgcatgaccaccgagcgcgccaaagactttaagggcagcctgttgcagctgctgcgggcgatgggcaagtataagctttcgctcatcgtggtcgttgtttttgccattttgtctaccatatttaatatagcaggccccaaaattctcgccacggccaccacggccctggccactggctggatcgccaagctgcggggcaccggcgccatcgactttggctacatcggtaaaattttgctgatcctgctgggcatgtacctgctgtcctcggcgttcagctttatccagagctggctgatgagcggcctgtcccagaaagtctgctatgatttccgccgtcagatcagtgaaaagatcgaccgcctgcctctggcctattttgaaaagcgcaccgtgggcgaagtgctctcccgcatcaccaacgatgtggacaccctgggccaaagcctgaaccagtcggtcacacagctgatcaccagcgtgaccaccatgatcggcgtgctcatcatgatgctgtccatcagtcccaaaatgacgctgatcgcactgctgatcctgccggtctcgttggcgctggtgctgctggtggtcaaattcagccagaaatattttaaggcgcagcaggcaacgctgggcgttgtcaatggccaggtcgaggagatctactccggccacaatgtcatcaaggctttcaatcgtgagaacgccgtgctggcagatttcaatgctgccaacgataaattgtacgaatccgcgtggaaaagccagttcctctccggcctgatgcagcccatcatgaactttgtgggcaacctggggtacgtggccgtagctgtggcgggcagtatttttgctgccgccggtgctatcaccatcggtgacatccaggcgttcatccagtacgtcaaaaacttcacccagcccatccagcagttggcgcaggtatccaacatgctgcaaagcatggccgccgcgtcggaacgtgtgtttgaatttttgggcgaggaagaggaggaccagctggctgatccggcctgccgtgccgacccggccgccatcgacggccaggtcaccttcgaccacgtccgctttggctacacgccggaaaagaccgtcatccacgatttcagctgcaaggtccggcccggccagaaggtggccatcgtcggtcccaccggcgcaggcaagaccaccatggtcaagctgctgatgcgtttttacgatgtggacgccggtgctatcaccttaaacggccgcaatgtgcgggactttgaccgcagtgccctgcgggaaggcttcggcatggtattgcaggatacctggctgttcaagggtactattatggagaacatccgctacggccgcctggatgccaccgatgaggaagtcatcgctgccgccaaggctgccaatgccgaccacttcatccgcacgctgcccggcggctaccagatggagctgaacgaggacgcctccaacgtcagccagggccagaaacagctgttgaccatcgcccgcgccatcctggcggataaccgcatcctgattctggatgaagcaacgtccagtgtggatacccgtaccgagcagcgcatccagtccgccatggaccgcctgatgaagggccgcaccagcttcgtcattgcccaccgcctgtccaccatccgtgatgccgacaagattttggtcatgcgggatggcgacattgtggagcagggcacccacgatgagctgatcgaccagggcggcttctacgctgatctgtataattcccagttcgaggatgtgacggcgtaagattttaaaggcccctctgggaaagggctccggctccctcccagggggggctttttatgccctcttatttcgatgcaatacttcttgacaattgccttaaataacgataaaattgtaaacaggaataaaaggaaaagcgccgcaccttaaccactgcctgtgcggttgcgtccatagggtgtcgcccaccgggaacaccgcttttttacgatacagtatccgcctgtttttggcttagttacgttttatattgccgccttgtggcataagtgtgcgcttttttgcccgcatttgccgcgctgtgttgcttttgccataaaaaacaaacaaaccgtatattgaaaaagcgtcccgctgtgctgcgccctcctgaatttgcatttttccaaaattaaggagtgaactgaccatgagcccaattatcactgtgctgctggtccttgttgctgctgctgtttgcgggacgctcggtttttacctgggtggcgaaaaccgcaagcgcacggccgaagccaagatcggctcggcggaagacgaagccaagcgcatcgtaaacgatgccatcaagacggctgaagccaagcgcaaggaaaccatcgtagaagccaaagacgaagccttcaaactcaagagcgaagctgacaaggagatcaaggaccgccgcgccgagatcacccgccaggagcgccgcatggaccagaaggaggaggcgctggacaagcgctccgccgccatggagcgcaaagaggaagacctcaagcgccgcaccgagaccgtggaagcccgcctggacgagctggaacagctgaaaatgcgtcagaccgaaaagctggagaccattgccgccatgagccaggaggatgcccgcgccgtgctgctgaagcaggtggacgacgagctgacccacgaaaaggccatgaagatcagcgcctaccaggccaacatgaaggacgagtgcgacaacatcgcccgtgagctggtcggccaggccatcgcccgctgcgccgccgatgccaccagcgaagccaccgtcagcgtggtgccgctgcccagcgacgagatgaagggccgcatcatcggccgtgaaggccgcaacatccgcgccctcgagactgccaccggctgcgacctcatcatcgatgatacgccggaagccatcaccctgtccagctttgaccagacccgccgcgaggtcgcccgcatggccctcgagcgcctgatcgccgatggccgtatccacccggcccgcatcgaggagaccgtcgacaagtgccgccgcgagctggagatccagatgaagcgcgagggcgacaaggctgtcatggatctgggtatccacagcctgcaccccgacctggtcaagctcatcggccgcttgaagtaccgcaccagctacggccagaatgtgctgagccactcgctggaagttgcctggctggccggcctgatggctggcgaactgggcatcaacgttcagctggcccgccgcgccggcctgctgcatgacatcggcaaggcccttgaccacgagatcgagggcagccacgtgcagatcggcgtcgacatctgcaagaaataccgcgagaacccgcaggtcatccacgccatcgaggcccaccacggcgacgtggagcccaagaccaccctggccttcatcatcatggctgccgatgccatctccgctgcccgccccggtgcccgccgcgagaacatggagagctacatcaagcgtctggaaacgctggaagccctctgcaacggcttcgagggcgtcgaaagctcctacgctgtccaggctggccgcgaggtccgcatcctggtccagccggacaaggtcagcgacgatcaggtcatcctgctggcgcgcaatgtcgccaaaaagatcgagaacgagttggattaccccggccagatcaaagtcagcgtcatccgcgaaagccgcgctaccgagtacgcaaaataatttccgcagcctgccgcttgccggtgggctgcttttttattattcggccccctctgggagggagcctttttcatattagcatcttgcatatttccccgctacgctttataataaataagaatactgttataaggaggggtgtgccacgacggagaaaaaactgccgcaaaacccccataaagaagttctgggcatcctgggtgggctggggcctgccgccagctgctacctgtaccagatgctgatcgaccacacccccgcatcctgtgaccaggatcatattgacatcgtcatttcctcccgcgcgtccacgccggaccgcacggcgttcatcatgggcgaaagcaaggacgatcccttcgccgtcatggagcaggacggtttcagcctggtacactacggcgctacggtcattgctatcccctgcaacaccgcccactatttctacgaccgcctggccgaggcactgcccgtgccggtgctgaacatgccccgcctgaccgtggccgacgccaaggctgcaggctgcactaagctgggcatcctggctaccgacggcaccctgcaggccgagacctatcagatcgcctgccgcgatgcgggcatcgagtgggccgcccccgccggcgaccaccaggacgacatcatgtcggtcatctacgacgacatcaagcagggccgccgcgccgacatggccaagttcggcggtgctgtgcacgacctgaaaaagcagggctgcgatatggccgtactgggctgcaccgagttgagcctcgtcaagcgggacgagcacctgggtaaattcttcatcgacagcaccgaggtgctttgccgccacgcgctggaagcctgcggcgtaacacccatcgggttttaaaagtaaacacacctgcaaagtgaaaacacctacgcggtttgttataaggagagaatcatggatcagaaaaaattctacatcacaacgccgatctattaccccagcgataagctgcacatcggccatacctattgcaccgtggccaccgacgccatggcccgctacaagcgcctgcagggctacaacgtcaagttcctgaccggcaccgacgagcacggccagaagatcgagctgaaggccaaagaggctggtgtcaccccgcagcagttcgtcgacaatatcgtcgaaggccctaagggcgtcaaggacctgtggaaactgatgaacatcagctacgaccgctttatccgtaccaccgacgattatcacgttgccgccatccagaagatctttaaaaagatgtacgagaagggcgacatctacaagggcacctacaagggcaagtactgcaccccctgtgagagcttctggaccgagagtcagctggtcaacggctgctgcccggactgcggccgtcctgtcgtcgatgctgaggaagaggcttacttcttccgcctgtccaagtacgccgaccgcgtgcgcgacctgctggtcaacaccgacttcctgctgccccgttcccgcgtcaacgagatggtgcacaacttcatcgatccgggcctggaggacctctgcgtctcccgtactagtttcaagtggggcatccccgtcgacttcgaccccaagcacgtcgtctacgtctggatcgacgccctgttcaactacaccaccgccctcggcttcatgaacgataagtaccccgacagcgactacgaaactttctggcctgctgacgtgcattttatcggcaaggagatcgtgcggttccattccatcatctggcctgccatgctgatgagcatggatatgcccctgcccaagcacgtttacggccacggctggctgctgctggacggcggcaagatgtccaagtccaagggcaacgtggtggatccctacctgctggccgagcgttacagcgccgacgccctgcgttacttcctgctgcgtgatttcccgtttggttccgacggcaacttctccaacgagctgctgatcaaccgtatcaatatggacctggccaacgacctgggcaatctgctgtcccgtaccaccgccatggcggacaagtactttggcggctgcctgcccatcgagcaggacgaaggggccgaggatgccgccctgctggaaaaagtcagcggtctgcgcgcccgctacgaggccgacatggaggcttatgctttccagaacgctttggccgacgtgtttgaggtcatcgacaacgccaacaagtacatcgacgctaccgccccctgggtgctggccaagagcgaggacaccaagccccgcctggcccgtgtgctgtataacctggccgagaccctgcgcatctgcaccgtgctgctgcagccgtttatgcccgccacctgcgagaagatctttgcccagctgggtgtggatgacagcctgaagacctgggacagcgccgctgccgtgggttctatgcctgccaatgccaccctgcacaagggcgagaacatcttcccccgcatcgacaccgccaaggagctggccgaactggatgccctggaggctgcacagaaagccgctgcccgggctgccaacgcccccgcagaggagcctaaagccgaagccgctgctgccagcgctgagctgatcggcgaccatgaggaagagatcagcttcgatgatttctgcaaggtagagctgcgcgtggccgaggttcgtgcctgcgagcgcatgaaggagagcaagaagctgctgcacctgaccgtttttgacggcgagcgcgaacgctgcatcctgtccggcatcgccaagtggttcgcacccgaggatctgatcggcaaaaagatcggcatcgtggccaacctggcaccccgcccgatgatgaagggtaagtatgtcagcgagggcatgatctttgctgctgatactgatgtcgacggcggctgctccatcgccttcttcccggacagcacccccgccggtgcacgcatccattaaggctgtttgttcctttcttgaaagaaaggaactgaaagaacttttaattaaaatcacatagtcatgcaattttgggagaataaaatttggataaccagaagtcaaagctggataaattcttctccaatccggcggctgctgtagctatggctatcctctgcaacattctgtgggggtcggcactgccgtttatcaagatggggtatcggatgttcgccatcgattcctccgatacagcgaccatcctctgttttgcaggcgtccgcttcatgatgggcgcggcgctggtctggctggccgggctggcgcttaaccgccgcccgcttcccatgccccgcggcaaacagctggccgtctgctgcgggttgggcctgtggcagaccgccgcgcagtatttcttctactactcggcggccgcgctgctcaccggtgccatgggcggcatcatcaacagcacccaaagctttatgggcgttatcgtggcccatttcctgtacggcaatgccgaccgcatgaccccgcgcaaggcattgggctgcgtgctgggttttggcggcgtcctgtttgctaccttaggcaactacggcagcggcagtgctaaaggcattttgtacatgctgctggcttcggccatcttctcgttggccgggccgtggaataaggccgccgccaaaaagaccgacagcttcaccgtcagtgtcctcaacctgggctgcggagggttcgcgctggccgtcatcggctttgccatgggtggcagcttgcacccgcagcagggcggggctatcccggtattgctcgtgctggcgttcatttccggtgctggctatgtgctgtgggctttgctgatgaagaacaaccccatttcccgcatcgccatcttcgggcttattatcccaatcatgaacgtgctgctctcggccctgctcaacggtgagccgctgtttgagtggcagtacatcgcggcgctggcgctggtctgtgtgggcatcttcctggtcaaccgcgccccgcagccaaaggaaagctgaaccatgacgaatatttttgacacccatgcccattatgccagccgccagtttgacggcgaccgtgccgacctgctggccgcgctgccccggggcggcgtggtgggtgtgctggaatgtgctacccactccggcgacgcccaaaaggtgctggaactggcgcacaccgcgccttacttccacgccgcgctgggcatccacccggaaagcctcatcgaggaggacgccgccaccgtggccgtctaccacggcgattggcgcgccgagcttgccgccatgcgtccgctgtatgaggaccccgccgttgtcgcggtaggggagatcggcctcgaccaccactggcccgtgccccgcgaggagcagtacgctctgtttgaggcccagctgcagctggccagggagctggacctgcccgtgtcggtccacgaccgggaagcccatgccgaaatgtatgatctgctgcgcaaatataagccccgcggtgccctgcactgctacagtggcagcgccgatgacgccgcctggctggtggagcagggcatgtatctgggctttggcggtgccgtgacctacaaaggcgccaaacgtgccgccaaagtgctggccgccatcccccatgaccgcgccttgctggagaccgactgcccctacatggcgccggagccggtgcgcggcacccgcaacgacagccgcaacattgcccacgtggccgcctacatcggtacgatctgggacgtggacgcccaggccgtgctggaccagaccgccgaaaatgcccggcgctgtttcgggctgtaaattcgcctgaatatacaaaacgtatattttttataaaaatcacaggagtgtatcattatgaaagcacgtatccccaaacaccgcgaattcatcatcgatttcccccagagcatggaccaggccaaggctgacgagggctgggcaaagctgaacgagatcgtggaagagtacaagaaggcccacaacggccagagcgtctactccgccaccttcatcgaggactgcgagcctgccgtgaagaagctgcaggaagagtacggcttcaactacaccatccaggaaatcaaatgagaaagcggcggacaagtgcgtccgccgttttgttttagcgttaaggcaataccgcataattctaagtgccgatacggcgagcgaggtgcggcaactgctaagccaaaagcgcagataatactggatgtcttatcgagcattttggcaacgcagatgccgtgccgtagccgccggagcggtgcttgagccgttaggcgggaattgtgcggtggtgccttatataggattgggggaataagcatgcccaagatcacgatccgcccggccggggaaggggacatcccggccgtcgtggcactgtaccgccagctggatcaggcgctggtcgacctgcagccggagtttttctgcgttgccccgcgggaggatgagtttgtccgccaggccgtcaaggccgcggatgccgactatctgctggcggaggaggacggcgcggtggtcggttttgcgctggtgaattatgcgggttggacgccggagttcagctgtgtgctgccccaccgctacgcctgcctggcggacctggtggtagacgaagcccaccgccagcagggcattggcagtaccttgttgggcgccgccaagcgctgggcgcgggatcgccggctggaatacctggagttaagcgtcctgtcccagaacgcccccgccatcgccctgtacgaatcccacgacttcgtagaggcgacacgggttatgcggtgtatgctgtaaaacaataagtgtcaacctacatctttgcaaaccaaaatagaatcacaaaccaaaagccggggcgaacatttctgttcgccccggcggtcttacttcttcggagtcatagcctcataacccttactcgttatttttcggactgtacccttgttttcataaggatcatcctaactttacgatattgctaaccctttcagggatctcaatttacctgttcattggtcttaccctctgatagttaagatcgatgtgggtatcggggtctgatgctgaggactgcgcctcttaactctagtacattggagtgtctccttgtggatcagatgaaattcaggttcttcctgttcggcggagtggtgacggtcatcgctaccgaccttctttcatcttaatctatattacacgccagggtctgtcttgacggcccctgggcttgctgaatctgatttatgaaccaaccatctgaatttttcaatcttttacaggttacgacctgcggctttcaatgtggttctcttcgtttcagcaggcccaggcccgccggtgatgaatgggatctttaaagtttgccatcgggtccagagcctcctttcatccgaaatc

SEQ ID NO: 8029 - DNA, 456 bp, Unknown
  gut microbiota DNA sequence
tcatctgaattcttcaatcttttacaggttacgacctgcggctttcaatgtggttctcttcgtttcagcaggcccaagcccgccggtgatgaatgggatctttaaagtttgccatcgggtccagagcctcctttcatccgaaatcctgccggcggcctttacaatttcttccttgttcttcccgctgccctcgtgctgctggatcggagtccttaaagtgctccttcttcacgtttccgcttcgggagatctgctttaagatgtcggtctgttcacgatcggtcttttatggggaagtgttaagaaagtggcttcgcttggagttcttatctccttatctccggctgttttctttctgtgactatactatagcacacacttagaaattcgtctattcgcagagcagacaatcctgcgatgaattatttgtgcatgttaaggattgataagtgcatg

SEQ ID NO: 8030 - DNA, 1092 bp, Unknown
  gut microbiota DNA sequence
cccttgcgcatcatgaccatcataacggtctgggtggcatcgccggggccgccgctggtcatcgagtagatgacatcgaatgccttcatgccgccgatcaaaccggtgaccgccacaatcttgaccgaggggcacatcagcggcagggtgatacggaaaaagcgggtgaagccgctggcaccgtcgatctctgctgcctcgtacaaatcgcccgagatgctctgcaggttggcaaggaagatgaccatagcccagccggtccactgccaaatctgcgtgagcaggacagagtaaagtgcgttttgcgaggtgaaaaagttgaaagtcggcagccccaccttagccagcaggttgttgataaggccgtagttggaggaggaaaggataaagttccacaggtagccgatgatcaacgaggagaataccgccgggaaaaagaaggtcgcgcgcagcagattgcgggtgcgcagcttcatattcaggatgacagccagcggcagacccagcacgacctgcgccccggtcagcaccacggcgtaaatcagcgagtttttaatagctgtgcgcatcagcggggaaccaaggacttttatgtagtttgcaagacccgtaaagtgcagatttacggggttcatatcggtataatcggtaaagctgtaatagatcgtaaacaggaacggcacaatgctgaacaccagatacacgatcagcgccggtgccacaaacatggcgaagtatttgcccaacgaaccgggcacatacttcttttgggtcttagtaggcatttctgacctccgttttttgaaaaaaagagcctcaaaccctcgattgaaagtttgaggccatggttacggatcggattacttgctcagcagctcagcaacggcggcatcgacgttagagagcgcagtggagaggtcttcctcacccagcaggtacttctgcatctcggtgccgtaatcctcgtgggcaccagcagcagcgccccactcgttccaagggcagtagacattgccggcgttgatggcagtggaaacactggagtagacctcaggcagatcaaaggaaacgccactcatgtaggaggagcca

SEQ ID NO: 8031 - DNA, 148 bp, Unknown
  gut microbiota DNA sequence
ctttgagtttcaaccttgcggtcgtactccccaggtggattacttattgtgttaactgcggcactgagggggtcaatcccccaacacctagtaatcatcgtttacggcatggactaccagggtatctaatcctgtttgctacccatgc

SEQ ID NO: 8032 - DNA, 216 bp, Unknown
  gut microbiota DNA sequence
agaaaaggagaactgaaatgcagtatgattatctgatcgttggtgccggtctgttcggcgccgtctttgcccacgaggccaccgccgccggcaaaaagtgcctggtcattgataagcgcagccacatcgccggcaacatctacacagaggatgtgcagggcatcgccgtccaccgctacggtgcgcacatcttccataccaacaataaagaggtgt

SEQ ID NO: 8033 - DNA, 150 bp, Unknown
  gut microbiota DNA sequence
cgtgaggaacctgcctcaaagagggggacaacagttggaaacgactgctaataccgcataagcccacgacccggcatcgggtagagggaaaaggagcaatccgctttgagatggcctcgcgtccgattagctagttggtgaggtaacggc

SEQ ID NO: 8034 - DNA, 118 bp, Unknown
  gut microbiota DNA sequence
agcgagagagagcttgctttctcgagcgagtggcgaacgggtgagtaacgcgtgaggaacctgcctcaaagagggggacaacagttggaaacgactgctaataccgcataagcccacg

SEQ ID NO: 8035 - DNA, 571 bp, Unknown
  gut microbiota DNA sequence
cccccccccgtaagaaatctgcggcatgtgctgcgcgggggtactgctgatgggtgtggcaccgaggattccgggcgggggcggaaagtttaagaaagcctttgagaaccttgccgatgccgagaaggtcctgctttggacaaataacaaccatacatctgaatggggcagcggaacagccgatactggcacccagctttatgccgcttattgtattgccgtcaaagcatacacgtctgtttccccgcagtatgtaatgaaaaatatcgtagtgcgcgatgcaagatgttgcgtaaccgcaaatgacagaagcattaaccgtatggtgacatttgacggcgcaaacatcacgatcggaacgcctttctccggtgacacatcacactgggaaagtaccatcccgtatcagattttcggtatcaaaggcactgaaattaaataacattttcgcaaaatgaagaaagggtgattttatgggtacatcccctaggattccgggcggtaaaaaattgcagctgcttacgaccgttacatttacacctattaacggcagcagtaccgccacaagctc

SEQ ID NO: 8036 - DNA, 5939 bp, Unknown
  gut microbiota DNA sequence
ctttcgagtcaatctcgttacgaccacttcgatacgtctgcttatttggttttactgcatgctacatgggcaatatggtttgcgccttattacatcttacacacaaccacatagcgcattatagtataccaaacttatccccttttgtcaatcagaacagccgctgcttctgcgtcggggtggggtcaaagggggaatcctcgtggtggcggcggatgaagacctggcgggtcttttcggtgatggaccggccgttgtgcttgggcaccgtgtagaacgtgcggctgatgttatagtatccccgcaggtgctgcaccaaaaactgcgccacagcgggcaggcagtcggtgtcgtcgatgtcctcataattatagtcgccgtaaaaaaaggtcacttcatcgctgccggcgtggagagtaatgcctttttcatccagcactacctcgctgatgacgctttgcagcaacccggcggtgccgttttcggcggccagtttggcggcgcgggggcgctgctccagcgggacactctggggatccagcttctcggtgccgcgctggcccacttccagcaggatgtcccgcatcatacggctttccagcaggggcttgatgcgctccttggcgcgtgcctgttctgttttattttgaatggtagaaatcaaacccatgccgctgcggcctcctaaaccaatttcgatacatagttagtatatcatataatacgactaactgccaactttttttgcgcccggcgccgaaatttgccattttaccgggtagcgtatataatacatgtagaataatacccacaaaaaccaaaaatcgaggcagttatgacagcgcaggaagcattaaaaacctatttcggctacgattcattccgtccggggcaggacaccgtggtgtcggcccttttgtccgggcgggacgcgctggccatcatgcccacgggcgcgggcaagtcgctgtgctaccagatcccggcgctgctgctgccggggctgacgctggtgatctcgccgctgatctcgctgatgcaggaccaggtcaaggggctgagcgcggcgggcatcccggcggcatacatcaactcggccctgaccgaaaaccaaatcgctaaggcgttgcagctggcagcccaaggcagctacaagatcatctacgtcgcgccggagcggctggaaagccccaccttccaaagctttgccgcgtcggccgaaatttccatgctgacggtggacgaggcccactgcatcagccagtgggggcaggatttccgccccagctacctgcgcatcctggacttcatcgacagcctgccccggcggcccatcgtcagtgcgtttacggccacagccacccgcgaggtcaaggacgacatcgcccaaacgctgcgtctgcgcgacccggagattgtcattaccgggtttgaccgccccaacctctactaccgggtcgagaccacccgccgcaaggacgcctttgtggcggactatgtgcgcagccaccccggcgagagcggcatcatctactgcgccacccgcaaaaacgtcgatgccgtgcaggaaatgctgcggagcgaggacattcccgccgcccgctaccacgcgggcatgaccaacgaggaacgccgccagagccagaacgacttcatctacgataccgcgccggtcattgtggccaccaacgccttcggtatgggcatcgacaaatccaacgtgcggtacgtcatccattacaacatgccccaaagcatggagaactactaccaggaggcaggccgtgccgggcgcgacgggctgccgtcccagtgcattttgctgttctcgccccaggacatcgtcatcaaccgctttctgctggaccacaaggagaatgacgacctggacgacgaagccgccgacctgctgcgggcgcgggataaccagcgcctgcaggccatgaccaactactgccagaccaccggctgcctgcgtaactacatcctgcgctattttggcgaggaacccgccgaaccctgcggcagctgcggcaactgcgaccgcgagtttgaggaggtggacatgactgcccaggccaagtggatgatcaactgcgtagccgagacccgcggccgctatggcaagggtgtggtgctgaacaccctgcgcggcgccaacatggcccgcctgcgggagctgggcgcgatgaattaccgcagttacggccagctgaaggactgcacgcgggacgaactggactgtctgctggcccagctgttggaggagggctacctcgtccagaccgacgaccagtacgccgtgctgcacatgggcaacattacgccgctgaaacagggggcgcaggtggtggtcaagctgccgcccaagccggaacccgccgaagcagcgcctaaaaagcacaaggccggcaaggcggcgcagaagggcaaagccgccctggccggcgacagcgccgatctgttcgagcagctgcgcgccctgcgcatgcggctggcccaggccgaaaagctgccgccctacctggtgtttggcgacaagaccctggtggacatgtgcgccaaagcgcctcgccagctggaggatatgaaagagatctacggcatgggtgagcgcaagtttgccaagtacggcaagcaattctttgctgccatcgaggattaccgccgcgagcacccagaggcggagtttacgggcgcctgacaaaacttaattaaaagaaaaactgcctgctgcatagtgcggcaggcggttggtgtttatgcgggatgttagaagatgctccccgccagcacagcggcaccggctgcgggcagggcgatgatgaagtagaggaccgtaccggcggtgcgcttgatgaggacggatttcagcggcttgatgtaggggatgccctccatgccggggatggcccattctttgccgtgggcgacccacaccaggtccatgcagatgccgtcgaaccagttcatcacgacgaggaacagcaccgcctgccagtaggctgctgtaaaggtggtcacgcggttccacaccgcaatgataagcaccagcaccaccagcatgatgatgcagaacggcaccatgaaccgcttgccgcgtttcatcgtttcgtccttgtcagccaggccgcgcctggcggcttcgtcgataaaagccggcgggtaaaaatacaggcagttcatgccgttgtccttcacggctgccttgaccatcaggaaaaacagcagacagtacaaaatcagctggattataagcaacattttcgggggctcctctcgcaatcggtttgcattagctaaccaaagtatactacacccccgtccgaaagacaagcgcacggattttgcggtggttgtagaactgtttccagggggtatatatactgtaaaactagagaaacaccccggtgtttgtaggtgtccgcaactgtttttacagttttacaaacagttaaatataacttagatatgtattttatataactgtttatctagttattgagttttaataaagggggtggctgttttgcccaaaaccgccgccgcaaaaaagatgcgccctgccaggcggcagagcgcaagaaaatgcggtttactaactgtaggggcggatgcaagtatcgccccatgcaaaaacggcaattacttataaccgatattactcgtacagcgggaacttcttcaccagctcggctacgcgggcggcgacttcgtccttcttgccctcgaaatcgaagatgcaatccgcgatgcaatccgcgatgatcttcatctctgcggggcccatgccgcgggtggtcacggcgggggtgcccacgcgcacgccgctggtcacaaacgggctgcgcttctcgccgggcacggtgttcttgttggcggtgatgtgcacctcatccaggttatgctccagctccttgccggtgcaatccacgtcggtcaggtcgatcagcagcaggtggttgtcggtgccgccggaaaccagcttcacgccgcgggcggtcagctcgtcggccatggccttggcgttctccacgatcttggcggcgtactccttgaactcaggcttcagggcctcgccaaagcagacagccttgccggcgatgacatgctccagcgggccgccctgggtgccggggaagatggcggagttgatgcgcttgatgaggtactcgttgttggtcaaaatcaaaccgccgcgggggccgcgcagggtcttgtgggtggtggtggtcaccacgtcagcgtagggcacggggttctggtgctggccgccggccaccagaccggcaatgtgggccatatccaccatcagcatggcgccgtagccgtgggcgatctcggccagcttctcaaaatcgatggcgcggggataggccgaagcaccggccacgatgagcttggggcgcaccttggccacctgtttggccagggcggcgtagtcgatgcggccatcctcagtggagacgccgtaggagacaaagttgtagtttttgccgctcatgttcacgggggagccatgggtcaggtggccgccctgggacaggtccatgcccatgacggtatcgcccaggttcagcagcgcaaagtagacggccaggttggcctgtgcgccggagtggggctgcacgttggcgtacttggcaccaaacagcttgcaggcgcggtcgatggcgatctgctccacctcatccacaaactggcagccgccgtagtagcggtggccggggtagccctcggcatacttgttggtcagcacactgcccatagctgccatcacggcgggggaaacaatgttttcgctggcaatcagctcaatgttctggcgctgacggcccagctcgcggtccatggcctcgcccagttcggggtcagcctgctttacatagccaatggtatcgatcatgtccttatacataccctttacctcctgtttttcgggcggtcgcttgcgggcggtgctgccctttccctctctataatgaacagaccttacagcgtgcccttggtggaaagcaccccatcgatccgtgcatccttgcgtgtggcggcgtccagcgccttggcaaacgccttgaacatagcctccagcttgtggtggtcgttctcaccgtacagtacctttaaatgcaggttcatcatggctgcatagctgatggcatagaaaaactcccgcgccatctgcacatccatgccgccgcagctctgcccggcaaagctggcatcatacacaaagtaagggcggccgcccaggtccacagcgcacagtgccagcgtctcatccatgggcagcaggcagctgccatagcgcaccagcccggccttgtcgcccagggcttccttgatggcggtgcccagggcaatgcccacatcctcaatggtgtggtggcagtcgacctccagatcgccgcggcactgcacaatcagatcaaacaggccgtggcgggcaaacccgtccagcatgtggtcaaaaaagccgatgccggtgtgcaggtcggctttgccggtgccgtccaggtcgatggtcagggtgatttgagtctcccgcgtgttgcgggtcacagttgcggtgcgtgccataacgttacctctttactcaactaaagtgtaagatactatttactataacacgtcaagtcccctgcgtcaacggtgcagggccgtttttggctttggattcttttgcattgctggctaaaatcaaaaggaacgcagggaagcctccctctgggagggagagagcctttccgaagtctctcccccacccgctttgcgggattgcttacgcaaccggcccctctgtcgctgcgcgacatctccccacaccgtgggaagtcacccttgcagagggggctaaaatccaggcacaattttagggcaataccgcataattctaagtgccgatacggcgagcgaggtgcggcagatgctaagccaaa

SEQ ID NO: 8037 - DNA, 2420 bp, Unknown
  gut microbiota DNA sequence
cccacagtgcgcgaacacgtttgtagccatgccgcggacatttgagggaacaaaaaaaccgatggaggttgcggctgcacaaacaccatcgtttataaccggaatcttaataattataagatatatgccagggtttgtcaatcggcagggcatgtacaaaatgtgaaagaaatttcaaaatttccctgccagtttttacgattgtgcctttttaccttattataaatatagtaagttttgccaagatttcacccagccactttgcagcgcccatttttgtgctataataagatgttaaattgtgtggaattggcgattggacggctgctcttttctgtaggggccgatgcttgcatcggcccgccgggccacgcaaacatttgtaggggcgagcattgctcgcccgcagaaaggcggtgcgaatatgatacagcttaccctattgggcacgggcggcacacaacccctgccggaccgggcgctggcgtccctggctgtgacggtgcaaggccataccctgctgctggattgcggcgagggcacccaggtcagcctgcggaaatacggcgtgagctcctaccgcatcgatgccgtactgctgacccattaccacggcgaccacattttgggcctgccgggcctgctgcaaacactggccagcctgaaccgcaccgcaccgctgacgatctacggcccgccggggcaggagagtattgcggcggccatcatggccttagccgggccgctgccctaccctgtcgcgtggaagatcgccgagggcacatgcaaagaagcaggcctgacggtcacgccgttccccctcaagcaccgcgtgccctgctgcggctaccggctgcaccttccccgggccgggcggttcgacgccgcacgggccaaggccgcgggtatcccgctggaatactggcgggtgctgcaggccgggcagagcatcggcggctttgcgccgggcgacgtattaggcccgccccgccgggggctgaccgtggtgtacgccaccgatacccgcccctgccccgccgtgctggaagctgcccggggcgcggacctgctgtgcatggactcgacctacgccgacgacaccgacctgcccaaggcgaaactctacggccacgctacctgccgggagaccggtgcgctggccgccgaagccaaggtccgccgcctgtggctgacccactacagcgccgccgtcaccgaccctgcccccggcctggccgccgcccggacccaataccccgaggcagcagccgggtatgacggtctgcaattggaactggaatttgacgaggggtaatatgggcaaatacaaaaaggaactgctgttcaccctcgccgtgctggcagcggccgccgggctttggctggccactcatgccgggcgcggcaccggcaatgttgccgtggtgcgctacggcgacccccaggtggagcagcgcatcgacttatcccaaaacgccgattacgacatcgataccggcacctacaccgtccacctgcatgtggaaaacggcggcatcgcctttgtgaacagcccctgccccgaccacctgtgcgaggggttcggcattttgcaaaacgccggtgactgggcggcctgcatgcccgcccgcaccagcatcaccatagaagaaaaataaggagcgtttatgaatcctacttttaaacaggtcaccaagacccgctacgtccaactggtcgccgagctggcccaggaaatttttgtgcagcactacaccaagctgacccccaaggtcgccgccgccctggccgataagtaccagagcgacatcctgaccgatgacgagatccacagcggcgtcatcaactattttctcatctacctgggcaccgagccggtgggctactttgccctggacctgggccccgccggcgccatgtgcctgagccgcctgtttataaaagagaaagcccgcggacagggcatcggccgcagcattgtagcctacgcccaaaagctggccgagggcgacggtcgcagccgcctgtacctgcgcatctgggcccgtgacctgaaagccgagggcttcgccaaaaaatgccgcttccgcaaggccgagaccgtgccgatggaggttttgccgggcacgacgctggatattaccacttgggagaagttgtggcgctaacgcgctcaaagaaggggttcgtcgcttgtggctgcgccacgctcctgccgcttggcggccaaaacaatggccgccagccagcagagctggcaccgctcgttcggttgcaagccccactggggcttgcatcgctgacgcgaccccgaacccctcctttggattcaccccgtcgcaaaaaagcacattttcgcgcctaacgacacaaaaatgcacttttttgctctagggcaataccgcataattctaagtgcc

SEQ ID NO: 8038 - DNA, 3301 bp, Unknown
  gut microbiota DNA sequence
aacacattttgtcctgccttgcgttacaataaaatcagatttcaaccttttaaggaagggacaacacaaccatggcaaaaatgatcgggatcgatctgggcactaccaacagctgcgccgcggtcatcgagggcggtaaaccggtggtgatccccaatgccgagggccagcgcaccacgccgtcggtggtggcattcaccaaagcgggcgagcgcctggtgggcgaacccgccaagcgccaggccgtcaccaacgcgccgcgcaccgtcaccagcatcaagcgccagatgggcagtgacagccgcgtgcccattgacggcaagtgctattctccccaggagatcagcgccctgatcctgcaaaaactcaaagcggacgccgaggcctatcttggcgagccggtcacccaggccgtcatcacggtgccggcctactttaacgatgcccagcgccaggccaccaaggatgccggacgcatcgccgggctggaagtcaagcgcatcatcaacgagccgaccgccgcggccctggcctacggcctggacaacggcaaggcccagaccgtcatggtctacgacctgggcggcggcacttttgacgtatccctgatccaaatcggcgatggcatcgtgcaggtgctttccacctgcggcgataactacctcggcggcgacgacttcgatgcccgcatcgtaaattggctggcggacaacttcaaggctgcccacggtgtggatctgaccaccgaccgcgtggccatgcagcgcctgcgggaggaagccgaaaaggcgaagaaagagctttccaccgccacccagaccgagctgaacctgccgttcatcaccaccgggccggagggcgcactgcacctgcaggccaccctgacccgcgccaagtttgaggagctgtgcgccgacctcatcgagcggacctccctgcccgtgcgcaacgccctgagcgacgcccacctgaccgccagcgacctggaccaggtgctgctggtgggcggctctacccgcatcccggccgtgcaggccaaagttatgcggatgaccgggctggaaccgtccaaatccctgaaccccgacgagtgcgtggccctgggcgccgccgtgcaggcaggccgcctgggcggcgaggcgctgaccggcgcaggcgaggatctgctgctgatggacgtgaccccgctgaccctctccatcgagacgctgggcggcgtagctacgcacttgattgagcgcaacgccaccattcccacccgcttcagcaaggtgttcaccacggccgcgccgttccagagcaccgtagaaatcaaagtattgcagggcgagcgggagtttgccaaggacaataagctgctgggtaccttcacgctgcggggcatcaagcgtgcctgggcgggcgtgcccaaaatcgaggtgacctttgaccttgacgccaacggcatcgtcaaggtcagcgcccgcgacatggacaccggcaaggagcagggcattacgatcaccggttcctcgaacctgagcgaggacgagatccagaaagccatgcgcaacgccgccgcttttgcgggccaggaccaggaacgcaaggctgcgctggaagcctttaatgcggcggaagctgcgctgtatcgcgtaaataccgccctaggcagcaaggcgggcaaggccctggaccgggatacccgcagcaaaatcaaggacgccgtgcgcgcactggaaaaggaactgcgccataaaaaggccgacaagctcaccaccgctgacgtccaatccctcaacgccgcccgcgaagccctctccgcgattgccacgccgctggtgacccagtgggagagcgagaaaggctgaacgaagattttgttccttctttgaaaagaaggaaccgaagaaactttaaatataaataacaaaaatatgatccaactttgtttcggcgattccgtcaaaggcacactcacctgcgccccgcatatcggcaatacgatcggcggcgccacagcggtggtaatttcaacggataaaccgctggataccccgctgcaaaaggccgcctttgccgtctaccgcaccctggccgcacctttttataaacgccgcgcccaaaagcaggaggcccgccgccgtgccgaggccgtccctgtggactatgaatctaacgacgtgatagccctgctgggcgacctgaacgaaggccccatcgcgggcgacctgatgagtgaagcacgcaaagaggtcgtgcgggcatggctctgcttctccccgcacggcgacacagccggaacggatgccgacgtggagccgtactggcaggcctgccaaaaagacctgcaaaccctgctgacccgcgcccacacaggcgagccggtgcgtatctggtacgaccacacccctgccagcctctgcggcctgcacgcctctgcggccctgctggaagatgccccctgccaaatcacggtggtagaaaccccggagcttgagacaaaaaacggcgtgacccgccgtgccgccctgtgtgagcgtggccccaccgagatgggcgcactgttacagtacgagcgtcccctgccagacaccgaccgccacgcccttgccgcccgctggcgcagcctgcaagcggaaaatgccccgcttcgcgccgagcaaaaccaccgcttgaccagcgtccccgctggtttctacgatgccatgattttaagcgaagctcctgcgaatgaaattatggtggcacaactcatcggaaaagtgctggcagaatgccgcctgggcatcagcgaccagctcatctaccgccgcatcgaacacctgaaacgatccggcaaattcctctccgtccaacccagccccgccccctaccaggaaatcatccgcagggcgtaacttaccgccaattttttacacaaatacaaaagctccctgctctttagcggggcgttcgtaagacagttaacggagcgtatcggtgcagattcgctccgtttctttatgctaatatgacatatggcacagttgccggcagcccccttggctctccctctgggagagctgtcaccgaaggtgactgagagggtcttacaggcgtttttgaatggtgatatcaatttgtgtgcacacgccgcaaaaatccatatcaacatctcggttggaaaaacgcagaacctccaatccaagcgctgtcaaaaatgcggaacgctcagaatcataggccatcccctgaggctcatagtgttgagaaccatccaattcaataactaacttggcagaagcacaataaaagtctacgataaatctcccgatgattc

SEQ ID NO: 8039 - DNA, 7110 bp, Unknown
  gut microbiota DNA sequence
acggttttcaaattttgcacctactaccttggagacttacccatgaaatttctgcatctggccgatctgcacctgggcaaacgggtcaacggattcgaccttctggaagatcagcgctacatcctggaacaaattttagcgctgtgtgacagcaataaggtggacgccgtggtgctggcgggcgatatttacgacgcccccgtgccccccgccgccgcctgcaccctgctggactggttcctgacccagctggccgcccggcgcatcgccgtgctggccgtgtccggcaaccatgacagcgccgagcggctggactacgccgccgggctgctggccaaccagaacgtatacatcgccgggcagttccggggcgcaccgcggcaaatcgtcctcaacgaccgcttcggccccgtggagttcacgctgctgcccttcgtgcgcgccgctaccgtgcgccattacatgcccgaggccgacctgcctgattacgacagcgccgtcgccgccgccctgtccgcctgtgcgcccagcgccgaacgccgcgtgctggtggcccatcagatggtagtggccgggctttgcccgccccagctttccggcagcgagaccgcgcccctcaccgttggcaccgtggattccgtcgatgctgcgcactttgctgggttcagctataccgcgttgggccacatccaccgcgcccagcgggtgggcagcgacaccgtgcgctacgccggtgcgccgctgtgctaccatctggacgagtgcggcatggagaaatccgccacgctggtccgcctgggccgccggggcgtggacggcatcgacacgctgcccctgcacccccgccgcgccatgcggcatatcgtcggcccgctggccaaactggtggagcatcccgccgacaccggcgattacatctgggccaccctgaccgaccccacgccccagcccgacgccatggccatgctgcgcgccgcctaccccaacgccatgcggctggactaccgcccccaggggaccgagattttgcccgccgacactgcgcaatcggtgcggggcaagccctttgcctcgctgtttgaggactttttcacccagatgaacggccgcccgctgaccgtggaggaagcccgtgccgtgaaagccctgcgagaggaggcctccaaatgaaacccctgcacctgaccctgaacgcctttggcccctacgccgggcgcaccgacctggacctgtcggtctttggcggcagcggcctgtttctgatcggcggcgacaccggcgcgggcaagaccgccctgtttgacgccatcacctttgccctgtacggcgagaccaccggcgagaaccgcaaaaccacgatgctgcgcagtgattttgctgtgcccgaagccgaaacctacgtggagctgacctttacccaccggggccgcagctacaccgtgcgccgctggccggaccagcagcgggccgccaagcgtggcagcggctttgtgaaaagccccgccaaggcggaactcatccgtgagccagacgagccggtgagcggtgcctccgccgtgaccgccgccatcaccaagctgctgggcattgacgccaggcagtttgcccaggtgtccatgctggcgcagaacgactttaccaggctgctcaatgcgccatccgccgaccgcgccgccattctacgccagatttttgacactgccgaccaccagcgtttaggccaggccgccgtgcagcatgcccgcgaagccgaggatgcctgccgccgcctggatgacaccctgcttatgcagatcggcagcctgatgggcagcggcgccgacgaggacaccgccagccagctggaaaaattgcaggccgaccgcgacccctacgccgccggtgcggccgccgatctgggcaagagcctgctggaatttgacgaggccaacgagaagcgccagcagaacatcgtgaacgacctggacgagaagattgcccggggcgacgccggtgtaaaaattgccgaggaacgcgctgcccgccgccagaagctggccgggctgatcgaagaagaaaagcgcgccgccgaggtggagcgccagatcaacgccatgctggccgagctgcagacccgcagcgacgcgctgaaaaagaccatcgccgacaccgaggccacccgcgccgccctgggccagagcgacgccgagcagctgaagatcgagcaccgtatcgagctggccgagggtctgaccgccacctgcgccaccctgctgcaggatctggacaaagccaaagctgccaaggccgacgccgaagaaaagcagcatgcctacgccgaagcccaggctgctttggatgagttggagaccgcccacatcgccatgcagcgccagctgaacgccaaccgcgcgggcctgctggcccaagagctggtggacggccagccctgcccggtgtgcggtgcagtgcatcacccgcaccccgccgccctgccccaggaccacgtaaccgaaaaagcgctggaggaccacgaaaagaccctgaccgcccagcgccgcaaaaccgccgacgccagccgcgccgccggtgacgctgccgcccatgcggcggagctgcgggccaccctgctgcgggaggccgatgcctttttttcccgccggggcgcccggtatgagggcaagcccgccgccgaactgacccccgacgaactgcgggacaccctgctggcccagcagaagagcctggccgacggcctggccggattgcaggccgaccacaaaaagttcaagcagcaggccgacaaggcccgcgccctggcggaccagctggacaacctgaaccgccagctggcgggcctggaaaagcaggcctttgccgccacccgcaagagcgccaacgccaaggcgggccacgccgctgccgccgcccgcgtgcagcagatgcaggagacgatgcccaagcgggaggaccccgacaccctgcccaagctgcaggccgcgctctcccgcctgcgggcggaccgtgccaccgccatggctgcccgggacgccgccgtgcaccgcctgcacaccaaccgcgccgcgctggccgggctggacaagacgatgcgtcagagcgctgccgcccgggacaagcgcgccatgtgggacaacctttccaaaaccatcaacggcaatctggccggcaaggtcaagctgccttttgaacagtacgtacaggcgttctattttgacggtgttgtcgaggccgccaacctgcgctttacccgcatgaccgacggccagtaccgcctgctgcgccgcaaaagcgaggccgtgggcggcaagaccgccctggacctggacgtgttcgacgcttacactggcaagacccgccccgtgggcagcctgtccggcggcgaaagctttatggccgccctctgcctggcgctgggcatcagcgataccatccagcagaacgcgggcggcgtgaccattgaaacgctgtttatcgacgagggcttcggctcgctggacgccgacgcgctggagaaagccgtggatacgctggccgggctggcgggcggtgacaagctgatcggtgtcatctcccatgtggaagccttacaggaccgcctgacccgccaggtgcgcgtgaccaagacccgcgccggcagcaaggccgagatcgtggtggagtgagatggcagattcgattttacagcaccagctggaaaagctggcggcggaccgctaccccctgcacatgccggggcataagcgccacctggcccccgcccccggcctgagctgctatgcctgggacatgaccgagatcgacggggccgacgacctgcacgaggccgacggcattttagccgacgccatggcccgcacagccgcgctgtacggtgcctgccggtgctggtatctggtgggcggcagcaccgtgggcctgctggcgggtatccgcgcgctggcccccttcggcagcgaggtcatcgcggcccgcaactgccacaaggccgtgtaccatgccatcgagctggggcgcctgactgcccactatctgcccccgccggtggataccgcctttggcgtgtacggcagtgtgccgcccgccgcggtggaagcggcgctgaccgcccatccgcaggcaaaatgcgtaattttgaccagcccgacttacgagggcgttttgagcgatattgcgtccattgccgccatttgtcacgcccacaatgtgccgcttttggtggacgaagcccacggggcacactacctgccctttgccgcccggtacggctggcagggcggcgcggtagccgccggagcagatttggtggtgcagagcgcccacaaaaccctgcccagtctgacccagacggcctttttgcagctgaacggcggcctggccgaccccgacgaggtggagcggcagctggatgtgtttgagacaagctcccccagctacccgctgctggtcagcctggacggctgcaccgactggctggccgccgacggccccgccgcctttgcccgctggcgggaccggctggagcggttttctgccgccgtggccgatctgcacaatataaaagtcatgtgctttgggcaggatgcgctggctgaccacccggatttttttgcccatgacagcggcaaaattttgctgcagatcggggccgagggcgcggcgtttttgcgggccggcggctttgagccggagatggtctgcggcccgaacgtgctggccatgaccagcccctgcgacaacacccacgcgctggaccgcctggccgaggtgctgcaccactgggatgattctccatcccggatcgcccctgcgccccccgcgcacctgctgcccgccccgggaaacgccacgtgtacaattgccgaagccctgctgcggcctgcgcggcaaattccaatgacgatggctgatgcctgcggggagacggcggcggagtatatctgggcctaccccccgggtgtgccgctggtagccccgggcgagacgattaccccggagtttttggcgtcctgccgcgagttggaggctgccgggacgaggttacaccacagcagatgcaaagatgcaacgtgcattgctgttctgtaggggtcgatgcgagcatccgcccctacaatgctactgtaaccatccaccattttacccttgacaatccatccattcccgtgtacaataaatataattctaaaatgtataaaggggtgactgttttatgaagcacatccagactctcgagacccgcgacatggctaagagcctgctgaacggcggctgcggcgaatgccagacttcctgccagagcgcttgcaagaccagctgcggcattgccaaccagccttgcgagaagaccgacaagtaattgtattgctggctttgatgccggggtgccagatatggcagcccggcattttctatgtacagtgcggccgaaaaacgatgcacggtgcaggcattttatagtaccccttttcccgtacttttccctcacctcccccatcccttattctcgaccgcttttctatacactctcgctattcgattgaaaaatcttttggttacttttcttataagaaaagtaacataacttaaaggagcagacaatgattcatcagtataaactcagcggctacaacattgttttggacgtgtacagcggcagcgtgcacgccgtagacgatgttgcctacgatgccatcgccctgatcgaccaggggttgacccgcgaagccgccaccgcccagctggagcagaaataccgtgaccgcgccgacgtcacccccgccgacatcagcgattgctttgacgacattgaggagctgaccgccgccgggcagctgtttgcccccgacgcctacgccgaccatgcgttcgacttcaagaaccgctccaacgtcgtcaaggcgctgtgcctgcatgtggcccacacctgcaacctgaactgcagttattgcttcgccgcccagggcaagttccacggcgaggctggcctgatgagctttgagaccggcaaacgtgcgctggatttcctgatcgagcacagcggcacccgccgcaacctggaagtcgacttcttcggcggcgaaccgctgatgaactttgaggtgtgcaagcagctggtcgcctatgcccgcagcatcgagaaagagcacaacaaaaacttccgcttcaccatgaccaccaacggcatcggcatcaccgatgaggtcatcgactggtgcaacaaggaatgtcacaacgtggtgctgtctctggacggccgcaaggaagtcaacgatcggttccgcgtggacctggccggcaacggcagctacgaccgcatcgtgcccaagttccaaaaactggtcaaggcacgcggcggccagggctactatatgcgcggcacctttacgcatcacaacgttgattttaccaaggacctgttccacatggccgacgacctcggctttaccgagctgtccatggagccggtcgtagccgcgccggattcccccgaggccctgaccgaggaggatctgcccaagctgtttgaccagtacgaactgctggccaacgacatgctgcgccgccagaaggccggcaagcccatcacgttctaccattatatcctggacctgaagcacggcccctgcatctacaagcgcatttccggctgcggttccggcaccgagtacatggccgtgaccccctggggcgacctgtacccctgccaccagttcgtgggcgaccccaactacaaactgggcaacgtgtgggacggcgtgaccaacaccgcactgcgggatgagttcaagctgtgcaacgtgtatgcccgcccggattgcaaggattgctgggcccgcctgtactgcgcaggcggctgcgcggccaacgccctgcacgccaccggcgacatccacggcacctatgagtacggatgcaaagtgttccgcaagcgcatggagtgcgccctgatgatgcaggtcgcccagcgcctggaccccgaacttgccaagaacgccgtgaaatttgagagcgactgcgacggctgcggtgagggaaatgacggggcctgcgagaagtaatgtcgctttcttgaaagaaagcgacgcaaagaactttaaataaaatcacaca

SEQ ID NO: 8040 - DNA, 360 bp, Unknown
  gut microbiota DNA sequence
gatggacccgacacctaccaccggtgtgggcgagtacctcatcgacggtaccagcgcctacgagaccatctgggcgcagcccaagccgggcagcgataagatgcagcttctctcctacgagaagcggggcggcaaggcctatctggaagtggaaaatgacggcgaggccgccgacatctcggtgcctattttcaactacggccactaccatgccgtggacgaagctaccggcgaggaataccccctcagcaccggcgagaacgcccgcatcaccctgaacatcccggcgggctacaccggtacgatcatgatcgcctaccaggcccccgcctattggcgcggcttcgaacttgtctccgc

SEQ ID NO: 8041 - DNA, 220 bp, Unknown
  gut microbiota DNA sequence
cgcctttttggtgacaccgctgccaatgtaccccgcgggcacggcatccaccgtgacctggctcatgccatcgtagccggtgtcgggggtcacggtttgctggcgctcggtcggcgtgaccgtcttttcctgcagcttggcagcgccagcccccgcaaaaatgctgactttcttgtcgcctaagtaaacgggcatattctcaccacctgcaaattttaat

SEQ ID NO: 8042 - DNA, 144 bp, Unknown
  gut microbiota DNA sequence
cactcgtgccgaagatagttggctggagacggcctgtgaaaataggtagatgccgacttctcttttaatatggcccgttggtcaagcggttaagacagcggcctctcacgccgttaacgtgggttcgattcccgcacgggtcac

SEQ ID NO: 8043 - DNA, 28310 bp, Unknown
  gut microbiota DNA sequence
ctatggtgtgttatacggtaccgtacacttttttgaaaggacactgccatggatacctccaccagactgaaattgggctttgcggcgctgatgatactgtcgggcatcggcgtggcgtcctacccggtcatcagcaacatggtggcccagcgccacgccagtacggctatccaaaattacgacgagaccgtgcatagcatggacaccgaaaagctggacgccgccaaggaagccgcccgccgctacaatgaacagctgggcagcgcgctggaccgcgatgccgccggagaagccgaggataccggcaccagctatgtggacctgatcgacgtgggggagagccttggctacatcactatcccgaaaatcgacgtcaacctgcccatatacgagggcaccagcgacgacgtcctgctgaaaggcgtcggccatctggaaggctccagctacccgctgggcggagaaagcacccacagcgtgctgaccgggcatcgcggcctggccgaggctgtgctgtttaccgacctggacaaattacaagagggcgacaaattttacctgcacatcatggacgaggtgctggcctaccaggtcgaccaggtcaaggtcgttctgcccgaggagaccgatgaccttacgatcgtgcaggggcaggactactgcaccctggtgacctgcacgccctacgccataaatacccaccgcatgcttgtgcgcggcatccgcgtgccatataatggagaggaagaaaacggcgataccccgcaggtcgtgcaatatcaggccctgcacaccggcacggtggtcaagcgcatcgtggatgcctggccgtggatctcggtgaccggcagcgtgattattggcggcgaagcactgctgctgcttctgctgctgcatcgctgcaaaaaacgggaggaggacgactaaatgcggcgtctgcttgtaaaaatcggcgcgtggctggccattctgctgggccttgccatgatgctgcagcccaccgccgctgattggctgacccgccagcgcaacagcaaaacggcacagcagtttgccgcccgcacttccgccgaagcccccctgcagaccgatgctgccgcggaacctgaacgcgcttaccctgagttgtacgccgccatgcaggcctataacgaggcgatttttgccgacggccaaagcggcctgaccaacgccttcgcctacgagaacccgccgctggatctgaccgattacggctatgacgaggaggtcctcgccatgctgtggatcccgcggctggatctggaactgcccgtttacctgggcgccagccgggagaatatggccaagggcgcggcgctgctggggcagacctcgatgccgctgggcggcgaaaacaccaacaccgtgctggccgcccaccgcggctattatggcgcggaaatgctgcgcaacgtgcagcagatccaggtgggggacaagatccagctgaccaccccgtgggacactttaatttaccgcgtggcagagctgaagatcatcgaccctgcggatatttcctcggtgctgatccagccagggcgggatctgctgacgctttccacctgccacccctacacccagaattatcagcgctaccttgtgatagccgaacgcgaccccgatgccgccgtgaccgataaggacaccgacctgcaggaaagcgaggccacctgggatgcctcgccccggcaggtgacgatggaaacagacggtacaacgtctatcgctgaggtggaaccccaaagcatcaccccgctgccgcaggagggcagcacagaatccgaaggcagcgcggtctccaacctgatgatctggctggaaaacaacgccctttgggccggggtcgtctttattgccgcctgtgtcggcgtgctggcgatctggcaaaaacaccgggaggaatgaccatgcaatacaaccaaaaggccgttgacgtagcggcggaagtttccaaagccgtgtttggcaagccgcagaccatccgcaccatctggatggccatgctggcgggcggccatgtgctgatcgaggacatccccggtgtgggcaaaacgacgctggcgctggcctttgcccgcgcgctggaactgaacgagagccgcgtgcagtttaccccggacgtgctgccctcggacattgtgggctttaccgtgttccagaaggagaccgggcgactggtataccaccccggcagcgtaatgtgcaacctgtttttgggtgatgagatcaaccgtacctcgagccgtacccaatcggcgctgttggaggtcatggaggagggcaccgtgacggtggacggcgtgacccaccccgtacccgcgccctttaccgttatcgccaccgaaaaccccgtgggtgccgccggtacccagatgctgccgcagtcccagttggaccgttttaccgtgtgcgttgtcatgggctacccggacaccgaggccgagatgcagatgctggcgggccgcggccagcgcaccctgctggaacaggtgcaccccgtagccaaccaggctgacctgctggctatgcaaaaagaggtagctggggtgtttatccatgagctgatgtatcgctatatcgtcgatcttgcccaggccagccgtaaggacccgcgcctggcgctggggctcagcccccgtgcgtcgctggcgctggccggcatggcacgggcagcggcctacctggccgggcgggattttgtggccccgcaggatgtgaccactgtgtttgccgatgtggcccgccaccgtctggtgctggctgaccaggcgaaggcgggcggcgagacggtggatgtggtcatcgacgatctgctccgcaccgtgccgcgtccccgcccggaaaaggccgaccgccatggcaggtaaactgtgctgggcgctgggcctggtgctgctgtttgccgctgcggtgctgacgcaggcgccgctggctgtggggctgctgggatttttcctgctgctgaccctgctgctggtgctggaagtgcggtacttgcgcggcaaggtggaggctgaactgatcgtgcccgaccagcctgccgtgcagggccggccctttgtgctgaccgtgcggctgaccaaccacagcccgctgcccatcccccaattgctgacactggtgcaggccaccgatgaatggggcggcaataccataactttacgctgcagcggcatgttgggcagcaagacccgcgctgagcagcggttgacgctgcaggccaacaaaagcggcgtgtggcaattacggctgcaaagcgtgacgctgtgggaccatctggggctgttcaaagcccaatgcggcctgccgcagaccgcacaaagcctgtgcgtgctgccccaaagtgcccgcctgggcagcgacacccagcccgaccccgacgccgacggcatgcaagagagcgaccgcagggtgctgggcggcaactacgatgtgcgagagtaccgcgaaggggactcgctgaaacaagtccactggaagttgagtgccaagctgaaccggctgttgatccgtgaaccgctggccgccggtacgatggcggggcaggggagcggtgacggccccggcgagggtgagggtgacatgtggggggatttccccgccgaagccgccctgcaccgggaagcaccgcccaccaagaaaaaagcagtggcgctttccaaacgcggcggcaccgatgccgacagcggcctggtgtttctggaccgtgtgctcatcagccccgccgtacccgcgcgggataccctgtggctggtggtggacctctgcctgctgctggcgctggcctttgggctggtgtccgccgccgtgacggcctttgccgtgcacccgcccgtttgggtgtggctggcgctggccgcgtggtgtgccgggtggtgcctgtttggacggctgccccggcgtgtgcagcggctgggcctgctggctggcagccttgtctatttggtggggctgtttttgtgccagcgcagctttttggccggggcacgccagtttggcgctgccgtggccgcaagcttaaatgaacgttttaacgcaaatctggccgccacagcgggcggcaccccggcccagctggggttgtttctggcgctggccgccctgcctttggcgggcctgctggcgctggccgcgctgcgccgggccgacattttgctgttgaatctgctgctgctgctgccggcggcggtgttcctgctgctggcgggcagcaacgtctccacgccctgctggctgctgctggccgtgggctggctgggggcgctggcaggctcccgcgccgtgcgccgccgtgccctgtggggggcgacggagtcggaaacctgccgccgcaatcaggcacagcaccgggccatccaaaaaggctcggcggcggccactgtgctggtatgcgctgcgctgttggtgcccgcctttgtgctgcggcctgtggtaggtttgcccctgcaggaattgcagcccgcggcccaggtggtggaatcggcggccataagcgccgctgtgacctggctgccccgcgtcagcggcgggcgactgaacctgcatgtagaagctgccgccggcggtgtggccgatggtgccttagcccagggcggcggcttgcagctgcgcggggtcgaggatctggccctgaccgccagtgaccagcctgaggaaaccgtctacctgcgggggtttatcggtggcagctacgacggcaccgcctggcaggcccccgatgcaaacgcctttgacagcgccgccatgaactggaagaccgaggacgacgcccgcctgactattgccagcctgccgtttttgcgtgccgcctacgatggcgccgccgagccgcaatcccttacggtggagcggctgaacgcgggggacgcctacacctacgccccctacaacgcctactggaatgactactacaccctaaacggcgacggcgcggcggacggccagaccgcacaggacgatgtatttttgtattatccgcgcagcatcgccaaagaactgttggccgcccgcgccgagggtgaccccagcgtgctggaccgcatggagagctcctacgcggcctacgccaacagccactacaccgccgtgcccgatggctacgacgacttgcaggcccagtgcgaaacggctgccaaagagcaaaagctgaccgacgcggatgacatcacagcctacatccgcacctggctgaacaccaactgctggtatgacaccgacgcctcccaggcaccggacggcaccgacccgattcactactttttgtacgagtccaagtccggctacagcgtgcagtttgcctcggcggccacgctgatgttccgcatgttcggcctgcccgcccgctatgtggtagggtatgctgcaccgcaaagcttgttcacccagcaggcggacggcagctggcacgccgttttgcaggacgataatgcccatgcctgggccgaggtctacatcgacggccagggctggacccccatggagatgacccccggtgtgctggtaacagctgaaaaggccgactacaagagcagcctgccggagaccatccctgccgagagcaggaccgcagccaccactgacagcgccgatgcccggcaggacttgcagctttccaccgccccgcgccgtgccctgtggctggtggctgtgccggtggtgatgctggctgcagctacagctgcttttatcctgcaccgccgccgtgtgctggggctggatacccgccgcccctgtgcagagcgggtgctggcgatctttgctgcaatctacgcgcagctggtgcgccgcggcctgcctgcgggtacgtcctcggacgagcaggcgttctcccagtttttgctgaaagaggtacatgagctttcgggcggggaaatcgaggcgatggtatcgcttgcgcagcgtgccgcctttgccgccgataccctgaccgaagaagacgtagccgctatgcgcggctggtacaaccgcatcaaaaacaacaaaaagacataattccacataaaaattgcgaaattttttcccaaaacaccccaaaaccgttgaaacctacgcactgcgtatgttatactaacctaaacaccattgaacaaggagtcgattctgagatgccgcgtcgcaaaaaatcggatgaaggcattatggatatcacccgtatggcagaggatctgggcgtatcaaaaacgacggtatcccgtgctttgtccggcaatggccgtgtaagcgaagcaacccgccagcgtgtggtggactatgcccgtgagaaaaattatgtcccgaacatgatggcgaaaagcctcgtcaccaaaaagtcgtataatgttgcgctggtgttttcgcgccagttttctaacttcgagggtcaattcctgcgcaaaactatcaccgccgtctgcgatgtgatggcccgcaacgattacgatgtgctgctggccatggtgggtgagcaggagtcccagcccatgcagcgcctgctggtcaaccacaagatcgatggcgtcatcctggcccgctcgctggagcgtgaccccctgatcccgttgctgcagcaaagcaaactgccctttatcgccatcggccgcccggccgaccccacggtgctttacgtcgaccacgaccaggtgggcggctgccgtgagatgaccaacctgctgctgatgaaaggtctgcaccgcatcgccctgttgggcggttccatgctgtacaccgtcaatcagacccgtctcgagggcttccgccaggcgcacgagcacagccgttgtaagatcgatgaaaccctgctttttttggagttggagaccgacgatctgcgcatcgacgccatccaacaggctgtggcacgcaaggcggactgcctgctgtgcatggacgaccacgtggccatgctggcactgaacaccgtgcgccagatgggcctgaaagtgcccaatgacatccgtattgcttcgctgtatgatggcgaggccctgctggattgcacgccgcagatcacggcggtgtctttcgaccccgaactgctgggcaaacgcgccgcacagcaattgttggccgtcacccgccgccagcccgtcgagaccggcgccctgcttggctaccaggtgggcctgcgcacctcgacacagacctgattttgccccattattcaataataaacaaagccgcccggcctgaaattttcttcaggctgggcggcattttctatggatgcctaaatttattcagcgttgttcagataaatacgtgcctcatacgggcggaaatgtgccgcatccgcaggggtgccatagttgcccagcagcagggtatccaacggcaagggagccactgcgtcggcgggcagggtgagcggctcctcgtagaaattgcacagcacggtcatcacctggtcacccaggcggcgctggtaggcaaacagagccgggtggtctgcaaacagcagggtaaagtcgccctcactgaaaatgggatactgtttgcgcagacgaatgagcgcctggtaatagtggaacaccgagccggcatccgccacctcgtccgccgcattgatggcggtatagttggggttcacctgcagccagggcgtgccatcggtaaagcccgcattggtagtggcgtcccactgcatgggggtgcgggcgttgtcgcggctcttggcgtggagagagcgcaggatatctgcctcgctgtacccggcctgggtacgctcactgtacatgttcagcgtttcaatatcgcggtagtcgtcgatggtggggaaggcgacgttcgtcatgcccagttcctcgccctggtagatgtagggcgtgccctgcatgccgtgcagcagggtggccagcatcttggcggattcctgccggtaagcgccatcgttgccccagcgggagacgatgcgcggcaggtcgtggttgttccagaacaggctgttccagcctttgccgtgcaggcccacctgccacttggtcagcacctctttcagcgccgaaagctgcagcggagccaagtcccacttcgccttgccgggaatctggtccaggccgatgtgctcaaactggaacaccatcgagaattccttgccccgcgggtcgctgaagatgggggcgttctgcacattggcgccccaggcctcacccacggtcaccagatcggtgctgccaaaggtgttggcgttcaactcccggatataggcatgcagcatcggaccgttggaggtaattcccaggtccgggtccttggcgatctggtcgatgacatccagtcggaaaccgcccacgcccttgtccatccaaaagcggatagccttgtacaactcctgccgcagggcggggttgtcccagttcaggtcaggctgtttgatggaaaactggtggaaataatactgccccacctcgggcacccaggtccaggccgagccgccaaaggtggcccgcatcttgttgggcggcgtgccctccacgccgtcgcgccagacgtaatagtcgtggtaggggttgtcgcggctcttttttgcctcctggaaccagcggtgctcgtccgaggagtggttcagcaccagatccatgatgatgcggatgtggtgttttttggcttcggtgatgaggttgtccatgtcggccagcgtgccgaacatggggtcaatatcgcagtagtcggaaatgtcgtagccgttgtcatcctgcgggctgcggtagacggggctgagccaaatggcgtcgatgcccaaactctccagatagccaagccgcgggatgatgccggccaggtcgccaatgccgtcgccgttgctgtcctgaaagctgcggggatagatctggtagatcacagcgtttttccaccagggctgcgggtttgccatagtttttctccttattggtaccttaggtaaatgtcggaatttgaaatcgtttgcgccgttacaatcataaccgaatcaaacccaatttgcaagatgccggggctgctgatgccctacgatttttgcggggtggaagatgtaaattttgtatcttctgcaaaatacgtcacgcgcccctcgttatagtaagcagagattaccaataactgggaggcaacgaccatgaaaatactgcttacgaccgatacctgggttcctaccataaacggcgttgtaacgtccactgccaccctgcgcgccgcactgacggcccaggggcacgaggtgcgggtgctgaccctttccggcgacagccatacctatacaaaggacggtgtgaccagcctcggctcactggatgccgggctggtctacccaggggcccggatgcgcgccccggcattgaatcgtgccatccgtgatctgatcgactggcacccggatgttgtccactctcagtgcgagttcagcacttttgccccggcacgccggattgcgcacgctgcgggcgcaccgcttatccacacctatcacacggtgtacgaggattacacccactacttttcccccagccgcagcatggggcgtaagatggcggcgctgttcacccgcatgatctgcgccgactgcgacgcagtcatcgcacccacgccaaagatcagccgcctgttggcgggctacggcgtgcactgcccggtgcgtatcatccccacggggctggacctgcagcgctttgctgtgccccgggatgatgccctgcacagccgcctgggcctgccgccgaaagaggcaaacaagacggtcttgctcagcctgggacggctggccaaggaaaaaaacacaacagaacttgtcgattctatgcagaatttgccggacgccgttctgctcatcgtcggcgacggcccggagcgcgccgcgctggaacagcaggcgcaaagcctcggcgtggctgaccgcgtgattttcgtaggggccgtcccgcctgccgaggtgccccgctactacgcgctgggggatgtatttgtcagtgcctccaccagcgaggcccagggcttgacctacatcgaggctatggccgcaggattgccgctgctttgccatgcggacccctgtctggacgcgctggtgcgggaaggggagaccggctgggcctaccacacgcctgccgagctggctgcccgtgccgctgctctgcccaaaggccaccaactggctgccatgaggcaaaacgcccgccgcgccgtgcagccttacacgaaggaacagtttggtcttagcgtagtgcggctttacgcggcggcgctgggccgtaaacacgccgcccgcagtgcggcaggggggaatgtggcatgatcaaaaaaatcaaccaggcagcgtctatcctggggctggtgctctgcgccgtgctggcatatgtcttttggaaagccgggctgtttgactccaaagaagcgctgaccagctgcatcagccggttcggctgggcaggtccggcggtgttcatcacattccaggccgtgcaggtggtcatccccatcctgcccggcgggctggggtgtctggccggggtcatcctgttcggcgtgtggaaaggcttctggtacaactatatcggcatctgcgccgggtcgatggcggcgtttgccatcgcccgcgcctgcggccgcccgctgctggaaagcgttttccccgccaaaatgattgaaaaatatgaccgctggatgggcagcggcagccggtttgccaagtggttcgcattccttattttcatcccggttgcgccggatgattatctctgctttcttgcaggcaccacgcgcatcggctggcggctgtacgcggccatcatcctgctgtgcaaaccggcgtccattgcgctgtacagcctgggcttgaccgtagttgcgcaaaatttgctggggctttggaggtgaacgccatgcgcaccgtacatatttatagcggctcgctggcgctggtcagcaaaagcggggtagggcaggcagccaaacaccagcgggcggcgctggaaagcgtcggcgtacacgtcgtcaccgattgggactgtcgtgccgaggtggtacacatcaacaccgtgctgccggtatcactttgggcggcacgccatgcccgccgccgggggcaaaaggtcatctggtatggccattctaccgagaaggacttccgcaactccttcaccggctccaacttgctggcgccgcttttcaaacaatggctgcggctgtgctataatcaggcggacctcatcattacacccacgccctactcagccaaagaactggcaggttaccgtttgcgcccgaccatcgtgccgctttccaacggcgtggatacccggttttttgcccccaaccccgccagccggtccatcctgcgggaaaagtaccgcctggcggcggataagtccgtggtcatcagcgtagggcattatatgcagcgcaaagggatactggattttattgcgctggctcgcaaaatgccgcaggtgcagtttttgtggttcggctacaccgacccgcaccttgtgccgcataacgtcaaagccgccatggcggatgcaccggaaaaccttcggtttccgggctttctctcccaggcagagctgcgcacggcctactgcggggcggacgcctttttgttttgcagctatgaggagaccgagggcatcgtgatattagaagccctggcctgcgcaacgcctacgctggtgcgggacatcccggcctatcgcggctggctgcgggacagcgtaaacgtccacacctaccgcaccacgcaggacctgcccacccgcttgcaggcacttttgcagcacaaactccccgatactgccgcagccacccgccaaaccgcagaggagcgggcattaccccgtattggagcacaattattggaattatataaaacattatagatcctttttccgccccggaacagcatcgatctcggctgctccgggaattttgtacctgtcgaaacctgccgcacgcgcaacttgcgcaatggtctatgacataaaatgcgcaaatatggagtaaatgtgcacaattgtggcgcgccagtttcataacaacttacaaacttgggcaatatcgacaaaaacgggttgatttttgaaaagacaccatgtataatataggcaatccgaacggaaaatgtattcgaattgcgcaaacgaattcactcacttggatctaacttgttttcttaaggaggaaaacgaccatgaatgcaaaaaagaccctttctttgagcctggcctccgccatggccctcggcctgttggcaggctgcggcagcagcgcttcttccaccgctgcttccactgctgacagcaccgcatccgctgctgactccacctctaccgctgctacttctgatgcagccggcaaggtctactacctgaacttcaagcccgagcaggatgaagcctggcaggatctggccgccaagtacaccgaggagaccggcgttcccgtcaccgtcgtgaccgctgcttccggccagtacgagaccaccctgatgagcgagatggccaagagcgatgcgcccactctgttccaggtcaacggccctgtcggcctggccagctggaaagactactgctacgacctgtccggctccaagatcgccggtgagctgaccagcgattcctacgccctgaaggacggcgacgccaccctgggcatcggctacgttatcgagagctacggtctgatcaccaacaagaccctgctggaaaaggctggttacagcgtggacgacatcaagagctttgccgacctgaagaaggttgccgaggacatcaccgcccgcaaggacgagcttggcttcgctgcattcacctccgccggcatggatggttcttctgactggcgcttcaagacccacttggccaacctgcccatctacttcgagtatcaggcagacggcatcaataacaccgacgccatcaagggcacctacctcgacaactacaaagatatctttgatctgtacatcaacaactccacctgcgatcccgctgagctggctggcaagaccggcgacgacagccgcaacgagttcctgaacaacgaggccgtcttcttccagaatggttcttgggagtacaacaacctggtcggcgatggcaagcccttcaccgatgacgacctgaccatgatgcccatctacattggcgtcggcgacgaagccaaccagggcctgtgcaccggcaccgagaactactggtgcgtcaacaaggaagccagcgaggacgacatcaacgctactctggacttcatctactggtgtgtttcttctgacgaaggcaccaaggctatggccgacgacatgggctttgttatccccttcaaggccgctgctgagtccccgaacctcttcgtcaaggtcgacaatgaaatgaccgctgagggcaagacccccgtggcctggaacttctccaccatgccttccgagaactggaagaacggcgttggttctgctctgaccgcttacgccgccggtaccggcagctgggatgatgttgtcaccgccttcgtggatggctgggcaagcgaggctgctttgaacgctgctgcataatcccaataaacctaaaacgcaatacctgtggggcgggcggaaatcgcccgccccgctttttttaacgaaacgaagcaagaaagagaatctgaaaagggggctttcctatggaaaaagccataaaacgctactggcccgtctttgtgctgccaacgctgattgcctttattatcggctttgtgtggcctttcatctggggcgcggggctgtccttctgcaagttcactaccgttaaaaacgtgcagctcgtcggccttaacaactacaaaatgatctggatcgatgataccttcacccatgcgttctggttcacggcggctttcaccatcgtgtccaccgtgcttatcaatgtgctggctttcagcatcgcactgctgcttacccgcggcatgcgcggcaccaacgcattccgcacgatcttcttcctgccgaacctgatcggcggtatcgtgctgggctacatctggcagattttgctcaacggcatcctttctgccctaggcaagccgctgctcgcgctgaacgccacctacggcttctggggcctcatcatcctgatgtgctggcagcagatcggctacatgatgatcatctacattgccggtttgcagaacgtgcccaccgatctgatcgaagcggcccgcatcgacggcgctacctcccgccagatcctctttaagatcaaggttcccatggtcatgcccagtgtgacgatctgcaccttcctgacgctgaccaactccttcaagctgttcgaccagaacctctctctgacggctggcgaaccggccaagcagtccatgatgctggcgtacaacatttatgatacgttctatgcccgctcgggaccccagtggaagggcatcggccaggccaaggctgtggtctttttcctcttcgtggtcgttatctctctgctccagctccatttcacccgctctaaggaggtgcagcaataatgggcaagactgctaaggatcgccgcatcaactcggtgctgtcggtcgtgcttaccatcgtctgcatcctctggatgtacccggtgttcatgattttgatgaactcgctcaagaccgagcgtgccatcaccaccactcacgccttcgagctgcccaccgccgagaccttcgtgggtctgaaaaactacatctacggcatcacggagatggacttcctctcctcgctgtggtacagcttcatcatcacgatctcctccgtcgcgctgatcttgctctgctgctcgatgtgcgcatggtacatcacccgtgtgcagggtgtgctctccaagggcatgtattacctgtgcgtcttcagcatgatcgtgccgttccagatggtcatgttcaccctggccaaaacggcagataccctcaaactgaacaacccctacaacatctgcatcatctatctgggcttcggcgccggtctggcggtgttcatgttcaccggctttgtcaagtcgatgcccatcgccattgaggaagccgccatgatcgacggctgcaacccgctgcagatcttcttcaaagtggtttgccccatcctgaagccgacgatgatctccactgccatcctggaaaccatgtgggtctggaatgactatctgctgcccaccctggtgctggacatcaagcagttccgtaccattcccatggccatccagtatttccgcggcagttacggcaaggtcgagatggcccccatgatggcctgcattatgatcacggtcatccccgtcattgtgctgtacctggcctgccagaagtacatcatcgacggtgttgtggccggtgcggttaagggttgatagagggcccgaaagtatattccattagaaagaggtcagtatttttatgagaaccagcggtattttactgccgatttccagcctgccgtcccccggcggtatcggtaccatgggggctgcggcccgtgaatttgtggacttcctgcatgcggcagggcagcattactggcagattttgccggtttgtcctaccagctacggcgacagcccctatcaatccttctccaccttcgcgggcaacccctactttatcgatcttgaccagctggccgaggccgggctgcttacgcccgaggagtaccgcacaatcgattgggagagcgcgcccgactgcatcaactatggtgtactgtacgagaagcgctaccccgtcctacgccgcgcctgcgcccgtctgctggccaaccccccagaggattacgagcagtttttggcggacaacgctttctggctgccggactacgccctgttcatggcactgaaagatgcccacggcggtaagtcctggctggagtgggaacgcccgctgcgcctgcgcaaaccggccgatctggataaggcccgccgctatcataaggcgagcatcgatttctggcaggctgtgcagtatctcttctacacccagtggaaaaaactgaaagcctacgccaatgcccggggcgtcgagatcatcggcgacctgcccatctacgtagcggcggacagtgtggatgtctggagcagcccgcaggagttccagctggacgaaaacctgctgcctatcgaggtggccggctgcccgccggatggtttctccgccaccggccagctgtggggcaacccgctgtttgactgggacgccatggccgccaccggctaccgctggtgggtgcgccgcatccgccacttgtgcagcatctacgatctcctgcgcatcgatcacttccgcggcttcgccgggtactacgccatcccttacggcgatacgaccgccgagcatggccgctggcgcaccggcccaggctacagcctgtttgccgccgttaaaaaggaactgggcagcccccgcatcattgccgaggacctgggtttcctgaccgacgatgtgcgcgagttgctggccaagtgcgagtaccccggcatgaaagtgctggaattcgcctttgacagccgcgacggcggcgactatcgcccccacagctatcccaccaactgcgtggcctacaccggcacccatgacaacgagcctgtacagggctggtttgccaccgctgataagaccgacaccgaccgtgccgtagagtacctgaatctgaccaaaaaggaaggttaccactggggtatgatgcgcggtgtctgggccagcacggccgatctggccgtagtgcaggcacaggatgtgctgggcctggggcatgaatcccgcatgaacacgccgtccaccttgggcggcaactggtgctggcgcgcactgccgggtgctttcaccccggcgctggcgcaaaagctcaaccatctgatggagctgtacggccgcctgcccgcagaagccgctccggaggatgcaacccaggatccggcggattccccgtccgtctgatataagggccgtgccgtatcgcggtgatgacccggatttcttctcttttttctatcgtttctttcttgcaaacagggtaaggccctcggcaaaccgccgggggccttatcctgtttttgctgcaggatgggtccggtggaactggcatcctgttccttcggccaaagcagcaaggtcagctatctgcagatgcttacagcggtgtgtgctgtggtcaacggcgggcggctgatgcagccctatgttgtacagcgcattaccgccccggacggtacaataataaaagaagtagaacctacagtgaagcggcaggtcatttcggctgaaaccagcgccacgatgtgcaagctgatggaaggggtggtcaccaaaggcaccggcacccgggcggcggtgcccggctaccgtgtgggcggcaaaagcggcaccagccaaaagctggacagcaaaaacgagggcgcccgcattgccagctttgtggcggtcgcgcccatcgaggccccacggctggcggtgctgatctgcctggacgaaccccacagctggaccaccagcggcggcgccctctccggccccgtctgcgccgaggtcctgcaaaaggccctaccatatctggggatagagccgacggaaacggtagaaaaataaattttaaaattcattcacgacatttccctgcaaatctgctatactaaagctacttaaaaaaataggagagctttagtatgccgcagtcttatgtgttgtttgacaatgtgtgtaaatattaccagatgggcgatacccgtatcgctgcatcagatcacgtgagctttgagatccaaaagggggagttctgcgtcatcctcggcccttccggtgcgggcaaaaccaccgtgctgaatatgctgggcggcatggatacctgcgacgagggcaccatcctgctggacggcgagaaggtcagcggctttgataaaaagcggctgaccacctaccgccgctatgatgtgggcttcgtgttccagttttataacctcgtgcagaacctgaccgcgcgggaaaatgtggagttggccgccgagatctgccgcgacccgctggatgccgacaccgtgctggatgaggtgggcctggcggaccgcaaaaacaacttcccggcacagctttccggcggcgaacagcagcgtgtctccatcgcccgtgcgctggccaaaaacccaaagatcctgctttgtgatgagcctaccggcgcgctggactacaaaaccggcaagcaggtgttggccttgctgcaggccacctgccgcaaacaggggcgcaccgtcatcgtcatcacccacaacagcgctctggccgctatggcggaccgggtcatccgtatcaatagcggccgggtgatagatcagaccgtgaaccccaaccccacccccgtggaaaggatcgagtggtaaatgacacgcagttatcgcaaaaataccctgcggaccttcaaaagcaccgccagccggttcgccgccgtctttgccatcgtggcgctgggcgtcggcttcctggccgggctgaacgccacgcccatcgatatgaaagagtcgatggaacgttatatggatgatggcaacttctacgacctgcgcatcgtctccaccctgggcctgaccgatgaggatgtggatgccttgcgccaggtggagggcgttcgccaggtgcagccgggatactcggcagatttgctggtggaggtggacggtgacaccgtcgtcagccgcgtccacagcctgcctgcgccggagaataacaccatcaaccagctgaatctcgtcgagggccgcctgccggaaaagtccggcgagtgcgtcatcgaagccagctacaccaaaaagcaatctacctataccgtgggcacaaagctggtggtggacaaagccaacgaagatctggacaccaagctgagcaccaccgagtacaccgtcgtgggtatcgtgcacaacgccaactatttcagctttgagcgcgagcccgccagcgtgggcaacggcacggtcaagctggtgttctacatcccccagcaggatttcgcctacgaagcctacaccgaagtctacctgaccgccgaaggcgcgttggagcaggacagcctgggcgacgcctaccaaaccaatattgatacggtcaaggccaacgtcgaggccatcgccgatgcccggtgtgaagcccgctatgacggcatcatcgctgatgcccgtgccgagctggatgacgcctgggctgagtacaacgacgccaaagcggatgccgaccaacagctggccgacgctgccgctgaattggccgacggcaaacgacagttggcggatggccagaaagaggtggatgacggcgagcgccagtatgcagacggcttgaacgaactgaccagcaacgaagccctgctcaacgatggcgcggcccaattggcggatgccgaagcccagctgaaagacgccgaggcgcagctgcaggcaggggaggacgaacttgccgccaacgcccccaagctggaagccgcccgcaaacagttagaggacggccaggctcagtacgaagccgggctgaaacaatacaacgacggcctggcacagatcgaaaccgccgaaaagcagctggccgacgccaaggcccagctggacgccaacgcggatgcctaccagcaggggatagcagcctttgccgaaaagctgggagtggatgcggcccaggtggatgcgtttatcggctggctggcccagaactgcgatgccaacggcacccagccgccccagacggtggaagaactgtggcaagccatccagaattacggcggtctgaccatccccgcaggcctgacgcaggagcaggtggatgccatccgcgcccaggccaacgatctactggcggccatcgatgaaatccccgcagacaccctgccggaagaacaacagcagcgcttgcaggaggcccggacgtatatcgccgccgtggctgatgctgccgaccctgctgccatgcagacggctttgcagaatgctgtcgattgggcgcgtcagttcgcccccgaactgcccgatgacatccgggacaagctgaacgccgctgtcgaggcctggtgggccagcctgcccgaggacagcaaagccaagctggaagaactggtttccggcgtgggccagctgacccagtaccggttgggcctgctgcaatacgaacagggcgcggctcagctggctgccgcccgtgccgagctggaagccaacgcccccaaactggccaccgccaaggcccagctggacgatggctggaagcagtactatgacggcctggcccagtacgaggacggcaaaaagcagctggcggctgcccgcgcccagctggaggctggctgggccaccctgcaggacaaaaaggtgcagatggccgatgcccgccgccaaatcgacgacgccaaaggccagctgagcgacgcccgcaaaaagttggatgacgccaaaacagccattgccgaaaacctgcaaaaactacgggacggagaaatagaatatgaggacgccaaggccgaagccgaaaaggccctggccgatgcccgcgcgcaaatcgaggacggagaagccgccctgaacgatgtggagtaccccacctggtacgtctgggaccgcagcaaaaacgtcagctatgcgtcctttaccgccaatgtggataagctcaccgccattaccaccatctttccggtattcttcttcctggtggcggcactggtggtatccaccaccatgacccgcatggtcgaggaagaacgcctacagatcggcacgctgaaagccctgggctattcgggcgcagccatcatgcaaaagtacctgatctacgccttcacggcggctgcagcgggcacagtagccggactggccgtcggcttcaaggccttcccgtccatcatctggtccgcctatgaattgatgtattatatgccgtctattgccaccccctggcggttgagccaggcgttgcttgcgggcggcacccttatcctgctcaccatgggcatcacggcgctggcctgccgcaccaccttgcaggaggacccggcggccctcatgctgccccgcgcccccaaggccggcaagcgcattttgctggaacgcatcaccccgctgtggcggcggctgcccttcagctggaaagttacctgccgcaacctgctgcgctacaaaaagcgcttctggatgacggtcatcggcgtggcgggctgcacctcgctgctggtggcgggcttcggcatctcggattcgctgaactccatcatcaccaagcagtacggcgacatttaccactacgacctgatgaccatcgtcaccaagcaggaggccaccgaaagcggccctgtttacgactacctttataataaggagaacgtcaccgattcgctgactgttgccatggaatccacccggcaggatggccccaacggtgagatggacgtctacctcatggttccccaggctgtggacaagtttgctgagtttgctgacctgcacgaacgcctctcccgcaaggcggtgccgctggggcagcagggcgtggtcgtgaacgaaaagatggctaagaccctgggtgtaaaggcaggggacaccattaccctgactaacagcgacgataagacagctgacttcactgtcagcggtgtgtgcgagcattacgtcagcaattacgtttacttcagcccggcggtgtacgaggccggttttggcgaagctcccgcctacaacgcaatcatgagcatcctgcccgaggacacccaggaagcccgcgataccctctcggcggatctgctggcgatgggcaatgtggccagcctgaacttcacgcaggacaacgtgaaacaggtgctcaacatgcttaactccatcgatgcagtggtcgtgctcatcatcgtctgtgcggcatcgctggcgttcgtggtgctgtataacctctccaacatcaacattgccgagcgtgtcaaggagatcgccaccatcaaggtgctgggcttctacgacccagaggtatacgcctacgttaaccgcgagagcgtggccttaacgctgatcggcacgctgttaggcctggcaggcggcattgccctgcacagcttcgtcatcaccacggtggaggtcgatgccgtcatgtttgggcggcagatctacccccaaagctttgcctacgccattgccctgaccctgctgttcagcacgctggtcaacctggtcatgcagcggctgctgaaacgcatctcgatggtagagagcatgaaagcgccggaataaaacggacgcatgaagctcctataaatagaaggagccgattgcaaacatatatctaatgtaaaataggtatcattttcgttaaaatcgttagattcgttaaagttgttgggatcgttttactaacgaaagtgacgactatgatacctagggcaacaccgcacaattcccgcctgacggcttaagcaccgctccggcggatctccgcgccaagagccgccgcaagcggcggttgcgctccgaagcgcctcgctgcggctcggtgtgcggcacggcatctgcgttgccaaaatgctcgataagacatccagtattatctgcgcttttggcttagcatctgccgcacctcgctcgccgtatcggcacttagaattatgcggtattgccctagatgaaagcaggcaaaagaaagctccctctttgagggggctttttaaaattcatctcttgacattttcccaatcggtgatatactatccaagtacgaatataaacagttagtatgcgaacaattcatgaatgaacaattcgcagactaacaaaacgacccgataaggaaggtgagaacgatgatctgccaaaatccagccacggttcgggatggctgcgtaaacaagcatttcggtgcgctgctcagccatacatcccgtatgctgcgccgcgctatggatacccgcattgcagccgaagttaccccggagctgaccggtgtgcgcggtatgctgctgggcgagatcatctgcgcgaacaacgaaaaccgtgatgtctaccagcgcgatgtagaacaatggttccacatccgccgttccagcgtcacggcgatcctgcagggcatggagcaggatggtttcatcacccgctgctcggtcgagaaagatgcccgcttaaagcggctggccgccacccccaaaggggtggcctaccacgaccgcatccgagccagcattgaccgctttgagcaggacctgcaacagggccttacccccgaggaaatggccgctgcccgcgtggtgctgaacaaaatcctgcacaacgcccagtccatcgaggccgaagcaaaacaatctaccccggaaaggagcaatgaaacttgctgaaaacactcggacgtgagacaaagggattccgcctggtctcgatcctgacgccgatctttatgatctgcgaggttatcatggagatgatcatccccaaactgatggcttccatcattgacgatggcgtcacccccggcaatatgcaggtcatctacatcgttggtgcccagatgatcgttgcagcgttgtttggcctgctgtttggcattttgggtgccgtgcttggctcccatgccgccaccggttttgcccgcaatctgcgccgcggcatgtttaaaaatatccagaccttcagctttgccaacatcgataaatactctaccgccggtctggtcacccgtatgaccaccgacgttaccaacatccaaaacgcctatcagatgttgctgcgcatgtccatccgtgcgcctgccagcatgatcgtggcgctgatcatgtcctacaccatcaaccgccagctggctaacatttacttgatcgcggtcatcctgctgggctgcgtgctggtgtacatcatgacgcacgccacccgctatttcaccgaggctttccgcaagtacgatgacctgaacgagagcgtgcaggagaatgtttctgcaatccgcgtggtcaaagcctacgtgcgggaaaagttcgagagcgagaagttccgcaaggccagcgagaacgtgcgcaacctgctgatgcgcgctgaacttatcatcgcctggaacgcccccttcatgcagttgaccgtctacagctgcatcctgctcatcagctggatgggcgcacggctcatcgtcagctccggcgccaccaccttcaccaccggtgacctgatgagcatgctgagctactgcatgaacatcctgatgagcctgatgatgctctcgatggtgtttgtcatgatcaccatgtccgccgcttccgccaaacgtgtagccgaggtcctggatgagaagtctgacctgaccaacggcgaaaaccccgtcgtggacgtcaaggacggttctgtcaagttcgaccacgtcagcttctcctacaagaagaacggcgagaaggtgctgagcgacatcgacctggacatcaagtctggcgagaccatcggcatcatcggcggcaccggctcggccaagtccagcctggtgcagctgctgccccgcctgtatgacgtgaccgagggcagcgtctccatcggcggtgtggatgtgcgccgttatgacctggagaccctgcgcaataacgtggccatggtgctgcaaaagaacgaattgttcagcggcaccatcgccgacaacctgcgctggggcaaccccgacgccaccgacgcagagatcgtggacgcctgcaagcaggcctgcgccgatgaatttatcgagcgcttccccgataagtaccagacccacattgagcagggcggcaacaatgtatccggcggccagaagcagcgcctctgcatcgcccgtgccctgctgaaaaagccccgcatcctgatcctggacgactccacttccgctgtcgataccgccaccgacgccaggatccgccgttcctttgccgagaagatccccggcacgacggtgttcatcgtggcacagcgtatttcctctgtcgagaacgctgacaaggtgctggtgctggataacggcagggtcagcggctttgatacccccgccaacctgctgaagaccaacgccatctatcaggatgtctacaacagccagaccaaaggctccggcgattttgacgagaagggaggggaagcctgatggcacagcagcctaaagtagtaaaaatgggccccggccgcaacgcaggcccccgccccaaagtagaaaaccccggcaaggtgttcaagcgcatcctggcctacgtgatgaagcagtacaagttccaggtcatcctggtgctgtgcggcattctgctcggcgtgttcgctcaggtccagggcaccctgtttatgcagactctgatcgacagctacatcctgcccctgctggccgaaaagagcaacgatttctccggcctgctgcatgccatcacccgtgtggcctgcttctacggcgtgggcatcctggccttcttcatccagaaccgcaccatggccaagatcgcccagggcaccctgaaacgtctgcgcgacgacctgttcgtccacatgcagacactgcccatcaagtattttgacagccacgcccacggtgacatcatgtctgtctacaccaacgatattgataccctgcgccagctcatcagccagagcctgccccagctggtcaatacgatcattacggtagtcagcgtatttttgtccatgctttacctcagcgtgccgctgagcgtactgacactggtcatggtcggcgctatgatgctggccaccaagtatctcaccggcaactccggcaagtacttcctcaagcagcagcaagagctgggtaaagtcaacggctacatcgaggaaatgatgaacggtcagaaggtcgtcaaggttttctgccacgaggatgccgccatcaaggagttcaacgaactcaacgatgagctgttccacagcgccgacaaggccaacgcctactctctggtggcgatgcccgtcaacgcccagctgggcaacctgagctacgtgctctgcgctgtggtcggcggtgcgctggccatcggcggcgtcggcagcctgacgctgggcaagctggccagcttcctgacctttaataagagtttcaaccagcccatcactcagatctccatgcagctgaactcggtcgtcatggctctggctggcggcgcccgtatcttcgccctgctggatgaaaagtccgaggtcaacgagggcgacattaccctggtgcatgccaagttccaagccgacgacaccctgaccgagaccaacgagtccaccggcatctgggcctggaaaaagcagaacgccgatggcactgtcacttacacccagctgaagggcgacatcgtctttaaggatgtggacttcggctacgatgagggcaagatcgtcctgcacgacatcaacctctacggccgtccgggccagaagatcgctttcgtcggttctaccggcgccggtaagaccaccatcaccaacctgatcaaccgcttctacgacatccagaagggccagatcctctacgacggccacgacatcaagtccatcgaaaagaacgctctgcgttcctctcttggcatcgtgctgcaggatacccacctgttcaccggcaccgttatggagaacatccgctacggccgcctgaccgccaccgatgaagagtgcatggccgccgccaagctggccaacgccgacagcttcatcaagcatctgcccgatggctacaacaccatgctgaccggcgacggcaccaacctgagccagggccagcgtcagctgctggctattgcccgtgctgccgttgctgacccgccggtgctgattttggacgaggcaacttcctccattgatacccgcaccgaaaaactggtgcaggacggcatggacggcctgatgtacggccgtacgaccttcgtcattgcccaccgcctgtccaccgtccgcaactcggactgcatcatggttttggagcagggccgcatcatcgagcgcggcacccacgacgagctgatagcccagaaaggccgctactacaccctgtacacaggcaattttgccgagaacagctgaacacattgacagcatagtgtacagcgttgctgcgcaaaaattgcagcaatctggtgtacaatcaatcaaaattgccgggatagcttgccgctgtcccggcttttttgtgtaaagtgccgcattaccgccaaaaagttgacgaattggtaaaaagtggttataataggtgacgtagccacgattattcggctgcataagataccgcggcagagggtacagcgcaaccgattaggcagcgccgatataggccgcatggatacgtttacagaactgtttatgaatagggaggtagccaatatggcagccaagaagaaaattgcacagaccgtgatcaccgagggtaagtactacaccatcaacgccgccaacggcaaggtcgttgaggttgccgattataatatcgagaacggcgccaagatccagctgtgggacgacgccaatgccgagtggcagcagtggggcttcgttgccgcaggcgacggcgtctaccgcgtgcagaaccgtttcaccggcaagatgatggacctggatatgggcggcgtcagcgacggcacccgcgtacaccagtgggagggtgcccccgcttccagccagctgtgggtggtcgagccttccaacgatggccgcgttaagatcaagagcaacctggcaggcaagctgctggatgccggcatgagcgctgtcaacggcactccgctgcagatctgggccgacgtcaacggcgagaaccagtactggaccatcaacgaggtcacccgcaagcccaagaccagcgtgaaggcttctgccgtcaaggctaaggccgctgctgaaaaggctgctaccgagatcgtcgacgctgctgctgtggcggttgcccccactgtcgagaaggctgtcaaggcagccaagcccgttgcagaaaaggccgccaaggccgcaaagcctgttgccgagaaggccgtcaaggctgccaagcccgtagttgagaagactgtcgaggctgctaagcccgtggttgagaaggctgttaaggctgctgagcctgtcgtcgaaaagaccgtcgaggccgctaagccggtcgtcgaggaagctgtaaaggctgctgcccctgttgtggaggagaccgtcaaggccgccgaaaaggccgctgccgaggttaagaccgctgtgaacaccgccgccaaaaagcgcggccgcaagagcaagcgcaagtaatttgcacctgcacattcttgcccgataaccccctgcaccgaattatgctgtaacaagttgcccccggtaccgttaagtaccgggggcttttggttttatattaggtttttacgggcaagatcaacccaacgccgcgat

SEQ ID NO: 8044 - DNA, 9072 bp, Unknown
  gut microbiota DNA sequence
ctttgatcttcgcggtcttttcctgggcggcggccagcttggcgcgggtctcctccaccagcttggcgggggctttctccacgaacttcgggttgttcagctggttggtgaacatgcccagctccttctcggccttggtcagctccttgttcaggcgggccagctccttctcacggtcaatcagctccatcatcgggataaagcccttggcatccggggtagccacgtttaccatgccgtcggcgctgccctcatacttgggggtcacggtcacgtcggtggcaaaggcaaagcgggccaggtaggcgccgcccttctcaaaggcagcggggctggcagtctcaatgaccatgctggtcttcttggcggggtggacgttcatctcggcgcgcatggtacgcacagccttgatgtaatccatcagtttttcaaagtcagcgcagtcctcggcccagatcttcatgttctcattgcccggccacagctgggtcatgatggtctcgccgctgccgggcagggcctgatagatctcctcggtgatgaacggcatgaagggatgcagcagcttcagtgcgcgatccagcacatacaccagcaccttgcgggcggtgtcggcggcctgggcgtcgtcgccgttcaggcgggtcttgcaaatttcgatgtaccagtcgcagtacacttcccaaataaagttctccaccttctcggcggccaggcccagctcgtacttatccaggttggcggtagcgtcggcggccatcttggccagctcgctcagcacccacttgtcgctcatgtccagctggtcctctgcgggcaggccgggctggaagtcctcgggcaggttcatctgcacaaagcgggaagcattccacagcttgttggcaaagttgcgggcagccagcaccttttcatcgctgtaacgcatatcgttgccggcggtggaaccgatgatgagcatcaggcgcagggcgtcggcaccgtactggtcaatgacttccagcgggtcgatgccgttgcccaggctcttggacatcttgcggccctggctgtcgcgcacgatgccgtggatcagcacagtgtcgaacggggccttgccggtgtaggccaggccggagaagatcatgcgagagacccagaagccgatgatgtcgtagccggtcaccagcgtgttggtggggtagaagtagttgtaatcctcggcgttctcatcaggccagcccagggtggagaagggccacagggcagagctgaaccaggtgtccagcgtgtcggggtcctgggtcagatgggtgcagccgcacttggggcaaacggacggagcctctttggcaaccacggtctcgccgcaatcgtcacagtaccaggcggggatctggtggccccaccacagctgacggctgatacaccaatcgcggccgcccttcatccagttgatgtagttcttggtgaagcgctcgggcacgaacttgatctcgcccttctccacgctctcaatggcgggcttggccagtggttccatcttgacgaaccactgcttggagaccatcggctcaatgacggagtggcagcggtagcaggtgcccacgtcgtgggtcagggcctcagtctctttcagggcaccgcaggcttccaggtcggccaggatggccttgcgggcctccagggcggtcatgccggcgtacttgccgcaatctagcacttcgggttcgtcggcggcagcgcggccggcggcacgctcagcatcagcggcagccttgtcggcagcaccggtcatatggccgtcgtaggtcagcacgcggatcatcggcaggtcatggcgcttgccgacctcaaagtcgttggggtcgtgggcgggggtgatcttcacgacgccggtgcctttttccatgtcggcatgctcgtcgcagacgatggggatctcacggtccagcagcggcaggatgacatggcagccgtgcaggtgggcgtaacgggaatcatcggcgttgatggccacggcggtatcgcccagcatggtttcggggcgggtggtagccagctccagatattcgccggtctccttcaccttgtacagcaggtgccagaagctgccttccttggcctcgtactcgacctcggcgtcggagatggaggtgttgcagtgggggcaccagttgaccatgcggttgccgcggtagatcaggcccttgtcatacaggcggacgaacacttccttcacggcgttggagcagccctcgtccatggtgaagcgctcacgctgccaatcgcaggagcagcccagtttcttcagctggctgacgatgcggttgccgtaggtgttcttccaatcccaggcgcgctccaaaaagccgtcgcggcccaccatctctttggtcaggccctcttcgcgcatcttggccacgactttggcctcggtggcgatggaagcgtggtcggtgccgggtacccacagagcggcgtaaccctgcatgcgcttgtagcgggtcaggatgtcctgccaggtctcatccatggcgtggcccatgtgcagctggccggtaacgttcggcggcggcatcacgatggtaaagggttttttgctgcggtcgatctgggtatggaagtaacccttgtcgcaccagttctggtagatgcggtcctcagtgccctggggcgcatactgtttggcgagttctttcggcattgtgtaaaacctccttgagaattgcggggcgtgtaatcaatagaaaaaggccgccccatgaagaagatcatgggacggcctgaaaaattcaagtcgcggtaccacccaagttgccttgtaaaaggccgctttgcggcagggcagacaccccgcctgccgggataacggcggcaaacccgtgcacggctactaagcttcaccgcacctgcttgaaagcgacagcacgcagcgggccatgccgggcttgcatcacccccggcttgctggaaaagcctgaacctgcgcgcactctttcgcactgcattatatcttataatgtaccgcacagtgcgggaaatgtcaagtgggaaattgcagaaggctccctctgggagggggctggctgcgcgcagcgcagactgggggaaactatcccgaagatcagatgttttgcctgcttactcccacttctcccacacttccgggcaataccccacggcagcctgccgcccgttgcgcacgataggctggcgcagcagctgctgattttcaaacagcttgtccgcctgctggctttcatccagccagcgcagcagggccagcgtgtccttgtccttggcgtcttcgtccaccagattggcccagccacccacggcgcggcagacgttgtcaaactcgccgcggctcatgcccttctctttcatatcgatcatctggaatttaatgccccgctccttaaactaccgctgggcctttttggtatcaaaacttttattggtgccgaagatctggatgttcatacgtactcctttctgtctgcttcgtatctgtaggggaagatacttgcattcgcccgcaagccccgcggcgagggatattaggcaacaccgcacaattcccgcctgacggcttaagcaccgctctggcggctacggcacggcatctgcgttgccaaaatgctcgataagacatccagtattatctgcgcttttggcttagcagctgccgcacctcgctcgccgtatcggcacttagaattatgcggtattgccattaattaaaaacagcataccacaccaaccatttattgacaaccacaccacaaaaaatatatagtatatgtgtatgccaaccacgtaaaagagggagaagacaaactatggaacttgctgtcatcacggctaaacaggtggcggagctgctgcttatgatcctggccggtgcggtctgctgcaaagcgggcgtgttcaaacccaaagaaaaatccgtcctggccaatttgctgctgtacctggtcgtcccggccatggtgctggacagctatatggtcgagtacgatcccgccaccttccacaacctgatgctggccttcggcctgggcgctctggtgctgctggtgggcctgggcgtggcatttctggcaagcttcaaggtgcaaaaggacgcccgcgccatcctgtggttcgcctgtgcgttctccaacgccgggtacatgggtttcccacttattaaggcgctgttcggcagcgagggcctgctctacgccagcggttttgtcactatctttaatattttgatttggaccatcggctacgtggtcgtctccggtcaggtcgaccctaagcagaccgtgaaagccgtggtcacctgcccctgcatcattgcggtagtggcgggccttatcatttacctggcccgcatcccgctgccggaagtcctcaccggccccatcggtgccatcggtgatatgaacaccccgttgtccatgatcatcaccggcgcgaccatcgcctccagcgacctgaaaaagctgctgaaaaataagaacctcttcctaacctggggcgtgcgtatgctgggtgtcccggcggtggagctgctgatcttcgccctgctgggcctgcacggcaccgtgcctaccatcgtgctgctgctggaagcctgcccctgcgccgccatcaccacgatgtttgccatccagttccaccacgatgaagaacttgccgccggtgcagtggtattttccaccctctccagtattttgaccctgccgctgtatgcgctgctgctgacgatggtgttagggtaaaatagcttgcgctcccctcaaaggggagcctttttctttgctcgtacacttgccctcccaccccttaggtgctataataatgtttcaaaagaggagtcctcacataaaaggagcactatgcaacaacaaaaaacatcccactggctcatcgcgttccgcgttatctttacggcggcgctgctggcctgtatcctctttatcttccgcaattccatgcagacaggcgaagtctcgtctgcccgcagccaggccgttactacgctggtcaacggcttcctgggcaagttcggcctcggccccttgtccgagcatatcatccgcaagctggcgcatttctccgagttcatgctcgaaggtttcctgctgatgctctgcctgcgggtctacacccggcattttgttcggcatatcagctggcccctgctggctggcatgagcaccgccctcatggatgagaccatccaaatctccatccccaaccgcacctcgtctgtcaccgacgtgtggatcgatatggccggtgccatcgcagggctgtttgtggccctgattattctcttgattttacgcgctactatggcgttttatcaggtgaaacgcgaaaacaaagcactgcgcgccgagcaggaagctctgcgtcagcgcgaacacgaacgtctggcccgccgtgccgcccatcgtgcggcccagggcgaggacaacaacgaggaggaagacgaagcatgaccacccaacaggcaatcgaagcactgcacgcgctgccgcgcctggggcagggggcacccggcctggcccgcatgcaaaacctgatggattacctgggcaacccggaaaaagacctgcagtgcatccacattgcgggcaccaacggcaaaggcagcctggccgctatgacctcgtccatcctgaccgctgccggctacaagaccggcctgaccatcagcccctacgtggtggatttccgtgagcggttccagatcgacggcgagatgatcccgccccgcaccctggccaacctggcccagaaggtgctggacgccatcgatgccatcgaactggagggcggcgagatccctgtccagtttgaggctgtcactgcgctggcgctgctctggtttgctcgcgaaaagtgcgaccttgtcgtgctggagaccggcctgggcggccgctgcgatgcgaccaacatcgtgcccaacaagctggtggccgccatcacaaaaatcggcctcgaccacaccgagatcctcggtgatacgctggacaagatcgccgccgaaaaagccggtatcatcaaaaaaggctgcgccgttgtcaattaccccgagcagcccgccgaggccatgggccccatcctgggtgccgcggccgaaacgaacaccgtcatcatcacgcccgaaatggacgacatccgcctgctgcgtggcaagcgcctggaaaaccgcatcgactacggcggttacaaggccagcctgcagttcccaggcgcccatcaggccaaccacgccgctatggctgtggagatcgccctcgccctctggcgggagttcggctacgacatctccgacgatgccattgagcagggcttgagcagcgcccatatgcctgcccgcatcgaggtcatgcgccgccatccgctgctgctgctggacggctgccataacccggacggtgccagggtcctggccgaaacgctgaccaaagccgagtatgaggaaaacctcgtgggcgtcatgggcatgctggccgataaggactacaaggccatgctgtccgccctggcaccctgctttgccaaagtgttcaccgtcacgcccgcctgcccccgcgccctctctgccgaggccctgcaaaaggaagctcgcttccacctggatgccgaagccgccgccagcgtgcctgaagccctgcacaaggccctcaattactgcgaggaaaacaaccttgccggtgtggtcgtctgcggctcgctctacctggccgccgaagccaggccgctgatgctcaaagaggcagaaaattaacgcgccaccgccctgttttaacaaaatatgcactacgaagcctgtatcgtaatgatacaggctttttctatttaaaagtaaaaggggcaagcactatggcaaaggtttgttttgtgccgggcagcggcacactggcggcgtatttaagcggcgagatcgaccaccacgccgcccaatccatccggagggaaatcgacgcccaggtagatgaccgtctgccggagctgctgacgctggatttttcgggcgtcacctttatggattcctccggcgtcgggcttatcctcggccgtgggcggcacatctcggccctgggcggccgcctgaccgtgcaaaacccgccgcccgccgtgcgccgcatgctggacctggcccgcataacctacgcgtaaaggagaactgccatgaagatgctcaatcaggtaaagatcacctttgccagccgttctgtcaatgagggctttgcccgtgcggcgctggcagcgttccttgttcagcttgaccccaccgttccgcagctggctgacctcaaaactgctgtgtccgaggctgtcaccaactgtatcgtgcacgcctatccggaggggatcggccctgtcaccttgacggcggccctctatgagggcggcgtggtgcgcatcaccgtcaccgaccgcggcgttggcatcgctgatgtagaaaaagccatgcagcctatgtacaccaccggcgaccccgaggaacgcgccggattaggttttgccgtgatgcagagctttatggataaagtacatgtctcctcgcggcctgggcgtggcacccgcgtgacacttaccaaacggctggacactcgcagatgacctttacatatttgtaaggaggattctgcctatgccagcccagaccatccaaaccatgccacgtgaggaatttattgagaagaacttaggccttgtccatgcctgcgccgggcgattcaaaagccggggtatcgagtacgaggaactgtacgccgcaggctgcctgggattggtgaaagcggttgacgggtttgataccacccgcggggtgtgcttctccacctatgcggtgcccgtgattttgggcgagatcaaaaagctgttccgggatggcggaaccgttaaggtcagccgatccttaaaagaactgggcctgaaggtcaacgctgagcgggaacgctgcctaaaacataccggccaggaacccggcgtagcccagctggctgaaatcctacagactaccccggaacagatcgctctggccatacgcgcctcgctgcctgcactgtctcttacacccagcaatgatgaggacggcaaccgtgaatgggatgtgcctgtggactcgccggaggaaacactggcggaccgcatcggcctgcgcgaggtgatggacaagctggaacccaaggatagggaactgatccgtctgcggttctttggcaaccgcactcaaaccgagaccgccaggatccttggcagcacccaagtccaaatctctcgccgtgaacgtaagatactggcatggatgagggtgcagctgcttgaaatataactcactgttctgtaagggccgatgcttgcatcggcctgctatctatacgcctgcttttaaactctctcgtcaacctgcacgtctcgacacattccgccttgtgcatcttcccaaaagtattacaaccccttgacacactcttttcaatatgataagatactcccatcgcagaagaaacgttgttataaggttattactgaacaaaatgcgaaaaacttgaaaaaagttttaaaaacctgttgacaaactgtatctgctgtggtatcataatcaagctgtccggcgggacaccccgtaaggacagcgcagcaggaccttgaaaattgaacaaaactgaaacttgtggaaccttgaacgtgggtttggaaacccacgataatcaattccaaacaaacaagtaattcatacaggacgcaagcgattgtgtctgagtgattacagcgatttaacactttgtaagtgattaaataccatttataaagagtttgatcctggctcaggacgaacgctggcggcgcgcctaacacatgcaagtcgaacggagctgagaggagcttgcttttcttagcttagtggcgaacgggtgagtaacgcgtgagtaacctgccctggagtgggggacaacagttggaaacgactgctaataccgcataagcccacgatccggcatcggattgagggaaaaggatttattcgcttcaggatggactcgcgtccaattagctagttggtgaggtaacggc

SEQ ID NO: 8045 - DNA, 137 bp, Unknown
  gut microbiota DNA sequence
tggagtgggggacaacagttggaaacgactgctaataccgcataagcccacggtaccgcatggtactgagggaaaaggatttattcgctctaggatggactcgcgtccaattagctagttggtgaggtaacggccca

SEQ ID NO: 8046 - DNA, 200 bp, Unknown
  gut microbiota DNA sequence
gccgtgtctcagtcccaatgtggccgttcaacctctcagtccggctaccaatcgtcgccttggtgggctgttacctcaccaactagctaattggacgcgagtccatcctgaagcgaataaatccttttcccccagtaccatgcggtaccgtgggcttatgcggtattagcagtcgtttccaactgttgtcccccactcca

SEQ ID NO: 8047 - DNA, 22608 bp, Unknown
  gut microbiota DNA sequence
gtatgaaaagcaaaactacattttccatccatagaggtttaatggctttctttttcggaatgctgctttgtgttacctctttatctgcacaaaatgcacaagacacaattcttgcgtatttcaatctgctggagaaagttccgcaagaaaaactgtatctgcatttagataagcctttctatggagcaggagaaaaaatctggttcaaggggtatctcgtaaattctgtcactcatcaagacaatacgcaaagtaacttcatcattacggagcttgtcaatcgttccgactctatcgtggaacgcaagaagattcgcagagattcgttaggttttcataatgctttcacgctccctcccactctccctgcaggtgactattatttgcgaggatatagcaactggatgcttaaccaagaaccggaattcttttattcacgtaatctgaaaattggtaattcgattgataacacgattgtttcaactattgagtatcaacaagaagacgaatcacattatacagccaaggtcagatttaccagtaatacacaagaggctttcggaaatacaaccatccgctatcgcaccatcgaaaacggaaagataaaagataaaggtaaaagaaagacggacgaaagcggtttgatttctatttctctgccggatctgaagcctattgccgcacgccagattgaagtagaatttgacgatcctcaatatatttacaagagaacgttctatctgccttcgtttacaaaagactttgacgttaagttcttcccggaaggcggagctctcttgaccgttgctcatcaaaacatagctttcaaagctcaaggatcggatggtttttccacagaaatagaaggatttctgttcgatgcaaaaggagacacattaactgcttttcgctcggagcatgatggtatgggagttttcaccttgaacccgattgcagggaactcctattatgtgattgccaagtctagtgacggcattaccaagcgattcgatcttccggccgcagaagaaaaaggaatcgctctttccatgacgcattacaaaaaggaaatacgctacgaaatccaaaaaacagaagctacccagtggcctcaaaagttattcttgattgcacacactcgtggaaagctggcaatcttgcaaccggtcagtgccgacaggacttttggaagaatgaatgacagtttattcaacgcaggtatcacccattttatgttaatcgaccaacagggaaacgcacttagcgaacgtttagttttcgtacccgaccggaatccacatcaatggcaaatccttgcggataagcctacatacggaaaaagagaaaaggtttccttgcaaatttcagcaaaggatgataacggaactccggtagaaggtagtttctccgtcagcattacagacagaagaagtatccagccggactcacttgcagataatatcttatcgaaccttctactaacttccgacttgaaaggatatgtagaaaatccgggatattatgttcttcagcaagacctgcgtacacttcgcacgatagacttcttgatgatgacgcacggatggcgcaggcatcatatccggaatgtactgacttcgccttcactgaaccttaccaactatatagaaaaaggacaaacgatcagcggacgtatcaagggtttcttcggcggcaacgtcaaaaaaggacctatttgtattttagctcccaaacagaacatcgttgccactactaccacagatgagaaaggagaattcatcgtcaatacatcattcagagacagcacaactttcctcgttcaggcacgtaccaaaagaggattcgccggagtagacatcgtgatcgatgctccccaatatccggtagcttctcctaaaactccttttcatgatggaacatcaacctcctttatggaagattatttgctaaatacccgcgaccagtattacatggagggtggaatgagagtatacaacctaaaagaagtagtggttacaggaagccgcaagaaagccagttcggaaagtatttatacaggaggcatcaacacctacactatcgaaggagacagacttgaaggattcggcgcacagacggccttcgatgcagtcagcaggcttccgggggtcagtgtgacaaacggcaacgagatacatatccgcaacaatcccgaacaacccgttatcgtcattgatgatgttgtctatgaagacgacaacgacatactgaccatgattcaaaccagcgacatgtccagtttgagccttcttcgtggtgctgatgcagcaattttaggttcccgcggatcggcaggtgccatcgtcatcaccctgaaagacggcaaggatcttccggcaagaccggcacagggcattattacatgcactccattgggatatagcgattcagtagagttctatcagccgacttatgacactcccgagaaaaagaatgaccaacgttcggatttacgaagcactatctactggaatccatccttacaactgaatgcagacggaaaagcaactatagaatattatactccggacagcactgcaccagaggatatcatcatagaaggcgtggataaaaacggaaagatatgccggacgatacaaacgatcaacaaaaaataaatgaaactgaatttgagatatgaatagactcattattggtacaaaaaatgaactaaatacaatctattccgtgctccctgcaaacgatttttcattttcatttctcatattctcattgtttttagataaacggaagataatcagattaatatcttatgagaaatactttttaaaacggtatttctcataagtttatccgtattttagctctaaatagaccttattctcatagtgtttcaaggtatttctcatagtgtaatgtgccggaagccggcattgaataaatagaacgatgtattccttttgcttgtttccatatacagtgccttagtcccatatattgtgggaaaagattcccaacagcttgggaaaggattccctcattttgtgggaaagttttccttcaatatatgggaatactttcccacaatatatgggacaatcggaactaatgagcatcttcaagcaaaaagccactattttatctaaatagtagcttcatttcctgataaaaataaggtaagtcgaaagaaaaaaggaaggacgaatggcttttgactatgagaaataccctgaaacactatgagaataaggtcgattttgagccaaaatacgggtaaacttatgagaaatgccgttttaaaaagtatttctcataagatattaatctgattatctttcgtttatcaaaaacaatgagaatatgagaaatgaaatgaaaaattctttttcagtgcgtggaggtgggaattcattttgtacaagaacgaaaacataaagcatccttctccctctccttatcttgataaaaaagtgattgaatatcaaacaggttaaaattatttcgtaattttgcagatataaaagaatgaagctatgccggactatgatttaatcgccatactcggacctacagcctcgggtaaaactccctttgccgcggccttggcctatgaactcaatacagaaattatcagtgccgactctcgtcagatatacagagggatggatctcggtacgggaaaagacttggcagactatacagtaaacggacgtacaatcccctaccacttaatcgatattgcagatcccggatataaatataatgtattcgaatatcaacgcgatttcctgatttcttacgaatcaatcaaacaaaaaggctgtctccccgttttatgtggagggacaggcatgtatctggaatccgtattgaaaggatataagctgatgcccgtgccggaaaaccctgaattacgtattcgtttggcaaatcattcgctcgaagagttgacggaaatattaggccggtacaaaacattacacaattctaccgatgtagataccgtgaaacgtgctatccgtgcgatagagattgaagaatattatgctgcccatccggttcccgaacgggagtttcctgaattgaacagcctcattatcggagtggatattgaccgggaactgcgtcgtgaaaagatcacccgccgattgaaacaacggttggacgaaggaatggtagatgaagtgcggcaattgattgagcaaggaattgcgccggatgatttaatctattatgggttggaatataaatacctgacattgtatgttattggaaaactaacctatgaagagatgttcaacggtctggaaattgcgatccatcagtttgccaaacggcaaatgacctggtttcgcggcatggaaagaagaggatttaccatccattggatgaatgcggaactgccgatggaagaaaagatagcttttgtaaaagagaaactggaagggatttagtatctttgtcagttatatagtgtgatttttaatacacaataggatagatatacgaatatgagtgtagaaccaaagaaatggggagtgatttacaacccgaaagctggtacccgaaaggtaaaaaagcgctggaaagaaattaaggagtacatggacagcaaaggcgtggactatgactatgtacaatccgaaggtttcggttcggtggaacgtctcgccaagattttggccaacaatggttatcgcacgattgtcattgtgggcggtgatggggcattaaatgatgccatcaacggcattatgctatccgatgccgaagataaagaaaacatcgctctcggcatgattcccaatggtatcggaaacgactttgccaaatattgggggcttagtaccgaatataaaccggctgtcgactgtatcatcaatcaccggctgaagaaaatagatgtggggtactgcaatttctacgatggaaaagaacaccaacgccgctacttcctcaatgctgttaatatcggactgggggcacgaatcgttaaaatcaccgatcagaccaaacgcttctggggagtgaaattcctgtcctacgtggccgccctgttttctcttatatttgaacggaaactctataggatgcacctccgcatcaacgacgagcatatccgcggacgcatcatgaccgtatgcataggcagtgcctggggatggggacagacgcctagcgccgttccttataacggatggctggatgtctccgttatctaccgaccggaattcctgcaaattatctccggactatggatgctgattcagggaagaatcctgaatcataaggtagtgaaaagctaccggacgaagaaagtaaaagtactccgggcacaaaacgccgctgtggatttggacgggcggttgttgcccagacatttcccgctggaagtaggggtgctttcggaaaaaacaacgcttattattccaaattgataaattcaggcacggattacgcggattacacgttttttagtaaatctacatctgcaaaagccgtatagtccgcgtaatccgtgcctgaaacataaacttataattagattaagaaaaatgatagaacttaagaacaatcctgccggtaacttctttctgttggcgggtccatgcgttatagaaggtgaagaaatggcaatgcgcattgccgaacgagtagtaaaaatcaccgaagctctgcaaattccatacgtattcaaaggctcttaccgcaaggcaaaccgctcacgcctggattcgtttacaggtatcggtgacgaaaaagcactcaaagtattaagaaaggtacatgagactttcggagttccgactgtgacagatattcacagtgcagatgaagcagctatggcagccgaatatgtagatgtacttcaaatcccggctttcctttgccgccagaccgatttgttggttgcagcagcgaaaaccggaaaaaccatcaatatcaaaaaaggacagtttctttctccgctggcaatgcagtttgctgccgataaagtggtggaagccggaaacaaaagtgtgatgctcaccgaacgcggaacgactttcggttatcaggatcttgttgtagactatcgcggcatccctgaaatgcaatcattcggttatccggttattctggatgtcacccattccctgcagcagcccaaccagaccagtggagtaaccggtggaatgccgcaactgatagagacagtagccaaagctggtatcgccgtgggtgctgacgggatattcattgagacacatgagaatcctgcggtagctaaaagtgacggtgccaatatgctaaagttagaccttctggaagggctgttaacgaagttagtcaggatacgggaagccataaaataactcttttccctgtctatttgtgatttacaaccaaacaagacgacaaataacaaagaaatatttatttaaactaaatagaacatgaaacatttattacgtggattatttattgcagtcctttttatatgctgcaatttccagctcgtacttgcacaacccatgcaagaactgcctgtggacaagaacgtccgcatcggtaaactggacaacgggcttacctattacattcgacacaatgcacttcctgaaaaacgagtagaattctacatcgcacagaaagtaggttctatccttgaagaaccgcaacaacgtggtttggctcacttcctggagcacatggctttcaatggaaccaaaaacttcccgggtgatgagacaggtcttggcattataccttggtgcgaaacgaaaggcatcaaattcggtacaaacctgaatgcatataccagcgtcgatcagacggtatataatatcagcaacgtaccgactgaaaacattaatgtagtagactcttgcttgcttatccttcacgactggtcgagtgccatcgaccttgctgacaaggaaatagacaaagaacgtggcgtaatccgcgaagaatggagaagtcgtaacagcggtatgctccgtatcatgaccaatgcacagcctacgatgtatccggattctaaatattcagactgtatgcctatcggaagcattgacgttatcaacaacttcccgtatcaggatatccgcgattattacgccaaatggtatcgtccggacctgcaaggtatcgttattgtaggtgacatcaacgtagatgaaattgaagccaaacttaaaaaagtattcgcagacgtaaaagctccggtaaatccggccgaacgtatctactatccggtagcagacaatcaggaaccacttatctatatcggtactgacaaagaagtgaaaaatccttctgtcaacatcttcttcaaacaagatgctaccccggattctttgaagaataccatcgcttattacgcaacgagctacatggtcagcatggctatgaatatgctgaacaaccgtttgaacgaacttcgccagactgctaatcctcctttcacaagtgccggtgcagaatatggagaatatttccttgccaaaactaaagaagcattcagtatcagcgcaagcagcaaaatcgacggaatcgatttagctacgaagactattctggaagaagcagaacgcgcacgccgcttcggatttacgccaacagaatatgaccgcgcacgcgccaactatctgcaagccgtagaatctgcttacaacgaacgtgaaaaaaccaaaagcggctcttatgtgaacgaatacgttaacaacttccttgataaagaaccgattccgggaatcgaagttgaatatacgcttttgaacaaattggctccgaatattccggtagaagctgttaaccagatcatgcaacaactgattactgataataaccaggtagttctgttggccggtccggaaaaagaaggagtgaaatatcctactaaagaagagattgccgctctgctgaaacaaatgaagtcattcgacttgaagccttatgaagacaaagtctctaacgaaccgctgatctcggaagaactgaaaggtggcaaaattgtttctgaaaaagccggagacatttatggtacgactaagttagtgctttccaacggtgtaactgtgtatgtgaagcctaccgatttcaaagctgaccaaattgttatgaaaggggtaagtttcggtggtacgagcatattcccgaacgaagagatcatcaatattgctcaattaaacggagtagccttggtgggtggtatcggtaatttcagcaaggttgacttgggtaaagctcttgccggtaaacgtgcaaacgtggctgccggtatcggcaatactacagaaacggtttccggtagctgtgttccgaaagattttgagacaatgatgcagctcacttatctgactttcacttctccacgcaaggacaatgaagcattcgaatcttacaagaaccgtttgaaagccgaacttcaaaatgcggatgccaacccgatgactgctttcagtgacactattacaagtgtattatatggtcatcatccgcgtgctatccgaatgaaagaatatatggtagaccagatcaactacgaccgtattctcgaaatgtacaaagaccgctacaaagacgcaagcgactttactttctacctggtgggaaatgtagacttggcaacgatgaaaccgttgatcgccaaatatctgggtagcctgccatctatcaaccgtaaagagactttcaaggacaaccacatggatatccgcaaaggacagatcaagaatgtattcgcaaaagcacaggaaactccgatggctaccatcatgttcctttatagcggtagttgcaaatacgacttgcgcaacaacgtcctgcttagcttcttagatcaggctctggatttggtttacacagcagaaatccgtgaaaaagaaggtggtacatacggcgtaagctgtaacggaagcctgggtaaatatccgaaagaagaattggttcttcaaatcgtattccagactgatcctgccaagaaagaccacctttctgctatcgttgtggaacaactccacaaaatggccaaagaaggtccgtctgccgaacacatgcaaaagatcagagaatatatgctgaagaagtataaagacgcccaaaaagaaaatggctactggctcaataacatggacgaatacttctacaccggtatcgataatacaaaagactatgaaaagttggtcaacagcatcactgctaaagaagtacaagacttccttgccaagttgctgaaacagaacaacgaaattcaagtcattatgactgtaccggaagaaaacaaataaatatttctctagtatatctactgaatgatgatattcaacgaattacgtaaacatggaaggctcgccgccaaacggcacccgatgtatgaaaagaacaaagttgctaaaatactcggttatgtcatgggcgcattttgggccggttacctgatattcttcggtacgacgttcgcgtttggtttttcagatatggttcccaaccgggaaccatatcatgtaatgaacgcagtggttctgatctttatcctggcactagacttcctgttgcgtgttccgttacaaaaaacaccgacacaggaggtaaaaccttacctcctgttgccggttaaacgaattcgtgtcatcgactttttactgatccgctcgggactaagtctgttcaacctgttctggttgtttctgtttgtccctttttccttcatcactattaccaagtttttcggtatctccggtgttatcacctatcttatcggtatcctgctattaattattgccaacaattactggtatttgctttgccgcactcttatcaacgaacgtatttggtggattctattacctatcgctttctacggtggaataggctgccttctttttattcccgaagatagcccgctcttctatttcttcatggatctgggagacggatatatacaaggaaacattttctattttctcggcaccatacttgtgattgtgcttttatggctgattaaccgcaaaatcatgtccgggctgatttatgcagagctagccaaagtggatgatacccaaataaaacacgtctccgaatataaattcttcgaacgttacggagaagtgggcgaatatatgaggctggaactgaaaatgctcctacgcaaccgccgctgcaaaggtgcactacgcaatatctctatcgtaattgtagctttctccgttgcacttagcttttccagtgtctatgacggtaatttcatgacctcttttatttgtgtgtataactttgccgtattcggaatgattatcctttcacagataatgtcattcgaaggcaactacattgatggtctgatgtctcgcaaagaatcgattatgagtttgctgaaagctaaatattatacatacagtattggtgagattatacctttcatactgatgatccccgctatcatcatgaacaaacttaccttactgggtgcttttgcctggtttttctataccattggctttatctatttctgcttcttccaactggctgtttacaacaaacagacagtacctctgaacgaaaaagtaacaagccgacaaaacaatagtgccatacagatgttggtcaatttcggtgctttcggcgtaccgcttatcttatacagcctgttaaatgcacttttgggagaaacaatcacttacacaatcctgttagtgattggtctcggatttaccctgacctctcctttatggataaaaaatgtatatcatcgcttcatgaaacggcggtacgaaaatatggaaggcttcagagacagccgccaataaacgttcatgaatcattaactatataaacattgaagatcatgattaccattgataaacttaaaaagaatttcggtgaaaaggttgccgtagacatagaacattacgaaatcaatcaaggcgacatgctcggattggtgggtaacaacggtgccggtaaaaccactcttttccgattgatgttggatctgctgaaagcagacgatggaaaagtgattataaatgatattgatgtcagccagagtgaagactggaaaagcattaccggtgctttcattgacgatggcttcctgatcgattatctcactccggaagaatatttctatttcatcgggaaaatgtatgggctcaagaaagaagaagtagacgaacgtcttgtccctttcgaacgctttatgagcggagaagtaatcggacacaaaaaattaattcgcaactactctgccggtaacaagcaaaagatcggaattatctccgccatgcttcattatccgcaattattaatcttggatgaaccgttcaatttccttgatccaagttcgcagtcaatcatcaaacatctgcttaagaaatacaacgaggagcatcaggctacggttatcatatccagtcacaacctcaatcataccgtagatgtatgtccacggatcgctttactggaacacggggccatcatccgggatattatcaacgaagataactccgctgaaaaagaactggaggattattttaatgtagaagaagagtgagggagatttatgagttatgagttgtgatttatgatttatgattgagacacagttgatgaaggcaaaattaaaatttatctatctattagttgggctggctgctatatttagttcctgtcgcacttccgctccccggctggactatcaagcattggcacgagcttctattttattaggtgtagatgtcaatctggaagataatcataagctctatctcgaagcagccgattggataggggttccttatcgtggtgggggtgattctaaacgaggaacagattgttcggggctggtttatcaagtgtatcgaaaggtataccgcacccaagtgccacgcaatacagaagacttgaaaaaagaaagtaataaggtcgctaagcgaaaccttcgggaaggagacttggtattctttaccagtagccgttcaaaaaagaaagtagctcatgtgggtatttatctgaaaaacggaaagttcattcattccagtaccagtaaaggagtgatcgtcagcaacttgaacgagagttattataccaaacactggataagcggaggcaggatacgttaattatcaacttctaatgatataaaattatgaaatcattcatcggagcagttatatttatctgtgtggcattcagtgccaatgcacaacttttatggaaagtgtccggcaacggactaacccaaccgtcctacatcataggtactcatcacctggcaccattcagcatcatggacagcattgccggacttcaaaaagcgatgaatgaaacgcaacaggtgtatggagaactgaaaatgtcggaaatgcagtcgcccgccaccatgggaaagatgcaaaaggcaatgatgatcgaaagtgataccacactgacctccctcctttctccggaagactttgagactgctaacaaattctgcaaagaaaacctgatggtagacttaaatatggctccgaagctaaaacctgccttcctgttgaataatgtagtggtaatggcttacgtaaaacacgtaggaaagttcaacccgcaagagcaactcgacacgttctttcaaagccaagccacccaaaacgggaaaaaagtggacggtctggaaactgccgaattccaattcaacctgcttttcaacggtagttcactacaacgacaagcacagctactcatgtgcactcttaataatatagaagccgaagtagaaaacctgaaaaagctcacgaacgcttacatgaaacaggatttgaacactatgttcaaaatcagcgaagagcacaaaggcaatcaatgcgacgcacttcccagcgaagaagatgccctaatttacaaccgtaataaaatatgggctgaaaaattaccggctatcatgaaagctgctccgacttttgttgcggtaggcgccctgcaccttcccggagaaaaaggattattaaagttactaaaaagccaaggatacacagtagaacctgtgaaataagaaaagtatttagtacttttgcggaaaagttttccccaatgaactacaaaacctatttattcgatttcgactacacattagccgattcgtcgtgtggtatcgttaaatgtttcagaattgtgctcacccggcaccagtatttaaccgttactgatgaagctatcaagcgcacgatcggcaaaacactggaagaatcattcagtatccttaccggaattaccgacccggaacagttagaatctttccggcaggaatacagacaggaagctgatgtacacatgaatgtaaatacccgtctttttcctgatacattatctacactgaaagaattgaagaaacagggtgcccgcgtcggaattatctctaccaagtatcgcttccggatattgagttatctggaagaatatctgccaaaggattttctcgatatagttgtaggaggagaagatgtaaaagcaccgaaaccttcaccggaaggggtactatttgctttggaacatttaggaagtacacccgaagaaactttgtatatcggagatagcacggtagatgctgaaacggcccgaaatgcaggagtagattttgcaggcgtattgaacggaatgacaacagccgaggaactccgtgactatccacacaaaatcattatgcagaatttgggagagttggtccaataagctgcaatgagagttaaaatgctcatttatttgctgtaatcattttatcttctacaaaaaataaaagaaatatttgtcgggaacgaataaaaatagtacttttgtgcccgattattccgcaacgggttcgataaagagctctttaagtgattaaagaccacccgccggagctaacttatacattatatataagatgtacgcaattgtagaaattaacggtcagcagtttaaagcagaagctggtcaaaagttgttcgttcaccacatcgaaggtgcagaaaacggttcaacagtagaatttgaaaaagttcttttggtagacaaagacggaaacgttacagtaggtgctcctaccgtagaaggcgctaaagttgtttgtcaggttgtttcaaacttggttaaaggcgacaaagttcttgttttccacaagaaaagaagaaaaggacacagaaaactgaacggtcaccgtcaacagttcactgaattaacaattacagaagtagtagcttaatcaattaaaaagtaagaagaaatggcacataagaaaggtgtcggtagttctaagaacggccgcgaatcacagagcaagagattaggcgttaagatatttggtggcgaagcttgcaaagcaggtaacatcatcgttcgtcaaagaggtactgaattccacccgggtgaaaacatcggaatgggtaaagaccacactcttttcgctttagtagacggaacagttaatttcaaagtaggtaaagaagatagaagatatgtttctatcgttcctgcaacagaagcataattatccggactgaaaatagttaagacaaggagatgcaatccataagattgtatctcctttctttttatatcaaaacatactttatcgcctgacaagtatacgcctttttaacattcaaatattcacctcatggatatttttcattttttccatccttattattgccaaaatattacagaagtgtaatatcgtttatttttttatctatctttgtagacttaaaaaaaggtttttcataaaaagtatagatatgcttaccattaaacaaattacagaaaacacagaggcggtactccgcggactggaaaagaagcatttcaagaatgcaaaggaaacgatcgatcaggtgatcgctcttaacaacaagagacgtagcacacaaaatgaattagataaaaacctggcagaggttaactcactttcgcgcaccatcggtcaactgatgaaagaagggaaaaaagaggaagctgaaactgcacgtgcccgcgttgccgaactaaaagaaggcaacaaagagctggatgctgccatgacacaggctgcaactgatatgcagaatgtactttataccatccccaacattccttatgacagcgtaccggaaggcgtaggtgccgaagataacgtcgtagaaaaaatgggaggtatggaaaccgaacttcctaaagatgcactcccccactgggaactggcaaagaaatatgatttaatagacttcgacctgggcgtaaaaatcacaggtgcgggtttccctgtatacaaaggtaaaggagcacaacttcaacgtgcccttatcaacttcttcctggatgaagcacgcaaatccggatataccgaaatcatgccgccgacagtagtcaacgctgcttccggctatggcaccggacagcttccggacaaagaaggacagatgtatcattgtgaagtagatgatttatacctgatcccgacagcggaagttcccgtaactaatatctaccgtgatgtgattctggaagagaaacaattgcctataatgaattgtgcgtatacacaatgtttccgtcgcgaagcaggttcttatggtaaagatgtacgtggcctgaatcgtctgcacgagttctccaaagtagaattggttcgtatcgacaaaccggagcattctaaacaatctcatcaggaaatgcttaaccatgtagaaggactgttgcaaaaactggaactcccctatcgtatcctccgtctttgcggtggagatatgagtttcactgctgctctttgcttcgacttcgaagtatattctgaagcacagaagcgttggttggaagtaagttccgtatccaatttcgacacttaccaggccaaccgcctgaaatgccgttaccgtaatgcagaaaagaaaaccgaactctgccacacactgaacggttcagcattagcactgccacgtattgttgctgccctactcgagaacaatcaaactccggaaggtatcagaattccgaaagcattggttccgtattgcggctttgacatgatagactaagacttgacatgacagactaataaaagcacccatatacagagagccactcatcaaaagagtggcttttcttttatatttcgtaaattagctgtatctttgccaaaatttatatcattctgatagcagttacgtaataaaaacaacaaattaattagataatgaacaaaatcattagcaaggaacgcttttctgaaaaagtattcaaatttgaaattgaagctcctttgattgctaaatcccgtaaggccggacactttgtcatcgtgcgtgtaggtgaaaaaggagaacgtatgccattgactatcgcaggttctgacctcaaaaaaggtaccattactctggtagtgcaggaagtcgggctttcttctacccgtctctgtgaactgaatgaaggcgattacatcactgacgtagtaggcccgctcggacaagctacccatatagagaaattcggaacagtagtctgcgctggtggtggtgtaggcgtagctccgatgcttcctatcgtacaggctttgaaagcagccggcaaccgtgttatcactgtactggccggacgcaacaaagacctgattattttagaaaaagaaatgcgtgaaagctctgacgaagtaattatcatgacagatgacggctcttacggtcgtaaaggtctggtgacagaaggcgtagaagaagttatcaaacgcgagaaagtggacaaatgcttcgctatcggccctgccatcatgatgaagttcgtttgcttgctgactaagaaatatgaaattccgactgatgtttcattgaacaccatcatggtggatggaactggtatgtgtggtgcttgccgtatcactgtaggaggaaaaactaaattcgtttgtgtagacggtcctgaattcgacggtcaccaagtgaattttgatgaaatgctgaaacgtatgggcgcgttcaaaaatatcgagcgcgaagaaatgcataaactgcaaccggaatgtgaagcaaccaaagaaatcgacgagaaaagccgtaatgcagcctggagacaggaattacgcaaatcaatgaaaccgaaagaacgtacagccattccccgtgtagaaatgaacgaacttgacgctgaatatcgttcacacagccgtaaagaggaagtaaatcaaggattaacagcagaacaggctgttacagaagctaaacgctgtcttgactgtgctaatcctggatgtatggaaggttgtccggtaggtattgatattcctcgcttcattaagaatatcgaacgtggagagtttcttgaagctgctaaaacattgaaagaaacaagtgcgcttccggctgtttgcggtcgtgtgtgtccacaagaaaaacaatgcgaatcaaaatgtattcatttaaaaatgaatgaaaagcccgtcgctatcggttatctggaacgtttcgcagctgattacgaacgtgaaagcgggcaaatctccgtacctgtcattgcagagaagaacggcatcaaaatagctgtgatcggttcgggacctgcaggattggcatttgccggagatatggctaaatatggatatgatgtaactgtattcgaagcattgcatgagattggtggtgtgttgaaatatggtattcccgaattccgtttgccaaacaagattgtagacgtagaaatcgataaccttagcaagatgggggttaacttcatcaaagactgtatcgtaggaaaaacaatcggcgtagaggacttgaaagctgaagatttcaaaggaatatttgtggcttccggcgccgggctgcctaactttatgaatatcccgggagagaattccatcaatatcatgtcatccaacgaatacctcacccgtgttaatctaatggacgctgccagtgaagattcggacactccggtcgctttcggtaaaaacgtagcagtaatcggtggtggtaatacagcgatggactctgttcgtactgccaaacgtcttggtgcagagcgcgctatcattatctatcgtcgttcggaagaggaaatgcctgcacgtatcgaggaagtaaaacatgctaaagaagaaggagttgaattccttacactacataatccgatcgaatatattgctgatgaacaaggttgcgtaaaacaggttattttgcaaaagatggaattaggcgagccggatgcttccggacgtcgtagtcctgtagccatcccgggagcaacagaaacaattgatatcgacctggcaattgtcagcgtcggagtatcccctaacccaattgttccaagctccatcaaaggactggaattaggacgaaaaggaaccatcactgtggatgacaacatggaatcttccatccctatgatttatgcaggaggcgatatcgttcgcggtggagctactgttattctggcaatgggcgatggccgtaaagccgctgccgccatgaatgaacaattgaaggcaaacgccggtaactaattgccgcttattaacaggtgggctaaaaccaactcacacgtgggcggaacatcactcgtcccccggcataaaaataaaataagaaaagccccgtctacaaaatgtaaacggggcttttcttatttcaaatatcaaagatactttctactttaccactttgttcgtcgcaggatcggggaagattacagccggtttaaacgacttggcttcctcaaaatccatcaatgcataggacatgattataacaatatcatccggttgcaccttgcgggcagcagcaccattcaagcaaattttacccgaaccgcgttcacctttgataatgtaggtttcaaagcgttcaccattgttattatcagcgatatacactttctctcccgcaatcatgtttgcagcatccaacaggtcttcatcaatcgtgatactacccatgtagttcagattggcctctgtgacacgtgcacaatgaattttcgacttcaacacttcaatcatcataaggtttcgtctttttagttattctttatatttaatattatcaatcagccggacttctccacagaatactgtgatgcatccaactgcataggaagtatcttcccaattactaattttctgcaatgtgtttccatctacaatctcaaaatactccatgcgcaagcccggagcagcttcgattgcatcttctaccatcttttgcgtctcgctcaccgtgtgagtggctgcaaagttacgacttttaaataaggtccgggaaatatttaaagcattttcacgttcttctgccgataaacgtttattccggctactcaatgccagcccgtcttcctcacgcacaattgaacaacccacaatttcaaggttatatttcaattgtcgaaccatctcacgaataattgctaactgctgaaaatctttctctccgaaatatgcgcggtccggctgtacagcatcaaacagtttactgacaatctggcaaacaccgttaaaatgccccggacggaaagcaccttccatcaccgtatctaatggtgcatagctaaattgacgggtatccggttccgggtacatttcgcttaccgaaggagcaaaagcgaaatccgccccgcattcttccaacaaacggcaatctgcatctaatgtacgcggatacttctctaagtcgtttttatcgttaaactgtgtgggattcacaaaaacactcacaacagttacaccattctcacttacgctgcgctttaccagagatgcatgtcccgcatgtaaagcacccattgtaggaaccagtcccacctttttaccttgggctctcaaggcagtcaattctgcctgtaagtccttgatagtgtgcactactttcattttcgtcaattggtttatgttttactcgtttgcaaaaactctgcaaaataaactaatatttgccacataaagaaagaatatcttatttaatgtgtcttttttttcgtatctttgcagaatattatagtgaactattgttattatgacaaaggcgaataaagttttatttattactcaagagattacaccttacgtttcagaatccgaaatggccaatataggtagaaaccttccacaggcgatacaagaaaaaggccgtgaaatcagaacctttatgcctaaatggggaaatatcaatgagcgcagaaaccagctgcacgaagtgatccgcctctcgggtatgaacctgatcatcgacgatactgaccaccccttgattataaaagttgcgtctatccaatccgcacgcatgcaggtatatttcatcgataacgatgattatttccagaatcgtatgcagacagcggacgaaaatggtgtagaatatgaagataatgatagtcgtgccgttttctacgcacgcggcgtattggaaacagtgaaaaaacttcgctggtgtcctgatgtcattcactgtcatggctggatgacagctctagctcctctttatataaagaaagcctataaagacgaaccttctttccgcgatgccaaagtggtattctctgtttatgaagatgacttcaagaatacacttagcgatgatttcgcagccaaattgatgctgaaaggtatttccaaaaaagatttaggtgatttgaaagagccggtagactatgctgctctgtgcaaactcgccgttgattattcggatggagtcatacaaaacagcgaaaaagtagacgagtctattattgaatatgcccgccaatctggcaaattggtacttgactaccagaacccggaaaactatgcagatgcctgcaacgagttctacgatcaggtatgggatgctactgcaaacgaagaagaataaaaaaatcaagatacgacgatcatgaaagcaaaatacgccttaatagctttactggcaatcactttttggggttgtgatgataacactgccggactgggattgggaatgtttccgggaagcgaccagaatatcaatggaaagctatctacctttgatgtgactacagaatccgttcatgccggtaagatatatgcaatgaccaatgttggttatataggtaagttcacagatgaaacattcggaacttatcaagcaggtttcttggcgcaactaaattgtcctgaaggaatgacattccctggagtatacaatgggacagctttagacagcaaagggaaagctactcaaataatggtaggggacgataatgaagataataaagatgtcactttcatacgtgatgatgaaaataaaattattggtaacatccatacaattgaactttacctatggtatagcagctattttggagattcattaacagcttgtcgtttaagtgtttacaaactaggagaggctaaaaaagaacttaatcaagagaatgcatattatacagatattgagcctgaagaattttataatcctgaaaatctactgggaactaaggcctatacagcagtcgatttatctgttaaagattctatccgcaaactcagtacatatgtacctagcgtacatgtttcttttaaacaggacgctgcaatagaaattggcacaaagattatacaagaagctaacaaatttggcgttaattttgataataaaacattcagaaaaatattcaaaggtatttacgtaaaaagtgattatggtgatggtactgtgctttacatagaccaagctcaaatgaatgtagtgtataaatgctatgcagttgacacacttacaggtgttaaattgaaaaagaaagtattagaagagggagacacagaatataaagactccacttattatggctatcggacttttgctactactcgtgaagttatccaagccaatcaattagataatgacaaggatgctattcaaaaatgtattgatgaagatacttggacatatctaaagagtccagcaggaatattcactcaagtaaccattcctgttagtcaaatagcggaaaaactccaaggtgatacactaaatgctgtaaagttaggaataccgatctataacgaaaccaatgataagaagtttggaatgtctacccctagtaacgttttattgatacgcaaaaagtacaaagacagtttcttcaaagacaaccaactaagtgatggcataacttcatctctatttactcctaccacaaccagctttactcaatatacattcaataatatcactcaaatgataaatgattgtttatcagatagagaaaaagcagagaaggaaatacgtgaaaagggatctataacaattaaaataactgactcggaaggaaatagtaaagatgagcttgttaataatattatagattgggaaaagttaagtgaatggaataaattcgtacttatcccagtacttgtgaccaaagactcctcttcaaataatagttactatggttccaataatattattagtatacagcatgatttaaaacctggttatgcacgtttaaaaggaggcagtaaaggaagtatacaagatgttcaaggcaaccctttatatccagagtatttactaaaacttgaagttgtttctactaacttcggaacaaaatcgaaatagaagataaataaaagaatctataaaaagaatggcacagattactctactaatgtaatctgtgccattc

SEQ ID NO: 8048 - DNA, 5039 bp, Unknown
  gut microbiota DNA sequence
aatgtcttacgcttgatttttcaattcattctttctctttttccacaactgccacgaattgataatattctgccacaacacatacgaaccgggagccacagaagacaatggattcaaataagtatgtgccatccaaatagccagaatcgtattcttttgtcccaacgcctgcccgccactgatacggtcattataaattgagccgattgtcttccccaaaaagaactgcaaacagcaggcaatcagtgctccgacagcaatcatgatttccgtaaaaccatccgctggatcattgagcaaggaatacaatgtctgcgctgttacgatagctaaagacacagcccacaaataaaaagcaagttcatgatagcccaataacttctgatgcacttttggcaaacacttactcaacaaccaggcagccaaaaaaggacaaatcaacaacggaaataccttacctaaaataacaagaaacgcctccccaaaagtgacatcaggatgcacctccaccaaaggaaaaagaataggcacagcaatagccgcaccgatatttgctatcaatgtataagtagtcagactggctgcactcccacccaacttggaagtaatcaccgcagcggccgtagccgtaggacaaataatacaaaccatcactccctctgctactattttatcaaagcgataaagcaacaaataagcagccaacgctccgccaatctgaatcaataacaaccacaaatggagaggtttaggcttcaaatcacgaggagataccttacagaaggtcaatagcaacatcgtaaaaataagatagggagtcagaaaagaaaggctgataaacagcggataacctatagcacctaccagcatagcaataggtaacgtccaattcttcaaaaacttaagcatcgtcgtacattttaacttcgaagcacaaagtaacggagatttcaggaaaaaagctaccattaaaccgaaaaaaacacaaaacttaatggcaaataatgagttttctacaaatttctactacatttgcaccgtattatagatatgaaactgaatagaccgtacatattatacatattcatttgcctctggctactttttctaccctcatgtaccaaccacttatgggggaaggattttgtagtagttatcgacgcaggacatggcggacatgatccgggcgccatcggcaaaatctcaaaagagaaaaatatcaatctgaacgtcgccctgaaagtgggaaatctgattaaaaggaattgcgacgacgtcaaagtgatttacacccgtagcaaagatgtattcatccctttagaccgacgcgcagaaattgccaacaacgcgaaggctgatctctttatttccattcacaccaacgcactggctaacaaccgtaccgcaaaaggtgcttcaacctggacactgggtttggccaaatcagacgctaatctggaagttgccaagcgagagaactccgtaatcctctacgaaagtgactacaaaacaagatatgccggtttcaacccgaactctgccgagtcatatattatatttgaattcatacaagataaatatatggagcagagtgtacacctggcttcgctgatgcagaaacaatttcgccaaacttgtagaagggcagaccgtggagtgcatcaagccggattccttgtcttaaaagcgagtgccatgccgagcattctgatagaactaggatttatttctacgcccgaagaggagcgctatctgaattctgaagaaggggccggcaccatggcaaaaggcatctaccgtgctttcttaaattataagagagaacatgaactgcgcctaacgggagtcagcaaaacgatcgtcccaaccgaacaggaagaagacaatgccccggcaattgcccaaaaggataccgaaagtgtgaacacagctccccaacaggaaaagctattggccgaagcaaaaacaaaacctgccgcgacagcaaaaacagcaccgaaacgcccaattgtagtagagagtgcaaccaatgacagtgaaattacgtttaagatacagatacttacttcttccaaacctctcgccaaaaacgacaaacggctgaaaggactgaaagaggtagattattataaggaagggggaatatacaaatatacgtatggagcctcctccgattataacaaggtgttgcgtacaaagcgcaccattacggcacaattcaaagacgcctttatcatcgctttccggaacggcgagaaaatgaacgtcaatgaagcgattgccgaattcaaaaaaagaagaaataaataaaaagataaaatgaagtacattacaaaagaagtcagaataggtattgcaggtatcgttgcactatgtgtgcttatatacggaattaactggctgaaaggtatacacatgtttcaaccgtccagctatttctatgccaaatttgaaaacgtaaacggactcaccaaatcaagcccggtatttgccgacggtgttcgtgtaggtatcgtgcgtgacatctattatgattatgccaaacccggaaatgtaattgtcgaagtggaactggacacggaactgcggattcccaaaggaagtagcgccgagcttgtatccgaacttatgggaggcgtacgcatgaatattcttctggcaaacaacccgcgcgaaaaatatgccgtaggagatacgatccccggcacactgaacaacggaatgatggaaagcgcggcgaaactgatcccaaaggtagaagaaatgcttccgaaactggattctatcctcatctctctgaacaatatattaggagacaagagcatccctgccaccctgcactcgatagagaagacaaccgccaacctggcagtagtcagttcgcaggtaaaagggctgatgagtaatgacatacctcaactcaccagcaagctgaacaccatcggagacaacttcgttgtcatcagcggaaatttgaaagaagtagactatgcagccactttcaaaaaaatagacgaaacgctggctaacgtaaaaatacttacagaaaaattaaacagcaaagataacactatcggactgctcttcaacgacccgactttatacaataatctgaatgcaacaactgaaaatgcagccagcttattagaagacctgaaagagcatccgaaacggtacgttcacttctcattattcggcaagaaagacaagtagcaaattatcgttatatagattttatctaaataacgaagggctttcaaaagaaagtagattgctcttcaaatgtctatctacaaaccgaaataatattcccgtacaaacgtacaaaagtgagaaaaaaggctaaaattatatatataagacattaacatacagatacttacaaaactgcaagagagggtaaacagagtgtgtccgacaacaaacgcataagtcattgaaagtaaacacattattgttagcatgaaaaaaacaagaaaaaatagatttgttttttccgaataagattcccaattttgcaaacgtagaagttttgcttaattaataaatgtattaaaagttactatgattgaatcaaatcatgtcgtactttggaaccgctgtctcgacgttattaaagacaatgttcccgagacgacatataatacttggtttgcccctattgttccgttgaaatatgaggacaaaacgttgatcttacagatcccgagtcagtttttctatgaaatactggaagagagattcgtagatcttatacgtaagacattatataaggtcattggcgaaggaaccaagttgatgtacaatgtcatggtggacaagacttcgattccgaatcaaaccgtgaatctcgaagcaagcaatcgttctacggctgttactcccaaaagcataatcggaggaaacaaagctcccagcttcctacaggctcctgccgttcaggatttggacccgcatttgaatcccaattataattttgagaacttcattgaaggatacagcaataaactttcaagaagtgtggcggaagccgtagcgcaaaaaccgggagggactgctttcaacccgttattcctttatggagcatccggagtaggaaaaacgcacctggcaaacgcaataggcacgaaaatcaaagaaatttatccagagaaaagagtattgtacgtttcggcacatttgttccaggtacaatatacggattctgtacgcaataacacgaccaacgactttattaatttttatcagacgattgatgtattaatcattgatgatattcaggagtttgccggtgtcaccaagacgcagaacaactttttccatatcttcaatcatttacaccagaacggcaaacagcttatattaacttcagaccgtgctcctgtattgttgcaaggtattgaagaacgcctcctgacccgtttcaaatggggtatggtagccgagcttgaaaagccgacggtagaacttcgcaaaaacattctacgcaacaagatacaccgcgacgggttacaattccctccggaagtgatcgattatattgccgaaaatgtgaatgaaagtgtacgcgatctggaaggtatcgtcattgctatcatggctcgttccactattttcaacaaagaaatagatttggatttggcacaacacattgtacatggcgtggttcataacgaaacaaaagcggttaccatcgatgatatcctcaaagtggtatgcaaacattttgatctggaaccgtctgccatacatacaaaatccagaaaaagggaagtcgttcaagcacgacagatcgccatgtatctagctaaaaaccacacagacttttcaacttctaagataggtaagtttatcggtaacaaagaccatgcaacggtacttcacgcctgcaaaaccgtaaaaggacaattggaggtggacaaaagctttagtgcagaagtacaggaaatagaatcgttactgaaaaagagaaactgaaatcaagtattaagtataaagtattaagtattatccatgcggacaggctttattatgcggtt

SEQ ID NO: 8049 - DNA, 21419 bp, Unknown
  gut microbiota DNA sequence
cttactttgctagttgctaccactcgtcaattttcacttatcatcctccgctttcgtcttcaaaccgatttcttcctgtgctccttcacattcggctttggaagaaagatagaactctaattttacatcgccgttcttatctacttgtttgatggtcgcaatcaccataattttagcttttgacacaccatccttaaaacgaagctgtcccttttccacatctgtcagatttccctctgtagatacttctgttttctcaaagatgagtttagtatccacttcatcatcattctgaagtctaaaggttttcagttcagctccatttccatccaaaagcagaagagctttcacttcgtcccccaccttcaaggccggcaattcgtccctctgattcgcatagtctttttcaccggaaccggaactttcatcctccgattcaacctttgcataaagcttttctatcttgataacaggactttccccactatcagagcaggcgcctaaaaacaatggtagcaacaataatactctctttttcatgctatcgtcgagtttataacgttacaaaaatacacatattcttctaaacaacaaataattatacaagtaatacaccgcaattcagtagtgccgaacagtctacacgacaagagttggcagtacataccacatggcaagtaatcactaaactatcttcccgttctaacttatctctcgttttttatcgttatctttgcctcgtatacaactgtagattaagcgaatcaaactaaaaagaacaaataaaatgacaggaaatttattaaagaaatccagtggattcatattattatgtagcatatcattgctaatgctcgtaatgaccggttgccaggaagccaaactcaagacagtgatcggagtagccaacaaacagtgtccgatagacatgggagcagtcggtacgatcaccagcatcatctacgacgggaataacgtagtgtacacgctgaacatgaacgaagagattaccaatataaagatattgaaagacaatccggaaagcatgaaatcatctatcacaatgatgtttcaaaatccggcagcagatgtaaaagagatgctcaagttgatggcaaaatgcaattccggattacacatgatatttgtagggaataagtcgggcgaacaagcggtttgcgaacttaccgccgaagaactgaaagaagtgattaatacaaatgccgacccggcacaaagcggacaaacaaagcttgaagcgcaactgaaaatggcgaacctgcaattcccgatgcaagccagcgaagaagtcattgtcgaaaaaatcgaggtcataggcgaatcagttgtttatatatgcagtgtggacgaagaattgtgtcccatcagccagattgaagaaaacgcagcagaagtgaaagagggtattgtatcaacactggcaagtcagaccgatcccgccacccagatattcatcaaaacctgtgtagataacaataaaagcatagcttacagatatatcggcaaggaatccggtcagcaatacgatgtgattattcctctgtctgatctgaagaaaatgcttatagaaaaataaaatatcatcttaaaaagattctgcaacgtaccaaagtatgaaaaagaaactgaaagccgtcctgtttgacatggacggcgtactttttgactctatgccctatcattcggaagcctggcatacagtaatgaaatctcatggactcactcttagccgcgaagaagcatatatgcacgaaggacggacaggagcctccactattaatattgttttccaacgtgaactgggcagagaagctacccaagaagaaatagaaagtatctatcaggagaaaagtgttttgttcaattcgtatcctgaagcaaaacgtatgcccggtgcatgggagttgctacaaaaagtgaaaaaggatggattgattccgatggtggtcactggttccggccaactatccctgctcgaacggttggagcacaactatccgggaatgtttcgtaaagaattgatggttacagcgttcgatgtaaaatatggtaagcccaatcccgaaccgtatctgatggcattgaaaaaaggcggacttaaagctgatgaagccatcgtagtagagaacgctccgttaggagtggaagccggacacaatgcgggcatctttacaatagctgtaaatacaggtcctttggacggacaagtattgctggatgccggagccgatctgctactgccatccatgcaagcactaagcgaccattgggatacgctgtttgaaaagaacacctaaaagctgaaaagataatttattcttcaaaataggagaaaaacattgaaaagaaggaatataaatcgtatttttacaggagtttaattcacttagattccatctaagccaacgcagattctactatgcaaaagttattatccttaccacccaatttgatccattgcttccacgaactggaagaagtcaaccataccgattggttttgtacatcagaccccattgggagcaaactaggctccggcggcggaacgacatggttattgcaggcctgccatcaggcattcgcgccacaaaaatctttcggcaactggataggagatgaaaaaagaatattgctccatgcaggcggacaaagccgtcgcctgcccagctacggaccttccggcaaaatattgactccgatcccgatcttcagttgggaaagaggacaaaaactcggacagaatctattatcattgcagctcccgctctatgaaaggattatgaatcaggccccggccggtctgaatacgctgatcgcaagcggagatgtatatatccgttcggaaaagccactccaggatattccgaatgcagacgtagtatgctacggcttatgggtaaatccttccttggcaacccatcatggtgtatttgtttccgaccggaaaaagccggaggttctcgacttcatgttacagaaaccttctcttgaagaattagaaggattatcgaaaactcatcttttcctgatggacatcggtatctggattttgagtgaccgcgccatcgaagtattgatgaaacggtcattaaaagaaggaaccaatgatattaattattatgacttatactcggactacggcttggctttgggagagcatcccaaaacggaagatgaagaaatcaatcagttatccgtagccatattgcctttgcccggtggagaattctatcattacggcacaagccacgaactgatttcttccactttagccatacaagacaaggtacgcgatcaaagaaggatcatgcaccggaaagtaaaaccgaatccggccatctttatccagaactctatcacacaagtttctctttctgcagacaatgccaacttatggattgagaatagtcatgtggaaaaaggctggaaactggggtcccgccaaataataacaggggttcccgaaaaccaatggaacatcaacttaccggatggagtctgcatcgacattatccctatcggcgacaatgactttgttgcacgtccgtatggattagatgatgtgttcaaaggagcgttggacaaatcaacgactacctatcttaatatccctttcacccgctggatggaagaaagaggaattacctgggaggatataaaaggacgcaccgatgatttacaatcagcatctatcttccccaaagtaacttctgttgaagatttaggcatattagtgcgctggatgacatcggagccccaactggaagaagggaaaaaatgttggctgaaagcagagaaagtttctgccgacgaaatctcggcaggcgccaacctcaagcgtctttatgaacagcgcaatgctttccgtaaagagaactggaaaggactggcggctaattatgaaaaaagcgtattctatcaacttgacttactggatgccgcaaacgaatttgtacgttttaatctggatactcccgatgtcctgcaagaagatgccgcacccatgctacggatacacaaccggatgcttcgcgcacgcatcatgaaactacgtgaagacaaagattgcgcaaaagaagaacaggcagccttccaactgctccgcgacggtttattgggagtgatgaacgaacgtaaaagtcatcccacactcaacgtttattccgatcagattgtatggagccgcagccctgtacgcattgatgtggcaggaggatggacggacacccctccctactctctttattcaggaggaagcgttgtcaatcttgccatcgaactgaacggccaaccgccgctgcaagtatacgttaaaccttgcaaagaatatcatattacccttcgctccattgatatgggcgcaatggaagtgatacgaaattacgaggaactgcaagattacaaaaaggtgggttctccattttctatccccaaagctgccctaacattggcaggcttcgcaccggcattctcaacagaatcctacccttctttagccaaacaactggaagctttcggttcaggaattgaaattaccctgttggctgctattcctgctggctcggggttaggtaccagttccattctggcctccaccgtgctcggagcaatcaatgatttctgcggactggcttgggataagaatgatatatgcagttacacattagtattggaacaactactgaccacgggaggaggttggcaggatcaatatggcggtgttttttccggcattaaactactacaatccgaagcaggtttcgaacaacatccattagtgcgttggttgcccgatcaactctttattcatcctgactaccgcgactgtcatctgttatattatacaggaattacccgtactgccaaaagtattctggcagaaatcgtcagttccatgttcctcaattccggtccacatctaagtttgctagccgagatgaaagcccatgcaatggatatgagtgaagctatcctgcgcagcaacttcgatagtttcggtcgattggtcggcaaaacctggatacaaaaccaggcattagattgcggaaccaatccgccggcagtagcagccattatcgagaaaatcaaagattacaccctaggatacaaactccccggcgcaggtggcggcggttatttatatatggtagccaaagaccctcaagcagccggacagatccgacggatattgacagaacaagctcccaacccacgcgctcgttttgtagaaatgacgctttctgacaagggacttcaggtttcaagaagctaaagaagaggcattgccagattaccggtcaatctcattcagagccacaaaaaaacaagcttggacagattcaaacgaaatgtccaagcttcaatttttcaatgccataatgatctgttttacatgttgagacttgaaataactgtaaagtaaatcataataatgataaaaccaatagctccgataatcagcgccacactagcccatttcttttttctagcttcttccattctaatttatatttatgggattaatataatttatcgtcagatatctacttccggaaagctataaatacactatatcaacatcatttttttacttcttcatcgttacaaagttagcattttctatgagatttcaatcatctaaaacaacttttcattctctttagactaaattatgcaactacagataataatatggaacacaagattttatctattactgtttttttatcatgtgaaagttgtatatttgcataattgacaattctgattaaacacattcacaccaggaaaagaatcaaaaaacaataaaaatacaaagatgaaattacttaaattactattcgttgttttgctgtttgcctgcaatgacgactcaaaagacactccgactaccggagagcccaaacaaattgttgtagaaatggacgctgccgcctccaatgtgacagatgtttccggcacatatacgttggaagccaataaagaatactgtgttcgggaagatggaaaatataagatattattagtaaaaagcgtctatacagataaagaaggaaaagaaaaggatattcttacttacggtattcttgatgtagcaaagaacaaatatctctattatacagcaggaattgatgtagccaaaagactggaaagagactggaatttctatgatgacaacaacccggataacgctgccaaacagctgatttgcacttcccatctgaaagaggaataaatagaaaattaaaaaacgcaattaccccaaccacgggcagtatattaaagatgcaaattcttatttccaacttgggctattagtgattatgaaaagaataattctctcttccttattggttatttttgttgttggctgcatcggaattggtaatcgtgaagttgctgacaacgggtacatgaactctggttatacgaaaaaagagctcgaagccaaagggatcaataccgagcatctgttcgtatttacagaaaaatgtgcaacttacaacgggcaagtattctcgataggcatccccattgattcccttattaaaatatttggacccgaaaatagaatcctttacggaaaagatggcaatgtgggatataacaactatttttgggatgaaatcggctttgtcgctttagtctcccccgaaaaggaggtgatgcagttcaatttgcattgggattacgtgccgaaagaaaaagagtacgattatgacgatccggatccggctgaggttccggttaattttttcaagggcaagattctattaaacggagttccactcgacaatacatcggattatgcggattattgcaataataaagaggtgcaaagtcagttgcgtaaattggctcgaaaggaaggaatcagaaattacactaaatgtttttataattacggggtcaatagtggatgtaaccgttatcatagttcttatcacaagctctactgcttcgattatacaatgttcgagatcgatccccttgtcgccccctgcttctcgtatcgggtgaaaatattcaccgagacgggacaaattcatgaattcggaatgcagcacgatgtctataccaatccggatgctatcgacctcttttaaatctaactgtcaccttgaacatcagcatgttaggtattatattttccaccaacaattaaccaacaactatcaactacaacgagtaaatccaccattttaagcccagttctacaaggtataacaaagaagaaatccctcaataatctactgattatcaagggattcatctgtgaccccggtgcgattcaaacgcacgaccttcagaaccggaatctgacgctctattcactaagctacggggccattctttctaaatgcgaggacaaaagtataaaaaatcttctcatcttcctaatgattcttctttttttatagttcttaaagtacttccccatgttaagacattgttattttgaaatgctttagagcatttactttatcaaattgacaatcttttagagaatatccattacatatatcaattttattcctatctttgccgacaattaacatttaacaaacctatgagttacttgataaaacctaagaactataatccgctactcgacctcaaacagaccgagctgggaatcaagcaaataaaagagttcttccaattaaacttgtcatccgagctacgccttagacgtgtgactgccccccttttcgtattgaaaggaatgggtatcaatgacgatttgaacggaatagaacgacccgtttctttccctattaaagatctgggcgatgcacaagccgaagtggttcattcattggctaaatggaaaaggttgaccttagctgactatcatatcgaacccggatatggtatttatacggatatgaacgcaatccgttcagacgaagaactgggcaacctgcattctctctacgtagaccagtgggactgggaacgtgtcatcaccaatgaagaccggaacgtaaacttcctgaaagagatcgtcaaccgtatttatgcagctatgatccgtacagaatatatggtatacgaaatgtatccgcaaatcaagccgtgcctgccacaaaagctacatttcatccattcagaagaattgcgccaactttatccggatctggaacccaaatgtcgcgaacatgccatctgtcagaaatacggagctgtgtttatcataggcataggctgcaaacttagcgacggcaagaaacacgacggacgcgcaccggactatgacgactacacaaccaaaggattgaacgacttgcccggactaaacggcgacctccttctgtgggacaatgtactgcaacgctccatcgaattatcatctatgggaatccgtgttgacaaagaagccttgcaacgtcagttgaaagaagaaaaagaagaaaaaagactggaactttatttccacaagcgattgatgaatgacacccttccactatctatcggaggaggtatcggacaatcccgcttgtgtatgttctaccttcgcaaagctcacattggagagatacaagccagcatctggcccgaagatatgcgcaaagaatgtgaagaacttgatatacaccttatataacaaactatgaacgtacaaattgaagaaagctggaaagcacatttaaaacccgaattcgacaaagactactttcgcacactgaccgatttcgtcaaaagcgaatatagccagtatcagatcttccctccgggaaaactgatcttcaatgctttcaacctttgtcctttcgacaaagtgaaagttgtaattataggacaagatccctaccatggaccgggacaagcacatggtctctgtttctctgtaaacgacggagtgccttttcccccttcattagtgaacatattcaaagaaatcaaagccgacatcggttcagatgccccgaccacgggaaacctgactcgctgggcagaacaaggagtattattactcaacgcaactctgacggtacgtgcccatcaagcaggttcacatcagaatcgtggctgggaaacatttaccgatgctgcaatccgtgccctggcagaagaaaaagaaaacctggtatttatcttatggggatcatacgctcaaaagaaaggggcgtttatcgaccgcaacaagcatctggtgctcacctctgcccacccctctcctctttcagcttacaacggcttcttcggaaacaaacatttcagccgtacaaacgattacctgaaaacccatggaaaaacagaaatcgcatggtagttggagaagttgagaatggagagttgagagttaagaataaagagtaaagagtaaagagtaaaaaaatggctgcactattcgtcgaatgatagcgcagccatttttctttttctatattgtagcaaaacaattacacgtccgaatttccactctcaactctccactctcaacttatcctagtaccactgaatgttactttgcgtttggcttctctgctcatacttcaagtcttgcaagatgcttgcattcgcacggatggtaacattgtaatatttccagcgtccgaaaggagaaagactggcggacaggttgaaacagtgcaaatcacgggagattgtacaagaagtctgcgtaatctcttttgcctgaaaatcatagcccgagttgaacgagagcgaccagttattagaaatctttatatttccgtttgcattgatgttatgcgtatacgtataaggatatcgcatggaataacggttaataggcttagacctatcttcacggatattaaacgaatagctaaggcttaacgaccaaggcatcttaaacacctgataaccatccgggtctgcctgtgctttctctactttcttaggtgtagtaccatctccttccgttccgtcagattcttcatcgtcactatcctccgacttcttatcttttcctttttcatcctcctctttcggaccgaaccatttcttccatgtgtcattattaaaggtatagttgaaagaagaaccatatccttggaaacgcccaaaacgaccatacgaccattctgtacggttactggtcactacattaccgcttttatcgaatgtataagcatacgtagcgaattgggcattcatattgaaagtataattcttggtcagtttcagacggaggttcatacttaagtcactccacggtctttcctttgccgccatattataggacatattggcactcaaatcatcaataaggctaactttcttgactgtatcattctttgcgtcataatacttcatctccaagttattagctatcgagaaactaaccgttcccgacccctcacgagaaggcacgccataaggctgattggtaaaaggagaataatattgtgtattaccattataatcggtatattcttcccagtacttgccaaatcccggagcaccactcaaactcacctgcggtgtgaatacgtgacgaatctgtatctccttcttcttcgcaaagatcggtttatacataccatacaatttcgtacttagagccaaactagccgagtaattggatacacgataaaagccgttaagagaatcgcccggcaatgattccagcctgtgagtatcttcgttataatgctgattgattttacgggtgtaccatcgttctgtataattcacagaaggattgacctgcaaatatttgaacagcgtaaaagtagcactgataggaatgttatggttcatcgcattctcccatgagcttagtccggctttgaacaaatggtcatctttagtacggatactgtttgtcagacgtcccgtataaccaatggaaatcttctcgtaccaacgttcggctcctgccgctttcttgcgcttgaacggaaacagacggctcaacgtaatattcaagtcaggcaaagtgaccgcaatagaagagtcacgcattgtctgtgcgatattggtagttccggataaggtcagaccgatatcgggaaaactacgagaataactaatacttgatgttttggtattttgagtcaacaactgcgaattataaaggttgttgatattagaacgttcataactactggtcgagaagttcacactggcagagaatgtagtgttcggactggctttagcatcctgtcgatggttccataccaccttaaagtccttagcaactgtatagtccggcatccctttatctccagtcttggtgacctgatagtccgcttgcagcgtaccggaatatttatagcgtttattatagtttgtcaatccagacaatctccatgaacctttcgtgaagatatctcccgttattttcaagtccatgatatcactcatggcaaagtaatatcctccttctgccaaaccgaaaccacgactggagtcatccatataagtcggcataatgaaaccggaagagtaactgctggagaatgggaagaagaagaacggcacagccaacggcagaggcacatcttccacaaccagataggcaggtcctgtcactacattctttttagggcgcaccttagctctcgtcagctgcatatagaagtggggatgatcgtgatgatcgcaggttgtataacgcccatgctccatgaaaatttcatcattggcccctttcttcgccttgcttccggtcacatatccttctccctgctgggtgacgatatcagtaattcccgctttcttggttttgaagttatatcggattgtttccgtatcatacgaggtatcaccttctttaaataccggtttacctttttccactccggtagtatccttgataccataagcatgcacagtactactatccagattcatcgaaataacttccgcagccagttcgatgttctgataattcacttttccgctaccataaagtgtagcggctcctcccaaagtaaagacagtggagtcgttagattcataaacaaccggtgcatcgagtggttgtttcttctttaccggtgcgatagaatcaatgcgtaccgttaccgtatctgctttcaacgaatcatttccctgaagggaatccgttttcgcggtattggaggcaatcattcctcttcttcgacgttgagacgtagcctcatcgggaagcatcagtaagacaatcagcagtatgaatgatataagtatttttgctttcaatggcgccattaactaatagtttacgcttgaagtggcaaaagtacacaatcttcaccaaatatgagttagaatcttcgttatttaattattttttagtgctataaaaagagagaacaccatctatcaaagcggcttagaccttcttcaccatattttgcaatactttgccgtgctttctccactgttttctcttcatccagatgggttttagaaaagaatttatccgcaaagcaaatcaattgttcttccagggtgatgggcagcatctcgcgatgaggaacgggaagttgctgggcaatgatatcttccaacgaaagccctgcccccgtatggcgttcgcacaccaatgcgtgttggggaaaaccttccgcccgcaagatttcggctcccaaatatccgtgagcgatataaggatgagtgccaaagcactgaatggttggagcgtcggtctgaaaaataccaatatcatgcaacagagcggcttcttttacaaaactccggtttaaacgcaattcgggatgagcatccagcattttcattgcttttccggacacggccaaactatgtattactaatatttgtctctgctgggtattctccggataatacttatcaatgatttcgtatggattcatgtgctttattttttgctctcttgatgagaaattaatatttttgtgcaatattacaaaaaaattaccgatatgcaaactagagtttccttcattcttatatttttgttcattatgttgttgccaatgcgtgtaaacagtcaaattgtcacgggagcagaacagatggatcaatatctgccgttgctgaaaggaaaacgcatcggaatggtggtcaatcacacttctgttgtaggaagaaagcaggttcatcttctcgataccttattaaagagagacgtccgggtggtcaaggtatttgctcccgaacatggtttccgtggtaacgcagatgcgggtgaaacagtgaaagacggaaaagattcccgcaccggcattcctatcgtatcgctttatggtgacaacaaaaagccgtctgctgcccaactaaaagatgtcgatgtgattgtattcgacattcaggatgtaggggcacgcttttatacctatataagcacgatgtattatgtgatggaagcttgcgcagagaacaagaaagaaatggttgtactggatcgccccaatccgtgcgattatgtggatggtccgatactcaaacctgcctaccggagttttgttggcatgttacctcttccggttctccacggatgtaccatcggcgaactggcacagatgataaacggggaaggatggattgccaacaagaaaaatccttgttcattaaaggtaattccaatgaccggatggaaacacggagcaccttattcacttcccatcaaaccgtcgcccaacctcccgaacgaccagtctatccgattgtatgcctcactttgtccttttgaagccactcgcgtcagcgtgggacgggggacaactttccctttccaggtattaggcgcacctaataagaaatacggaagtttcacttttactccccgctccttacccggttttgacaaaaatccgatgcacaaaggtatcacctgttatggggaagatctccggaatgtaaccgatgtaaatggatttacgcttcgctacttcttgaacttttatcgcttatccggcgaaaacgcagctttcttctcccgtgcccgatggtttgatttgctgatgggaactgacagcgtacgcaaagctatcctcaaaggagaatcggaagaggctatccggaatagttggcaaaaggaattacaggattacaaggagatcagaaaaaaatatcttctctatgagtaaaaaaactagtatcatactctcattcattttcataaaccacttataattaaaagaataagtatgatagataactattatttccggcatctatcatacttagaccatcaaaaacggggtatctatcatacttgattattctacctccaaaggtacaacatgataatacgtaccatacgttttccgtttagatttcactccgagccgctgcaagatacgcccgaaataagacgcctgcctggcggaaaacgtcattttacttgctttctgaatccgccgcagaatgtcaatagccagtaaccattctccttcttcctcttcttccgccctacgataataaaccataaataactgttcgatggcaggagattgttcaaactcacggttgttttccgtcatgatagcctcttcttcggagtcaaaccaataacgttcgttgtgataaagcaactccaacgcctgtgcataaagctgttcataatcaataggacgcgacacatctatagctcccgtcatgtaaataccgatgaaacgacggctaccggaagtatccgtcaacaaatcccgatgattgctcgtggcaatgaacgatgcataccggcgaagctcttccactgccgaagcattcggacgacgtgtgttcaccaccggcttttgcagaatatgtttcagaaaagcctgctgggtaggactaatctggtcgaattcatccatattgataagcagaaagcgattcagatacaactccgcgtcccgtttccgactgaaatcaatgctatccgtatagtacgcctgtaaagcaggaggaagaagcattctgcaaaaagtcgatttccgatatgcctgcgggccaatcagcaaaggtgacgtactgttggcgtgtttcttatccattcccctccaatgggcaaccatattcaaaaaccaccgacggaacaacggcgcccaatgtggattatcacagggaacacggttggccagttccaaaatccggtctttaccatcccagtgaggcagatgatacaaaaaatcctccacaggctgataaacaggcacatgatcagaatccaaatagcggattacgtccctatcccacattttcaccccttcatacatggcattcatcgtgatactcgccagcacccgcttgtccaccggacgaaaatagaaattaaaactattccgttcgcgatattccacttccgtggtcagcgtattgtatcgaaattcataacggcgcttcataaattcgtccatctgcatggcgaaaagctgttcggccgtcagactgctcttcttgccgaatcccttagcggaacggtagacacttttcacagtttcacgaatcagcaactcgtccgaagggagccggtagtgcgcctttgtccaccgcaccgtatcttcttcggggatacctgcccgaaaacaatgctccgccaaacacaccagtagcggttgcagatcgtctccctcccgatatccgtccagttcttcgagcgccctgttgaatgcagcggagaaaagcaccgacaatgcttcataattttcatatccgggcgccattcgctgcaaaggagaatcagtttcccgcgttcgtttgataaaagtcgtttcggacggaagactgacgggctgcttcatataaatgggcattgctttcgaattgaaataaagttcaggatcatacgtcagcctgcaatattgttcgagcgacggttctttcagttcgatatcaaaaggcagttgtggctgataatatttcacagccgtctgataagcatgcgcgtgaaaaagttccgcttgctcgcgtaaagtcggcaagcggtcgtccggataggtgaaccgcacccatatctttactgatttgccggaagatccggtaaaagcaaggtatgtttgcggaagctctttgaccagttcttttatttcgtcggcttccgccctccccgaaaggttattgacttccatcatcactatgccgttatattcattcaaggtcattaccccttctttacggacaaaagctgcggcaggcatcactttgggaactttacgcacctcttcaatcgaatttcccggaagagtataccgcaagacttccctcatctttgagacgggctgcgccttgacttccgttttcatctgctccaaaaggagctccattttcaacgtccgtaaggtttttaccttgccatcgtctctgactaatgttattctcatctttttttattattatttccagtaaaaggaaagctgcactacagccatacaaagatacaacatgctcttcgcccaaacaaatttcaccgcttttatttgctacgccacacgactttattttacagaaataatgcttactaaatttgcgaataaaggcaggataatgtatctttgcaggcagttagacttcagcccgcataagtgtgccgtacagcccacctatgcgggctgtatagtttacattcgtgggctgtagagcccacaaatgtgtgcccaagaaaagccactgattccagttgattatccaggcttcaattgtaggttatcttgctgcaaaacaatcattaaaatgccttttaaaaggcattttagccacattaacccataatagaaaagacatgtacgcaaagtatgattttcgcaaaaagccgtcttcgaaagaagacgaagacgaacagccgttgtatccccgcatcgtatcgaacggaaccatcgactttcaacaaattgtaaaagagatcgctcaagcttccagctttacgccggcagatattgaaggagttcagctggctattgaaaataaaatatccgaatatttagtcagcggatatcacgttcagttggggaaccttggatatttttcagccaagctgaaagcacgtccggtgatggatgccaaagaaatacatgcgcagtccatttatttcgataatgtaaattttcgtccatcatcttctttccgaaagaaggttcgcggatttgtagaaaaagcgaagtcgggatttgcacattccgccgaagttccggtggaagagcgtcggcgcaggttggagaggtttctggatgaacgaccgatgatacgacgcaaagagtatacgcaactgacgggactactaaagaacaaagcgctgaatgaattgaacggatgggtaaaggaaggagtacttgacaccattggaagcggcagtcataaaatttatgtgcgggttaataccatgaaagattaaacagtaaaaacagtggaataagaatgatagatacccatatttcatgaagaaagtatgatagatacaaaatttcagagacatctatcattcttattcatcagattataactatattagcaaaaagaatgagagttatgatagttattttctactctaagaacaatcagttaataacaaaacaatgaaagataaaacacaaaaaagcttcaggggaatagcccggacattacttcttgttttctgttatgcctttggtaatcatgcttttgcattgactttagagcacgaacaaacagtagaaatttataaagtaacagatgtccccaatccgcgtaatgaaagctcttccaattgggttagcaatccgaatcagatattggatgaaagttatgtgtgggagataaataatatgttgtcacagttagaagattcattgagtattgaagtggcggttgttgcgctctcttctatcggagaagatattccggcagagtttgcccacaagctttttgagcactggggcatcggaaagaaagcggacgacaacggattactgattcttttagtactcgatcaacgtaaagtcactttcgcaaccggatacggtttagaaggagtacttcccgacgctttatgctttcgcattcaacagaatgaaatggttccgtggtttagaaaaaacgactttgacagaggaatgacagagggagtccggactgtaacattggtgctttatggaagcgactatgaaccagtttctcaaagcacttctgataattactggaaaagtgccggcaatacgttgtggaattttctggcaaatcagtcgcctatgctttggatattcttgatactggtaaatgttctcacttatcgcatgaaggtaaataaagctcgccccaaagacggttcagcattagcagcaatcaaagtcctgacactttacagcccacttggatgtcttgtgttgttttttccggtctggcctgcacttattgcggcatccttatggtataagttctaccaaaaacaacgtgttattttgcagagtaagacctgcgactcttgcaaagctgtggctttacaacttttatccaatgagcttgcaacccctttattatctgcttccgagcaaatggaacacaaactaggttctgccatccaccgtatttatcaatgtacttcctgcggctggatattgcggtataaatctgtcgtcggaagcgaatataagatgtgtaatcaatgccataccattgcttccaagcgtatcagtccgtggaaaacagttaaagaagccacatattccgatgccggattggaggttgccgactatctttgcttaatgtgcggagataaaaagcagacaacacagaagattccccgcaagacacccccaaatagtgacagtcctagtaatagtcacagtagtagcagcagtagtagtagcggcagcagtagcagtagcggcagttttggtggtggacgtagcggtggcggtggagcgtcaagtagtttttaagatcggctattcatttgaagaagtcgactaaccaaacaaagacgtggaaacacatctcacctgaatattttcatagaaagatggttatccactcctttattctaactatttttgcatagataaccgaacataaaaaagtgaaatgaatatcgaagaatttagagaatattgcctgtcttttaagggagtccatgagaagatgccgtttcccaatgtgcccgacaaatatagccgtgacgttctatgcttttatgtagcggacaaatggttctgtttcgttaacattgagattttcgatttttgttgtatcaaatgcaaccctgacgaatccggagaactgcaaactgaatataccggcataaggccaggatggcacatgaacaagaaatattggatcagtgtctatttcaaccaagatgtacctgatgagaaaatcaaagagcttgtaagcaactcctacgatattgtagtcaaaagtttgacaaagaaagaacgggaaatgctataaataaaggaaggattcaagaacctcccaaacgtaaatcctgtactctgttgtctttccaaaaaacagtgaaattataatttacaccactattcctgtaaaacacaatctcccaactgtcactatatagtacagccggcacgatcgtatagggataaaaatcatcctgccaggatccgtatattttttctttatgtttctgctggcttttgctggacagcatgctatctagttgttctgccataggtacccagttctgcaatagcacctgtaattccaataattgcctggagaacggagcagaagcgtccccttctatcaaaacaagagtttctaccgagtaaaagggcaattgcactgcaccactccaaaggcagcatttatctcgccaccaatcacaaaccttacaggtaaagatgcccaaaccttccactttatactctctcttagttccaaacaactcgtttatcagtgtcttgaatactttcattacttttcccatcgttttcttttttttagtatgcactaacaatgttactatgatttctggaatcttaccgcttgctatgtgggtgtgtttgtgtgcatattgttcaattttaagtttttattcttcgtaataagtaaaaatacgctcgacataaggttttaatatacgaccgagccccgtgccaaaatcaacataatctttgaaattctttgtttcaatccagttgccattcgcatcacagccgtagtcttggaagtctttgtagagtatttcaaatcctggccgctcgtcaatcggccgtccttgttcatcgtatttctcttgcacgatactattacgaacaacggttttcagtttaccgttcggataatattcacgtttacaccagaactctaactctttattaccttcatcgccaatcctatattttttcacaacgcggttactgtcactgtattcatagatgaaatgcgtttccggcctatcacgactcaacaaatcatacacttgggtctgcgccaacaagccatttgtatcatactcatagactgtttttcccgataattcccctatattataatattccctcttcgctaccaacaaatcatgttcgttataatcatattcggtcatagccggtttgtcaatcgtgccgtcaatctgtttggttcggataagatttcccctgtcgtcataagtatttatctccccatgggaatcactatacacaatttccagcagtttcccgtcagtattatacttactgacaatcgtactgttagttttcggaaagctaagtgtagatgtatgtccccaagtctcataggtataatcggtctttcggataatattttcttgtttatcgtactcgttgcattgagcaagattgccgtcgatattgaaataaaaatggtagtgatgtattccgtcctcttcccatttctcgccttttttgaatttcgtcgaaaagaaagacgatgtattttccggacgataataatagatatccaacgttttgacttttccgttcaaccccatcctgcttttgtcgttattgacagaatctattgtcgggggaatgtatttcaaaggagattgtcggcaacctgcaaatatcgatataatcaaacttcctaaaataataacgactacaacggctttatttttcatgttttcttgtgtgtgttacaatgtttcgacgcaaagataacaaaacagaaccagttctaaaatataactgacgtaaaagattactttcgtgttattataatatcatcaaagcatagttccaatgactgattatcgggtttgtactccgtccaatctttcggatcgccactttcgttgtctaccattaaatgataataagagaagccagagtttggatcaggcaatctatgaatcttatagtttcctacagttgccaactcattatcttcaacgactttcagccagcctaaagccttgtctatctgttgaagatgagataacttatcctgctcgccttgttttaaagcgtcaactgtttttgttctttcgttttgtaataactctattatatctttcatgctttccactctgttagtattgaattaaattctgatttatatccattacgattctttgg

SEQ ID NO: 8050 - DNA, 21943 bp, Unknown
  gut microbiota DNA sequence
cttgaaattaagttcaatgattatatcgaacttcatggtggcatggaacgttcgtataacccgatgaaaaggaaatgggaaacgagccctgtcctttatccggttattaaactgaaaagatagtttttttctaagaaaacataacggaagcgaatagtcaggttgaaaatctctatctttgtggtaaatcaacctttacgaagatgaaaaaactgattctatttctttcgctgatattatcggtcggttttgcatccgcacagtcggaaattccttccgatagtattcgtcgtgctccatccaccaatattaaagagtttggtggctttctgctggatatggggttaatgaatgtagcaactcccgaacttcccaagtttaatttagagatgcctaatatgacgaaagattataatcagctctttcgtttaaatacagacgttacttattcgcaaggattcactgactctttttcttcgtcttctttctctggtttttctggctttggctacggatatggttggggattgtcctcttctccacagtttatgcagatggggtctttcaaactgaaaaacggaatgagaatcaatacctacggagattatgataaggatggctggcgggtgcctaaccgcagcgctatgccttgggaaagaaataatttccggggagcattcgaactgaaatcggcaaatggtaatttcggaatacgaatcgaagtacaacaaggacgaaatgcgccttattaaatcaggtacttcaatataaaaccccggaagtctgaaataaaatcaagtagtcctatagattagatcagacagtccggaattaaattaagtaagttcggcacagaattaggaaagctcgaaggccttatctgccgcacttattgcgttggcaatacgatcacaccatgaatcaaattccggatcgggtatttgtgattccggatgggaaagcatatagtgtacggcttgtcgtaatccgtctgccatggaagtattgcatataaaatcaggaaccaaccgctttatcttcgagttatcaaagactaccgtagctgctttatctcctaacagttcacctctgaaatcataatgatcgctatgcttggcaaggaaatcggaggctacgtgtaatgcattcagaggtttacccaacgcgtcggcaatggtttgataaatctgattccaggtcatgctttcatcgatagtgatatgaaaagcgttcccaatggcatgagggttcgccatcagtcctacataacctttggcaaaatctttagagtgagtcaatgtccacaaagaagaaccgtcgccggggataataacaggtttaccttcaaggattcgttttaggatctgccagtttcccttatcgccatgtacagatacgggaggttttgttccgttgtaggtatggctgggacggacaattgtaacggggaaaccgtttgtgcgataggctgccatcagcacttcttccgcttctatcttgttacgggaatactgccaatagggattgaccaatggggtgctttcgattatgcggtaatcggccaatggcttttggtaggcagaggcactgctgataaagatatattgccgcgttttattctggaacaggcggatatcacgcttcacgtcttctgccgtatagccaatgaactgtgcaaccacatcgtaatgttcggacacgatggcttttgccacagcttcttcatcattaatatccgcaatgatactgtgaattccctccggcatctttttcgaaccacgatttaggagagtaatctcccaccctttttgttgcgccaatgccactacatctgtactaatcgtacctgttcctccaataaataatgctttcataaaacctgttttttatattctccggaacaaatatatcaattccatcatttacttccagcaatcattgccatttattttttctgcccgaaagtttatgtagtatacagattactgattcttatacccatattactgatttgctgaatgaaattaaaaagataccttcaaatgttttatctttgtatcagattaataacagaagcatatggatgaaataacaaaaattgaaaccgtcgatcagtatgaccaattgtttggactggaaacattgcaccctttggtgaatgtaatcgacttctcaaaagccaccaggtcagttgaatatatccgtatgaatatcggattctactgcttgttcctgaaggatgcaaaatgtggcgacctcacttatggacgtaagaattacgattatcaggaaggaacggttgtttgtatggcaccgggacaagtgagcggaatagacaaccgcaacaggcctgctcctcgcaccaagtcaatcggcgttttgtttcatcccgatttaatccgcggaacttcattaggacagcatatcaagaactatacttttttctcttacgaggtaaatgaagcattgcatctttcagaccaggaaagagaaatcgtaactgattgcatacataaaatcaggatcgagctggaacaccctatcgacaaacacagcaagcaacttatcgtgcgaaacatcgaactgctgctggattactgtatgcgtttctacgaacggcagtttatcacacgtaatcaggcgaacaaagatattatcgtaaaattcgagcaattgctggacgaatacttccagaatcaggtggcaataaccgaaggactgccatccgtgaaatattttgcagacaaggcatgtctctctcctaattatttcggagacttgataaagaaggaaacaggaaaaactgcacaggaatatatccagtgccggattatcgaactggcaaaagaaagaatactggaaggtgttcaaactgtcagccaggtggcttatgaactgggatttcaatatccacaacacttcagccgattgtttaaaaagcatgtcggttgcaccccgaacgaatataaacaaagaaactaagcattttttagctacaggagtctcaacatcatgggagataaagtactcaaaataggaaccgtgcatcaatgcaattgttgtctgggaagcaaaacactacatccgctggtgagtgtcattgatctctcaaaggctgacttgtcgcctcatacggacatcaagttcgacttttatacgattctattgagtgagtgtaaatgtgaggcctatgtgtatggtcaccagtattatgatttctcggacggtactttgatctgcctggctcccggagagtctatcagtatgaaagaaaaaaataagagatttccctctaaaggatggatattggcttttcatcccgatctgatttgtggcactccgctcggacttaatatagataactatactttcttctcttatcagcctgaagaggcactgcatatatcattgcgcgagaaacagatcattctggagtttatggacaagatcaaccaagaactcgaacgttgtattgatcgccacagcaaaaaaatagtttccaaatatatagagctattgctggattactgtgtacgtttctacgaacgccaattcattacacgtaacgaagtgaataaaaagattatcaagcaatttgataaaatcataaataaccatttcgaaacgaagccggtaccggctgtcgatgtgctttcaaatgagtattgcgctaacgtgcttcatttatctcctgaatatttcaacgacttgctgaagcacgaaacggggaaatcttttaaagaatacatcgagttcaaacgtttcgagattgccaaagactggttgctgaatactaataaaacagttaatcagataacacaagaactgggttttcagaatccacagtatttcagccggctattcaagaaaatcacaggttgctctccgaatgatttcagagtacctaactagaaatgaaatctaaaaggattggaggacgataaagcaacaaaaaagtcttaataaaatttgaattgaaatatccaattcttaatctatgttatgaaacatacttttttgcttggattatttgctaatttcccaagagtccgtatctttgcaatgtgtttttcatagtattagatttaaggttaacaaaggttggagcaaggcgttgctcctttttttatgtccatacgtcaactctcctctttaacttcctagataccatttcccggacagttgttctttcttatgaatgacggtattggaattacgctatttttcagtaactttgcaaagagagatgtatcaattatgtcccggtaaagcaaatcaaaaagttctctttttacgttatatataaaaagaaaatttaatccttagtagaataatggaaacaatgcaacaatattatcgtctgatgaagtcaatcctcttcgtattatttctttctttcggcatgatttcgtgtgagaaagaagatccggtttctacatctcccaacacaaggcagacggacaacactgatccgacagatcctgatcctaccgacccggtggttcgttcggataatgaacaaactgtatttatgtatctgccctggtcgactgacctgacttcctttttctatcaaaatattgctgatctgaaaagtattatcggacagaacatattgaaaaacgaacgggttctcgtatttatgtgcacaacggctacaaaagccactctctatgagctttcttacgaaaaaggcgcagctgtgcagaaggctttaaaaagctataattatccgactcccagctatacaacggccgagggtatcacttctatcctgaatgatgtacagacctactctcccgccaaacgatatgcaatgattatcggatgccacgggatgggatggatccccgtatcaagaacgcaatcacgcagtagcctgcaaacagtcaaaaaacattgggaatatgggaatacacctatgacacgtctcttcggaggcagagaatccaagtatcagacggatattactacacttgccgaaggaatatcgagcgcaggattgaagatggagtatatccttttcgacgactgctatatgtcgacagtagaggttgcttatgaccttaaaaacgtaacaagtcacctgatagcatccactagtgaaattatggcttatggtatgccatacgacaagattggtcagtacttaataggaaacatagattatgcaaagatttgtgatggtttctattctttttattcaaattatgtcactccctgcggaacaatcagtgtcacagattgctcggaaatagataatctggcggccattatgaaagaaataaatcaacgttatacgtttaacgaagaattaatttcttcgttgcagagtttagacggatataaaccttccatattctttgattgtggtgattatgttgcaaagctatgctccgatcctgatttattggagcaattcaacgaacaactgaaacgcacagttccatataaaaggaatacggagtattattttacagcaatatcctcctattatggagaacgaaaaaagatcaatactttctccggcatcactatttctgatccaagcactagtgcagctgcttcgaaaaagaacgaaacagtgtggtatgttgccactcattaaggctactaaaagaaatagtacgataatggagctttactcttgtctgtgatcggtcaaatctcttaataaaaatagattcgagaatacaaattcttaatcaatgttataaaacatacttttttttcttggattatttgctaatttcccaagagtccgtatctttgcaatgtgtttttcatagtattagatttaaggttaacaaaggttggagcaaggcgttgctcctttttttatgcctatactccaaattgcctttgcttttttctttctggtacatgtgtcaatcaccctttaataactgccattggagcaagttccaccaatggttccaccaaatcccgctcattcgctatcacttgcgcaatatctttataagctcccggcgcttcatccagttcgtcctgcgaacggagtccgtgaatgattccttgctggttcattcgctctttctcttcatccagtgacaaacgacgacaagcatcctttcgtcccatcaatcggccggcaccatgcgaacagcttttgaagctctccggattacccagtccttcaacgatataggatttagtacccatagatccggggataataccaatctcaccttcataggcacgcgtagctccttttcggtgcacaatcacatcctgatcgaaatggttctcccaggctgcatagttgtgggcaatattaatcataggctcaaagtccgcttcaggtttcactgcctggatggcttcacaaatacgggtcatcatcaactgacggttggcaaaggcaaaggccacacagtagttcatttcacggaaataatcctttgccatctgcgtctccattggcaggtaagccagtcccgataccatttcagaataccatttctcattccaatattgcgcaatcttattatagtgattggcaaccttcaaaccaatgttacggcttccggagtgaatcatcacccacacatcagacgtttcggtatctttctgaatctcaataaagtggtttcctcctcccaaggttcctatctgcttcaaacaagcctcgtactgattcttcaatataggcatctcctcaaggtcgaatccttgtggaagtaactcctggtcttgctttttagtatgatgatcgaatcccaagggaatggccgcacgaatcttcgacatgatggaagtcaaatccgtataactaaaatcttccgcttttcgattggtcttaatcgcacacattccacaaccgatatctactcccacagcattgggaacaatcacacccttcgtagccaacacaccgccaattggcattccttttcccgcatgggcatcaggcatgatggcgatatgtttaaacgcaaaaggaagtgaagtcaaatccataatctgcgacatacaagagtcttctacttcattcaaccaaagcttagcgggcaaacgtgttcccataattactttttccatacttcttttcttttatccgttcatataaatctcgttatcgggagcaaagtaagatgggaagtacgaaatctatttgcgcaatggatattattttctatttttgtagaaatatgtgcaaaaaagtcgtgtctccgcaatgattgtataatcaaaaagtccggatatggcgccttgatatctataacactatatataaatagaacctaatgaagaagatattgattatcggcgccaatggattcaccggacgccaaatattgaatgatttgtctgttcatgcacaatataaggtaacggggtgctctctgcatccggatatttctccgaatgatgcagggaaatatcgtttcattgaaacagatatacggaatgaagcggacattaagcatctttttgaggaggttcagcctgatgtggtcattaattgttccgccctgtccgtaccggattattgcgagacgcatcatgaagaggcttatcttaccaatgtgaccgcagtgagccaactggctgttttttgcgaagaatataaaagccggttcattcatctatcgacggactttgttttcgagggaaagatgttttttttcgatgaaaagataaatgaaaatgccggactgttgtatacagaagaagacgtccccgctcccgtcaactattacggatataccaagtggaaaggagaagagaaagtggcagaaacttgcagcagttttgccattgtccgtgtagcaatcgtttatggcagagcgctgccgggacaacacggtaatattgtccagttggtaatgaagcgtttgaaagccgggcaagaaatccatgtcgtatccgatcaatggaggacaccgacttatgttggagacgtatcggatggtgtacagcgtttgatagcacatacaacgaacggtatctttcacatttgcggcgatgagtgtatgagcatcgcggagattgcttatcaggtagcagattatatgggactggatcgctctcttatccatcctgtcacgacagaggaaatgaatgaaactactccccgtcctcgttttagcggaatgagtatcgataaagcacgaacaatgcttggatacgagccacagaaactaaaagaagttcttgcgaactgggaacatttataaggaagaggacagattaccaattattcaaggattatccattattttacgtaaacagaaaactacaagaggaattctgtggtttctatttatataataagagagtccccaaatgatgaacagtggctatttacacaaaatgtgggatagtgcccaaattgaagacagtggcagaattggaaacaatactactttttacaacaatctatttcattccgaataattctttcgctttatttattgcatatttattttgaaaatatgcaataagttattatctttgcaccaaaatcaaaaaagaccaatgatgaatcaaacattacaactacataacgctaatctttttcttgcaggaataccgactttctgtaagtcttgctgcgtgcatgtacattggttcagtggattcatctaaattaccctattatttcttaactggaactatctgctgacttgtttcactattcacagcagtattcctttccgattttcaagcagatgtatcatcttctttgaaaattctcttgtgtgttgtcaataatcagtttaacctaaccaaaaatatatacattatgttctctattatatctactatgtttttaggaatcggcatcggttatgtattacgtaactggagtatcttgcaaaaaacagaaaagacaatttctcttacaatattcttgttgctcttcattctcggtgtgtctatcggttctaatagcctgattgtaaacaatctcggtaaattcggatggcaggcagttgttcttgccgtgtccggtgtattgggaagcctgatcgctgcccgtctggtactgcaattgttttttagaaaaggaggcgaataataaaaaaggagtctgatttcttttaagaggaaaaaagacgcgtttattcaagaaggaagtgaacaatgaaaggaagtttgatcgttatattattcttttgtataggttgtgtcatgggagctttcaataagttccagtttgatacgcacactgtttcgatgtatatactttatgcactaatgctgcaagtgggaatcagtatcggttctaataagaacctgaaagcgattgtttcacatttgcatcctaaaatgctgttgattccgttgggaacgattatcggtacgttgctgttttctgctttagcaagcctactattgcgccaatggagcgtgttcgactgtatggcagtgggaagcggattcgcatactattcgctctcttctatccttatcacccagttcaaagagccttctatcgggctgcaactggctacggaattaggaactatcgcactactgactaatattttccgtgaaatgatggcacttctcggtactccaatcatcaagaagtatttcgggaaactggctcctatttcagcggcaggagtcaattcgatggatgtactcctgccctccatcagcagatattcgggaaaagaaatgatccccatcgctatcttacacggtattctgattgatatcagtgttcctgttttcgtttcttttttctgtaatctctgatattgcttgcgatggtttgacaagagcaagaatgagcattgtgaacgaaagacagagatatttttatgtttggggctaggtccagagctaatcaattaatgcccggaaacagccaatacaaactttatatcagcataggagatatcgtctcctaatgctgctttaatggcaaatattcccatgtattcatgttcttccagatgcttacgaatcttcgccagattttcagctttcactactttctccacttcaatttttcccaaacggacataatattccagatgcccggcaatggttcccgataccaattcgcgagctttggctatttcatctatgctcattccctggcagaacatttcatagctgactaattttgtatcttttttcttctccttctccgcttcttttttctgtttctctgcttccttcttctgtttttcttcctctttccgttgcttctgttcttctttccgttgcttcagctcttcccgtcggcttgcggcttccctattatcagagatgagcatatccattatttccggtctttccaattgattttccgccatatacttacggacaatgcctaatatttcaagcccatacctttccaccccttttgctccgaaatagggtatcgcttccagagctcttggattatccggtagcagattcacaattcccatcaacgctttctgctgcataataacatacgcaggaagattcacctcacgtgttttggctgtcctccattcagccagagcacgataaagccccggatgcagaatatccgtaggcacttccactttcaccttttcagcaccgctacgtgtacgctctttccgttccttccgctctttcttttctttcaacgctttcgaagaaccggaagaagaagaatcatcctcaagactcaacattactttagccttcaacttcaaataatccgtaatagcgaatctctctcttgcagacacagcctccaacaaagactctttaatccacaacgcatcatccaacgcctgcatacgttccgccaacagctttctcaactctttattatcaagaggcatattagtcttattatacaaagcccgaaccggcgccaactctttatgaaaatatctggccccggaacgaatccgctcctgtaactcctgattcgtcgcatagtcttcactctcatgtatcaaccgggtatactggttacgaaaacgctgggacacttccactattttctctttgatgcgaggttccaatgccttatattctgccaactgcttcggaaagagcttatacaaatcttcatctatcaaacgaagcaatcgtttataagcctgatcgatcgaatagaaattaaacaaatcactcaacaaatcaaagaaatacgccttttgcatatcgttcaactgctgactacccggcttattctgctctaccgctttggtgaaattatccaccatagcatcactaataatggcttccctccgcaaaggagactccaacaccatcccttctaaagtcttgcaacggctcaacgccacataagtctgtccgtgcgcaaaagagttacgcgcatcaataatggcacgctcaaacgtcaacccctgacttttatgtatcgtaatggcccatgccagacggataggatattgacggaacgttccttctatcacttccgtgatttcctttgtttcctcattcagtacgtacttataatttccccactcttccggcaacaactgaaattctgatttattccccttcccccgcacgataatacctgcatcattaacagtgaccacctcaccaatcataccgttataatatcgtttctcggacgatggatcattcttcaggaacataatttgtgctccttcctttattgtcaggagttcatccgcaggatacgaatattcggggaagtctccttctatctcggcacgaaaatgatacgccttgccggacaaagatgccagttcacggtcatttactttctgtgcctgataattatgtgtcgtcagccgaatatatccttcttctttttgtggctggaaaccgggctgataacgacggttcagttcattcagcacttcatcatcagccttattttcccggattttatttaataaagacaggaagaatgtgtcactctgccggtagacttttttaagttcaatggtcatatataccgtttctttcaacgcatggctcgcaaagaaataaggggtttcgtaatgcttcctcaacagttcccactcattatctttcacgacgggagccaattgctgcaaatctccaatcatcaacagttgcaccccgccaaacggtttctctctatcgcgataccgccgcagagttgcatccaccgcatccaacaaatcggcacgcaccatactgatctcatcaataacgagcaaatccatgctacgaattatgttccgcttttctttactgtaacggtaatgtgtttgggaagaattaaaggtagtttccggcacaaaaggagcaaaagacaactgaaagaaagaatgaatcgttacgcctcccgcattgatagctgcaatccctgtcggagccaatacgaccatgcgtttgggcgtatgttctttcaatcgtctaagaaatgtcgttttcccggttccggcttttccggtaagaaataaatgtgtgcctgtattttctatgaactgccaagcaagttgcagttccgggttattttccatgaaagttatattgttttgtgcaaaggtacagaaaactatatagagattgaaataaaagtagcaaactttttctggtagagatgagaagcaatcggataaaagaaagtcccggtcgttttcattaaataacgaccgggacgagagaacaataaaaacaccaaatgttgtgttatatgctttgagagttaatttacatgattgttataccaatccgtatatttttctcctttagaatctgcccaagctttaaagttaggatattcggtatcaatactctttttttcagttactgaaataaagttcaagataggaatatcaatagcaaacggataagctccttctttatctatgtaataagcatccttttgagtacctgctaaagacaagtccgcaagagatgttgcctcatgcttaggcagatgcacttctgtacgacctttttgcccttcggcatacttcactatgatataaggattatatgactttaaatctttcttattgaaagaaccgcctgtaaattcacgggttatagtatataccttttgaatagcttgcttcacattcggacaaacaataatagaagatgttgcagattccgtatgtatcccttccgtagtagcggaaaaagtcattttaccgaattgtcccttatctacctgataagcaaaagcattcgcaaacactgcaccatcatgtacaggagtaaatgtatctacaattttagttacctggttctttttatcaaaagatacggcacgattatattctacgattacgtcattcatatcataatctccaccgccaggccatatatcttcaaaagctaatgtaccggtcttcgtttcagttacatccggtttttctggttcatttccatcatccggagttataacaggtctgtcattgggttcctcaatagtttttgatgcatttacatagaataaaagatcacaataactattatttgccccatcttctactccgataataaccttgccgcttgtctcgtcctttacagatacaaaattctgtcgctgctgtcccaacacctgattagaagctaataaattagagaaacctgatgcaacttgttttgttatatcaatttcattctcactctgattatatccatcagcatacataaaccatcctaccgtataaccggctggaaattcctctttagcattaccttgttcatcaaaatagagcaaacgtactttactgccacatttcaaaataggcaactgacctccatatacagagaaagaaacatttggaaatatgatatacttcttcatatctgacattccgcgcatatcaggttccttagatgttttataataataatacccgaacgaattattatacatggcatcccgattcaggaaaataacatccaatgcagtcccatcttgtgttaccgtaatatttgtagttctggattgggtaactaaattcatattatcaacattcgctattccatcaggattaaagaaattcttcaaacgttgcgtcaaacttccaaccgtttcatcaccaacgttctcttcaaatgacatatatttactgtcaagacttcctccctctccccatttacataaggaatacagtttattatttccattcaagacataaggaaccgtcccttgaaaaccataagaccgtgtattattttttgcttttacagtagaagctcctatatttgacatatcaaaactaaccataccatcctttatttccaatggcatacaccttggtaatccccaactttccgtatataggtatatcgattttacagaagtaggaatattcatctttccattaaactttccgctttcatctgtgtaaatcttgaataaagcttccactccttgtttttttacaggtgtattatccacaatttccatcggatcaatgtcatagacttcaataagagccgcaaatccgggtaatgcataattcacatcaagcgacacatctccacgtgtttcgaatccaaaatattcttcaggaccttttacaggttctttcccataattaggatcatacaaatccttttctgcacatcctactgccataccgataaataccgttgcaacgaaaaagttcaataaatgcttaattctcataatctatatatatttttaagtttgttttgtctaggcataaacccataatcaagcctaattatgccacaaatatatatacaaatatcccatttttaaggcttatcttaaaaatgggataccgaatcaaaaaatattgttattaatccttggaatctatttcattgtcccccctacaatatccagcaactcattcgtaattgcttgctgacgactcttattgtactgctttgtcaaatcctgaatcagctcgtttgcattgtccgtagccacttgcatagctagggtacgtgcagcatgttccgatgcattagagtcgacggcagcggtaaaaatcttctggctcaatactgttggtattaagctggcgatcaattcttccgcgttcggttcgatgatataatcattggcaatttcatgctcctctacctcctccttattcatgctgtcctcttcacttaccacattcgtcatatcaatggggagatacgtctcccggagaagaatctgtacccccattgacttgaagtgatgatagattatttccacgcggtctacttctcctgccacatacatatccattagtcggtgagccaattcggcagcctcctgatacgtcggtttgtcggagagcgtcggagaagtctcctgcggtttgaatcccattcgtttgaccgcttcatccaccttcttgccaattgggaatatcaagatattatcctgtcccagggtgcggaactctccgatcgtttgcatcatcattttgatgacgttggcgttgaaagcaccacaaagagaagtgtttgaagaaaagacgacgattgctacacgtttcacttcacgctcctgcacataaggagattcgatgggcaggtccgcgcttaggaagttagtcagaatcttgttcaacttcttctgataaggcagcatattctcaatggctccttgtgccttgtgtaatttggcagaagccaccatcttcattgctgaagtgatttttcgggtactttttaccgaatttattctggtttttacttctttcagtgaagccatttttttattggttagtggttaattattaatagttggtgatagtgattaataattggtggttagtggttggtgacagtaagctaatcacttatcactaaccaactaatcactattataagtactgtttcgccaccatagcggcagtctcttcgatagctttaatcacgttatcgtcgatcacgcccgttttcagtatgtccaatacatcctcctggtggttcagttgcagagattcgatgaaactgcgttcaaagtcttgcaccttatccaatgggacatcatgtagaagtccgtgcgtaccacagtagaggatagcaatctgctgctctacgggcatcgggctgtattgcggttgaatcaataattgtccgttcttacgtcctttatcaatagtcagggcagtaatcgggtccatgtcgctgctgaacttagagaaggcttccaactcgcgatattgcgcctggtcaatcttcaatgttccggccaccttcttcatagccttaatctgcgcgttaccacctacacgggatacggagataccgacgttgatagccggacgcgtaccctggttgaacaagtcagtctcaaggaatatctgtccgtcggtgatagaaatcacgttcgtcgggatataagccgatacgtcacctgcttgcgtttcgatgataggcaatgctgtgagcgagccgccacctttcacaatccccttcagactttccgggagatcgttcatttcgcgtgccacttcttcctgactgataatcttggcagcacgttccaacagacgggagtgcagatagaagatatcacccggataagcctcacgaccggacggacggcgaagaatcagcgaaacctcacgataagccaccgcctgtttggaaaggtcatcataaaccaccaacgcatgacggccggtatcacggaaatactcgccgatggcagcacctgcaaacggagcgtaatactgcaacgcagccgggtcaccagccgtggcagctacaaccaccgtgtagtccagtgctccgtactcacgaagcgtattaacgatagaagcaacggtagaacccttctgaccgatagctacatagatacaatatacagggtcgcctgccaggaagttaatgcgctggttgataatcgtatcaatcgcaatggcagtctttcctgtctggcggtcaccgataatcaactcacgctgtccgcgaccgataggaatcatggcgtccacagccttcaatccggtctgcaacggctggttcacaggctgacgatagattactcccggagctttacgttccaaaggcatatcatacagttcgccgccaatcaatccttttccgtcgagcggttcgcccagcgggtcgatcacacgtcccagcatgccctctcctacacggatggaggcgatacgtttggtacgcttcacgacgaatccttctttgattttgtccgtcgggcccaacagtacagcacccacgttgtcctcttcgaggttcatcacgattgctttgataccattgtcaaactccagcaattcattggcctcggcgttccgtagtccatagatacgcactacgccgtcactcacctggagcaccgtaccgatttcgtcaagttgcacattggcattgattccttcgagctgcttgcgcaatatatcggatacttcgcttactcttatattctcagacattatacaattctcctattcttatcaataaattgttgtttcactcgcttcaactgcgtggcaacgcttgcatccaaccgatagtcgttgatatcaaagataaacccaccttcgatagaaggatctatcaccgtttccagctccatctgagcatgcaggatatgtgcggcagccgaccggatccggtcttctgtttccttattgacaggaacggctgtaatcagctttcctacgccaatatgtttcaacttccggtagagatccagatacatcaggctgataaattgcagatagccttcacgcctgtttcgcagtaccaaagtgataaattggacaaactctctggtcgatttaccgtcaccatcggcagctgtgcagactaacgccaacttttccttggtcgtgatgacgggattatcaagcgcttcgcgcagaccgggctgttcacaaaagctgtgcgacagggtcagaaactcctgatacaacctgtcttccagacctttttcctgtgcgtattcaatgatagcttttgcataacgcattgagagtattccgacttccatcttccttagttcttattcggggttagtacttcatccagcatgcggtcgatcatgcccatctgtacatccttgtcctcaagactcttgcggagcactttctcggcgatgtcaacagaaagcacggccacctggcgacggatgtcgcggattgcttcgtctttctccatctggatttgttgtttcaccgcatcaagttctttttgtgcggcaatttcggcttgtttacgggcctcgtgaacaatcttgtcacgttcttccattgcttccctcaagatgcgtccttgctctttgttggcggctgccaccaatgcgtcgccttcttgtttcagtttagacaactgggcattagcttccctcgccacctccaaagactggtcgatataggtcttacggccttccaccatcttgatgatgacggggaagccgtatttcgccaatatcacgaacacaatcccgaatgagagaaacatccagaacagcaggccactatcaggtaatagtaatgacataatctttatttacgattttacgatttacaatttacgatttcgcggctgcccattgcatgaggatctcccccatttagaaacagggttttacgcctgcgaaattcgcttgttatatacctgattagaggaagaacaccaacagacaaactactaccgccaacagggccacaccttcaatcaaggcggcggcgataatcatgttcatacgaatgtctcccgatgcttccggctggcgtgcgatagcttccattgccgaaccaccaatcttaccaatacccaaaccagctccgattactgcaagacctgcaccgatagctgcacctaatttactaactcctactgctgctgcagtggcttgtaacaatactgatagtaacataattttcagttttaaaatggtttatattttctcttgtttttattatttaattcctcattccgcgcgtttattccgtattcgttcagtcacgttttcaccgcgtttcattgattattcttctgttttcactttggctccttcctgtgccagtccgataaacactgccgacaacatcgtaaatacgtaagcctggatgaaagccaccagcagttcaagcgcattcataaagatgttgaacaatacggaagccaccgtgagcgtgccgttcagcgcaggccccatgcttgccgagataaagatcaggcaggtgagcaccagcatcgccatgtgtccggccagcatattagcaaaaagacggatcatcaaagcaaacggtttcgtaaagattccgaagaactcgatgaacggcatcatcggcacaggcactttcagccaccaaggtacatcgggccagaaaatatctttccagtaatgtttcgtaccgaagatattgactgcaaggaacgtgcagaccgccagcaccatcgtgatagcgatatttcccgtcacattcgcgcctccggggaagaacggaatcaatcccatcatgttattgataaagatgaaaaagaacgctgtcagcagatatggcgcgaacttccggtagttgggtccgacacaactcttgatgatgtcgtcgttcaccatcatgatgaacatctccatgaatccgataaatcctcccggtgctttggctccttgcggacgcttcctgtaccagtgtgccacgcacaacacgataacgagcaacaatacgctgttgaacaacaaggcaaacgtcactttcgtaatggagatatcccaggggcgaacctgttcgcctgcggcgtcatactctaccagtttgccttcatacttgcttcctgcgggagcgatggaaagtccttcatacgtacctccattctcttcgagacgggaagaaaggaacgtgtgccaacctgaagtgctactataaacaataataggtaacggtatagtaatatgcgtgttaccccatgttgtaatatgccattcgtaggagtcgccgatatgaccgaacacaatttctttcacatcaaccgtgttctcctgttcctccttcggagtaatttcgtcctgcgtctgctgcgccaccgcttccccctcttgctcttgcgcaagaaccggcaaactgaccgctgccatcaggcagaacagaatcaacggagctactatgttatgcaactgtttcatgtttcttcttatttttctttttccgtttctggttcatctcaaaagagaagaaaaaccaggtttcgaatatcagatatatcaaatagaacgagataaacgtcagtaaaaaagctttggcttcttcgcgtacagcaaggcaataaatcaagaccagaatcagcgaaagaatcatctttatcatcttcattgccaaatacaacagtaacaatctctgcggagcgtgccgccggcaagcgtcgaacatatagatgctggccaacccgaagaagtaaaaataaaccggtataaacggataccctccgaaataatgccccggcagagcgaagtgtaggataacagctccgagcgccgcactaatcactgcaaataaggtatgccaacagataaagttccgtttagttttactaatattcatcatgttactgtgtttttctgtaaggttattatctcgtttttttcaatctttagatacttggtctttgtgccggaaggcttccgtcaggaaacacaggcagaaaccgtgccgtcactcatttcaacaaaaccgccctgaatatccatcgtgtgctcttctccctccatcgtcgtataactcaacgttcccgctttcagcgacgatacaatgggcgcatgccccggcagaatagaaaacgaaccgatcatgcccggcaatgtgacaatcttcacatctccgtcgaatatgctcttttcgggcgatactatactcaaatgcagttctttcatcactctatatttttattttttcgcctgttccagcaatttcttacctttctctattgcttcctcaatcgtgccgacattcaggaaagcctgttcgggaagataatccacttctccgtccagaatcatcttgaatcccttgatggtatcttcaatacccaccatcacacccggaacacctgtaaactgttcggctacggcaaacggttgcgaaaggaaacgctgcacacggcgggcgcggttcactaccatcttgtcttcttccgagagttcttccataccgaggatagagataatatcctgcaattccttgttacgctgcaagatttgttttacgcgttgcgctatgtcgtaatgttcctggcctacaatgtgcgggtcgaggatacgtgacgtagatgccaacgggtcgacagccggatagatacccaactcggtgatcttacggtcgagtacggtagttgcgtccaagtggctgaaagtcgttgcaggagccgggtcggtcaagtcatcggcaggcacatacaccgcttgtacggaggtgatagaacctttgcgggtagacgtgatacgttcctgcatcgcacccatttccgtggccagcgtaggctggtaaccaacggcggagggcatacgtcccaaaagggcggacacttccgaacctgcttgcgtgaaacggaagatattatcgataaagaacaggatatcgcgtttctcaccttctttaccggcgtcgcggaaagattccgctaccgtcagtccggacagtgccacagaagcacgtgcgcccggaggttcgttcatctggccgaaaatcagcgacacttgcgatttctccagttcgttataatctactttcgaaagatcccagtgacctttctccatgctttccttgaatgcttcgccgtagcggataacgccggattcgatcatttcgcgcagcaagtcgttaccttcacgggtacgttcacctactccggcaaatacggagaatccgttatgtttcttggcgatattattgataagttcctggatcaatacggtttttcccacaccggcgccgccgaacaaaccgattttaccacctttggcatacggttcgagcaggtcgatcactttgatacccgtgaagagcacctcttgcacagttgtcaaatcctcaaatttaggggg

SEQ ID NO: 8051 - DNA, 21435 bp, Unknown
  gut microbiota DNA sequence
ccagccttttacacagcaatgcaacaatgccgtcctgatctcgtccaaccagcttttatttaatactaacaacgattttttcgtctatcatatacagagcaataccctgtgtaatctctcgaaagatcttgaggtgaaagacttccggtgtgcggcaaccgaccatacggggaatatatgggtaggcacggagtatggcatctttgtcttcaacaaactctatcaactgattgcacattacgagcaatcagaacgggatttaagtgcgctgaacgattctcccatttacagcctttatcaggacaaggctcataatatgtgggtgggaacctatttcggaggagtcaattattatatattcggttccgaccagttccagatatatccatacggagccagtttcaatcatttgagcggaaaggctgtccgccagattatcaatgctccggacaatggtctgtacatcgccaccgaagatggcggattgaactacctgaacaataagaaagaaatcacccgtgccgaacggcttcacaagcaaatgcaaatctacgccaagaacatacattctttatggctcgacaaagataacagcttgtggctcggactgttcctgaaaggagctcttcactatataccgcatctaaaccgcacggtggactataatctactgtcggatgaggtttcttccggcttctgcatcatcgaagacaagaacgatcatatctggtacggaggcccttccggcttattcctgatcgacaagaagaaagcaaactcccgcccggaaaaaatttcatctctccgtgtctttaacctggtacagtttaatgacagtatcctctgggcaggaacccgaaaaggcagtatatttcagatcaatacccatacactgaaagtaacctcgctccctatcctgccgcataccgatctctacatcacctatatttaccccgattcacatcaacggatatggataggtacagacaacaacgggctttatgtatcagaccgcaacggtagcattatcgccttttacagtaaagaacagttgggatccaacgccatcaaaggtatcattgaagatgagatgagtaatgtttgggtaggtaccggaaacggactttgttgtatcaattctcaaacaggaagcattgaccgatataccacagccgacggattgcccatcaaccagttcaactactcctccgcctgcaagaagcctgacggagaattgtattttggaactatcaacggtatgatttctttctacccggaacaggtacgctccgtcaatccccgtttcaacattgcactgactgccatttggagcaacagcgaatatatgtcacccaacaatgagaaagcattcatcccttcctctatctccgaactgacagagatcaccctgacgcacgaacaagcccaatccctgcgtctcgaatactccggactgaattatcaatataccgacaacactcaatatgcgatgaaaatggaaggtatcgacaaggattggcagtttgtaggcaaccagcatcaggtacgcttctccaatctgccttcaggaagatatatcttaaaaatcaaagccagcaaagacggcatccactgggacgaaacgggccaaaaggaccttgctatcagagtccttcctccctggtggctctcgccgggagcatatttagtttatgcattactcttcctattaatcatttacgccgcatacagatataccaaaacgcgtatcatcctgctcatgcgactgaaaacggagcatgaacagcgcgtcaacatagagaatatgaatcaacagaagatcaatttcttcacttacatctcccatgacctgaaaacaccgttaactctgattctatcacctctgcaacgattaatccagcagccacaaatcagcaacaacgataaagagaaactggaagtcatctaccgaaacgccaaccggatgaattatctgattaatgaactattgacgttcagtaaaatcgagatgaaacagatgcgtatcagcgtccggaagggagacatcatgcactttctggaagaactgtcgcacatctttgacattgtagccggagaacgggaaattgacttcatcgtcaatctggaagacaccgaagaggaagtctggttctcgccttccaagctggaacggattctttataacttgctctcaaacgcatttaaatatacccagcccggcggatacgtcaagttgagtgccaaactaataaaagaagagaaagaaacatttgtgcaaatctccgtcaaagacaatggcagggggattcctaaagaagctcaggaacaaatatttgaaagttattaccaggttgagaagcgagaccatcgcgagggattcggactgggattatcgcttacgcgttcgctcatacacatgcacaaaggggaaatccgggtagaaagcgaagtcaatgagggttcggactttatcgttaccctgaatgtatcggaggatgcttatggtcccgatgaacgctcgtccgagaacatcacgaccgaagaaatacagaaatataaccagcgaatcaaggaaaccatcgaactcattcccgaaaagctgaccaacaaagaaaaagatcctgctcgggaatctattatgattgtggaggacaacaaagaaatgaatgattatcttgccagcatattcagtgagaaatatgatattatacgggcgtataacggtgcggaagcctgcaagaagatagccaaacagctgcctaacctcattatatcggatttaatgatgccggtgatggacggattggaatttacagaacgtgtcaaacaggacgtaacgaccagccatatccccgttatcctcctgactgcaaagactgatgaaaacgaccatacggaaggttatctgcgtggagccgatgcatatatcaccaaacccttcaacgccaagaatctggaactgctggtacaaaatatccaaaagagccggaaacagagtattgaacacttcaaacaggcagaagaactgaacatcaagcaaataaccaacaacccgcgggatgaaatattcatgaaagaactgatggaactgattatggcgaacctcaccaaggaagacttcggagtaacggaaatcacagcccatctccgcatcagccgcagcctgttgcacatgaagctgaaatcactcaccggatgctccatcactcaattcatacggacgatcaaaatgaaagaggctaaaactcatttactgaatggtatgaatgtctccgaagcatcatttgccgtcggtatatcagatccgaactactttacaaagtgtttcaagaaagaatttaatatcactccgacagagtttctcaaacagttgaaatagaaagcaaaagtaactgcttcagaaattcaacctacccttagacaacgtgtcaactattaatagaaaagttcttttgctccctttgcaaagatctcttcccttcatagtaaagttgtctttgccctatttcaaactataaacgcaagttccgtttatataattgcaagctttgtttttataaacggaacttgcatttataaaaacaaagcttgcaattatagtttggaatgaagaaaaaggaagttatccaaccggcaaaaagaagtttggtctatatcaaaaggaagttagctattaatagccaacagggcaagtaggtatatattgtaaatcaactacgcccaacagaaaaagatatcgccggtaattaatctgcaacattcactgatgtagctaattaccggcgagcaatagaaatctataatcaactcatacctattctaccattcctggaagcgtaaatcagcttccggattctgacgacgaatcagttcctcgtcaacctgataagtgacgccacctttcgtgtacttataagaaagggtaaacttaggctgtttccctacaaattccaatgattcggctgcaggatctaatgtggcggatgcatctgtgatagcgacgcttcctccggcttcaatattgacgcttccatccggattgactgtcagattcaccgactcattgttttccaatgtgtttccgaaacccggtctgcgtactttgtttctacctaacgaaacaaagtcgcgggtcatattctgactcaaatccttgttactgtattcagtaacctgctgggtagacaaattggtaacttttcctttcacaaagtaggtaccatgatactggctgacaaatttgacaactacaatactgtaatccttcaaattaccattcacatcagtactaatttcatcctgattatgatcgaccaaccggaaagggattgcatagtgcttgttcaaagcagcattgtcttcatagaaagcatcggagaaagtcactttcacatctgcgattgccaggttcgggttgctgatcgtcatcttgttcggattagccaactgataatagttttccggcattagtgtcaagcccgtaccatccaataaagacggatcgatctcgaatgtagcccaatcatcggtatgcacctctcttttaccgccaatagccactcctacctttatcgacatatctgtatcggctaccagtgtccgcaaaggtttttgcgaagcaaagtacacagaactctcatcgtagtccttttcataatcgtcataacaagcagtcatcagaacgcttatcagccctatccataatatatttagtcttttcattgtaaataagtatttatatcaacagcacgttattcccaaccctgattattcattagattcttattcttttccagctctgcatacggtaatggcatgaaatagtttttcacttcatatttccgttgttccactttctgtactttgaagctgaatgtgccatcttcattgcgggtaacggcaacaccctccacctcttcgttcaacggtaatacccaacgacgcatatcaaaataacgatgattctcgaaagtaaattccaagcgacgttcgttctgaatcaactttctgaacgagtccttactttgagccatttcatccagataaagatcaaaattgatacccccggcttgcgaacggattgttttcaatatttcgtatgcagaatacaggcatccttcggctttcaccgtcgggttgccccaagcctcattggcagcttcggcaaagttaagaagaacttccgatttccgtaacaaaggattgtaatgaaccgagtttaacgtctgaatcggattcagcatagccgatttcttggaaacgaatttagccagataataacccgtacgtgtagcattctcactaaacgaaggagaatcttttccaccctcggacatatccaacggctgaccggaatcgccaaatgtagcactatgatagtagacattcagcgcaaagcgattatccagtacggcataaagctgcgtcagatcgaaatcaggatcagacagatcgacaccggaacgaacatcggttgccggataaccattcttcgcataaaaagcctttaccagattatgagaaggagtggcacgggcacttccgtagtagaacggcgggaaatgaaggccttccaacaggttattattaaaatatctgcggaaagcataatcggaactttccgtctgaacatcggcaatggaggaagccgtaacaggaacataagttccgaaaccttccatgcccagaatcttattgatctctttggctaccgcttcccattttgcttggtaaaccgtagggttcagtatttcgaattgtcccatgccggtgatcttcgtcacgtcatcatcctgcatggcagggcttgcgctatataaaagcgcacgacttttcagaacagctgccgccgctttcgtggcacgaccgatttgtgtattaccgaactccaagtcatctccctgatacacgttcggcaataactcgatggcattattcaaatcgttgacgataaaatcgactgttgcctgataagtaggacgaagaaattcaccgttctgcgcggcctcatcctgcgaaataaaatgatctgccaacggaatacccaacgcttttccattcttcgcctttccgccgtacatcttcaatagctcaaaatgccaccatgcacgcaggaaatacgattcaccttccagacgcagcttgatttgcttgtccacttccgggtcggtgcggttgtactgcacttggtcggttaagccgttttcgaggaaagagtttacatagttcagcatgttgtacgcattactccagtttccgattgggttgttaaacgctgtcatcccacccatatttaatttatagacagaagagctgcgcagattagtcactgcattatcggtagcacaatccagaaagttatcttcaaaacaatccggacggttggctatgccattataagctttatatagtacgccttgagcaagttccggcactctccaggtatcagagtctccgatctgccatgtcacctttgtatccaatgtgtcgtcacaagcacaaaagagaaacagacctgctaaaacgcaacttcctaatatatgtttcatattgccatctattaattgttcaaaattaaaatacaaaagagactccgcctgtaaaagtacgcgtcaccgggtagtttgtcacaccggcattcagcaattcaggatccaaatctttcacggaagaaagcacaaacaaatttgcaccacgagcgaaaaccttcatcttcttcacgaccgaacttggggagaactgattgaacgtgtagctcaattcaacattcttcatacggaagaagcttgtattcttcaaccagaaagaagaattgcggaaattgttctcaccggcagtggttgtcaggcgcggataacttccggtcggattgtttgccggatgataacgatctaatgccagtttagagtatttaccttctccattgttccaataataagcatttgttgcccaagtgtgaacgcccagttcggaatatccctgaagatacaatccccagcctttgtaacttacattgaaatcgatgcccaatgtagtacgtgggaatgagtttccgagttcctttacgtcacgaccgtcaatgatcttatcgccgttcaggtctttgtaggcgatgtcgccttcctgataatcggcaaacgtctggggggcatgtccgttgatggctacatctttgccaaataatccttcggcaaccagtcccatcatagcatcggtagaacgccccactgtataacggtattcttcaccatgtttcacttggttccatttcaatactttattcttagaccatacgaaattagctcctaccgaataagaccagtcgttgatacggtcgctccaggtgaacattccttctataccatgattcaagacggagcccatgttatcctggtaggtaaagttgccagtataatccccgtaagaggcatcaacagaaccaatgatatccgtatgtttctcacggaaatagtttatttcggtatataagcggttgttcaggaacaggccttccacaccgatgttccattctgctgccttttcccatttcaggttcggattgcctgcacggacaaaagtggaatagtaagccgtagcaccgttgttcgttgttccgaaccggaagctgccgtcttgtgaccaggcacgttcatacaataaatgttcggtgcttctgtcatagcccaatataccggcgctggttttcagtttcaggaagttcacgtattcattgtctttcaggaaatcttcattgcttagaatccaggcaaggccgcctgctgccgagaagaagtatttatttcccgatttgaaacggttgcttcccatcaatgccatgtcggcttccacagcatagcggcggtcatacatatagtttaagcgcaatgcgtagtttgcattgatgatgtcctgggtcactccctgattcgttgttttcgagtacatgtaagtcagccgtgccgatacatcatgcttttggttgaatgtattctcgtatgcagcaaaggcattccaacccaatgtctgttgtaaggtagtcgacttccgactctgtgaagtggctacatctgttttcttcatctgggtgtacatgatctgttcctcaccggcaaagttacgatatgttttgatggcatacgtcggatagactttgctcaaagagagttgcaggtaatcatagttgtcgaaagaaaggaaagcaccggctttcaacccttttgtcagcatatcaagatcgaatttcaaaccgatattggtctggctgcgtgtataacgctcatccgtatatcctccgtacattgtttccgcgtatgcattcatcggacgcagcagacttgcgccaaacaaaggaattccgtccgagctggctagtccggtttcttccggtgacatagtcagcgggtattcattcggacgatgcgtagacagggccgtaaatacctgaccacagtccaattgcccccatttacgcatttccatacgtccggcaacgtctgcggatatagtcaggaaatccgttacattgaagtcgaggtttccgcgaagagtcagacggtgcagttgcggagtataggtaacgtcttcaaatccgctacctcctacatatccggcaatcagggcataacgcactctgtcggtacctcccgtcatatcgaacgatactttccgatagttggcatttttgttcaataactgatcgtacaaatcgacgttcggatacaataggtcattggctcctttggagtttttatatccttccagttgtttctgattatagtaaggagtcaatccgtcatttgcacgcgcttcattgtacagattagcatactgataagaattcagaaaatcaggagtacgcgtcatctgtaccacacctgcttcggcggttgcgttataaatgcggcggttggcctttcctctgcgggtagtcacccaaagtacgccattcgcagcacgcgccccataaagaatcttggcagtggcatctttcagcaactcgatacgttcgatttcttcaggaatcaaatccgctgccggacgttccacaccatcgatgataacaatagctgtattctccgacatgccatgctggccacggataaataaatcaggcgtattattacccaatccgctgactgtggagcgaacttgcagacctaacattttaccttgcagcatattagtcagcgtcaaatcagggaacgttccgaactgtccgttctccagtacgctcgttgcgcctacttcattccctttatacgtcttgccaccatcggctctattcaccaacgattcttcggtcaggaacagaggctctttcttcaggacaatcttttcaggaacgatattgctgcctgtcagcttatacactttatcttcatatcccaaagcctccaccatgacggttgcgtcattctcgaccttcgtctgaaaacgtccctttgcatctgtatatagaacgactgcgccttctccacaaatgatagaaacattcttcaacgggctacctttctcgtcggtaacaatagaaactacttccaccaaaggcttcttcgccgactttctctttgatttattttgtgcgaaagtcaggctagagccaacgataaggacaaatatgagccctatcagtcttatatatctaatcttgtttctcatatacttttctttattttaggtatcaccatccggggttctgttgaagattatccaaagccgccacttcatccatcggtagcggataccaataattacgcttgttaaacgtccgtacggctgtcctcaccggaacatactcgtaagtaaagtcggtcaacttataagtgcaggctttatcctctttcaactggttggccgtataagaatggttgatcggagttgctttgacacccatgatcggatattcacccttaaacaggtcttcagcaatcatccaacggcggatatcataccagcggtgtccttcgaacatcaattccacaccacgttcccggcgataagcttctctaaagtcaactccatccggcagttcaccgattccggctcttacacggattttattcaaagcctgacgggccgacatcgtacaacccgtaacgactgcatccggatcacctgtcgcttcgtatgaagcctctgccatatccagataaacttgcgaaacacgaatgtacacagccaccaaacgatataattggaaaccagcttcgccaaacaaaggcacacttgcttccggccaaatgaacttcttacacatatatccggtctgttgagagcctctcgtaaactgattggtagaaatgaagttctcggagtaaccgcccgaataagtagtcagataatagggaacaccctgtaaattctttccccattgctcaccgggcacgaggatattattagtgaaacgaggatctctgtccgagtaagggtcggtagtctttaccgcatcatagccggaacgcggatcagtgattggatagtagttgccgtcagctcccttacgttcgtacatatctaccgcattttgtgtcggagcattataaggagtaccttcggcaccggtcttgttatcgtatggttgtgtcagccattgcgctctgacgaaagcagaccagttgccatgatgccaacgcaggaaccataagtattccggctgtgcgaattgattggaattaggcattaattgaatactacgatattcgtcgtgattcatcaagcgataatattcgtggctttcaatagcgttgatcgccttttgcgcactacgggcagcttcggcagccatctcttttccatatcctttgttttcaatagaattcaagtcgttctgcatcaaagggctggcagcatacagctgtgtcatcgcttttaatgccatggcgcctactctgtcaggccgcccatgttcctcgtcaggccagcttataggtaaatattcaatggctttatccaagtctgtctgcatccaagcattggattcctgataagttttacggggaaagtcaaagtcgtccgatgctccccaaagctggtcaaagatgggcattccgccatatcgtttgataatctcaaaatagaagtaggcacgcaggaaatgagcctgtcccaacagttttctcctttggtcgtctgtgatggatttcacttgatcgactccactaattacacggttcacgatacgaagtccggtataggcacgagcaatagcacttttgttattcttcccgtcacttttacttcctatttcgaaacgtgtactagcattctccagccaattacctgcattgacaaacttcgacggatcattatcgcgaacggatgcatattcatccgataaattacctaccgttacgtatgtattcgaataagagttgataccatgtgtaaagattaatatatcatcattttgaaagatgcggtccatgaaccctaacaaactgctataatctttataaacatcatcttcggaaagtccgtcatcaggagagcggtccagatagtcctcacagcttcctacaaacagccccaatagaatgatccatatccaattcaacttatgtcttctcatatcagtaaatttaaagtgtctcataatcctaatctaaaaccaatgttataacgtctcaccaccggataaacattctgtcccgaatgttcggggtcacggcgggaatcaccttttgagaacgtcaacagattggtaccgttgacatatacttgcagttttgtcagacgtagaggctgcaaccaacgcttcggaatctgataattcacttccaggttcttcaagcgaagataagcatggttggtatatgtgtatgtactggccaccgaattataacttctctgaacatgaatactggggcgaaccggaccgctttgaatcggagcatcggctgtccatgtattcaacgtattcggttgagccttgatattaccttccgggaagtcccataaataggaaggaatcgcttctttataaacgtccatagcactgtaccacaacatattgaatccgattcctttgtaagaacctcccaatgtaaatccgagggtagtagtcggatagttcaggtttttcatcggaaccatatccttagcatcaatcatgccgtcaccattataatcgatgtaatacaagtctcccggaatcaatgtattatgtgtaccattggcaatagtggactgcgccgagttataaatatcatccaatgactggaagtttcctgttgccaggtatttattcacatatccgattgactttccggcttttttcaaatattcgctctgattcttcgggtcatcaataaagacaacacggttctcactggttgcaaaattaaacttcgcgtaataattaaactttccgatacggtcgttccaagcaatatccagttcgagaccgtgatttttagtcttacccagattcacctgcggaaaagcaataccactatcggcccatgacggaatcgtattacgtgtcattaaaatgttattacgcttttcatcgaacaagtccacagtaaagtttagtttaccccacaaacctatttcgataccgatattctgcttaatagattcttcccaggtagcatcggggtcggccagtttcccttctttgtacaaaggcccccaattactggtctgatatttaccaaactgcgcattggcagatagttgctcaaacttctgaatatagttgaaacgggtagcacctttatcattaccaactactccatacgaatagcgcactttcaggttggtcagtacacctttggtcaatttctttacccatggttcttcactgatacgccaaccaatagaggcagaggggaagaatccgaaacggcgtcccggagcaaatttttccgaaccagtgtaggcaccgttaaattcagcaagataacgctctttgaagttgtaagtgacacggcctacccagtcttcttcgtaagccgggaagttcatcacacccgagttagcagtattggttgattcgttcatcttacggttaaatacaaataaggcacttacatcgtgatcgccaaactgacgactataattcaatgctaattcgtaataaagtttacgtccgtaagccttgaatccgtcataaacaccaccgacaggcaaatctccgggagcattttcatctggatagcgtttctcggtataattataagtaattgttccgtcagcattgtaaataggattcgtgtaatcatacacacgattaatacgaatatgcgtacgttgggcaaccaagtcatccttacccaaaatcttacccggcataatctgggtagtccatgaagaagaagtagtgtaagacaatgatgctttcaatgacagtccctttgtaataaagtccagcttctgattcaagattacatcatagaaaccttgatgctgtttaatattacgactacctccttcgttcatcagacaggctatattttgatcggaacttaacccgtctccccatattccattactatatttaatcggaaattcattacttggagccgtaaagaacgttttaaaaaagcgttcatccggagaatcgacattctcataataagacggttggttctgataacccatcttaccggccacattgaacgacaatttagtagtacttgtgatattgaagtcgaaattactacgccagttataacgacggtaggagaaggaaggatcgaaatcctcttgtttggtagtattaaaaatatctccgtcatgcaaataacccaaagatacgaaataactcattttcttcgtaccaccgcgtacattaagattataagcctgttcataacctacattctttaccagttctttccaccagtccacttcgggaaagacatcgttatacggaccataatttccggtagcatacgcattttcccatgcggtaatggtagattcgggaaccattgctccccagttaccatcattagcctgtgccctgttatactgtttcatagaggtcacatagtcagaccattcaggagcagcagaaggttgtttaaaaccgaagttagctgtgaatgagatttccggtttctgttcgagtccgcgtttggttgtcaacaagataacgccgttcgcacctttcacaccgtaaaccgcagttgccgaagcgtctttcagtacagaaatagattcgatttcgttcacatcgacatcgttgaagtcacgttcgataccatccactaataccagtggctccgcttctccccaggtagacttaccacgaatcaataaagaagccttatcggctcccggctttgaagtggaattgatggcaaccacacccggcatctgaccttgcaaggcttcggaaacggagttcacgctacctatctttaataaatcatctccttttgcagtagcaatggaaccgacactggatacctttttctgtacaccgtatccaaccactaccacttcttccagtgtctccgtatcttctcctaaagagattactcctaaagtcgttttattctttaaatccagttccagagttttataacccacataagaaatgacaagtatgtctcctttcgatgccttcacagtaaaattaccgtcaaaatcagtaatcgtaccgcttcccgtacctttcacgcgaacactgacgccaatcatcggttcaccagatactgcatccttcacttgtcccttccaataatcttgttgtgcctgcacgtccagcgcacaaaacaaaaagcaacaaagacataagaaagaaaaataaagtctgtctcttttcataaacattatttttaactgttaacaaattctttatctcaagacacaaattaagcgggaaaatcttcaaatgaaaaggaagattatcctcaaaactcgtacaaatgtgcaaaatagatttctctactacatttctgaacaaatcatttccacattggctttatgacgtgctctttgtctacggtgatgttgtatatgccatcgtttcctttcttcaggatgagcggaacaatacgtgttttacgaggggacacggtggaatctgaacgatgaacgtggtaaacatagtaatattttccatccagacctttaaatacatctccatgtcctgatccgttttctcctacgaggctgcgatgaatgatcggactgttcgggtgcttcttccacggaccgaaaggggaaaaagcagtggcataacctaccgagtagtcgatattcataaaatgattggcagaatagaagaggtaatataccccgtcccacttcataacagtcggtccttccatcaccggtgcagacttatagttcggagtcttttcccaagcctccgtacagtccatacattgtttcaatgtttccggtttgatacttcccttctttatgtcaaactcggctacccaaagataattgcctttattaaagcgaacatgatataggtagtatttcccatcatcgtccttgaacaggaatgagtcgatatttttagcggaagcgtctatcggcttgacttccttctgccggaaaggtccgaataccgattttgaggaagcaattactgtttgctcattagcggtataagtgaaataataagttcttttatccttaaagtattgaggtgcccagaagcctttttcaccgaaagcttggtctccctttctcaatataagttgcaaatcttttccattaggcacagtccaatgcttcaagtcggtcgattcgaggatagcaaaaccctgcggttcccgattgcgtgtacctgtgagataatactttccgttctccacaaagatagtgggatcggcaaagaatatttctttccatgaatccgcccatgattgggtgatagatacacatatcaccgctaatatgaaaattactttttggatagtcttacattctttcataaacatatttcttacgatttattttataaaacgatttattgagccaattcccaaaccaaacgaggcttctctcctgaaagatcccaaatagactcatcccattgaagagcctttactgctgccataagagtaggtatggtagaaagtccgttataacggtcagcaccattaacagttgccgaataatttggaactacctcatctactattgcaggtgtattagctgaaaaacggcactccatattcggattggcataacaattatttgcctcatttttatcgaaacgtccgcatactcttcctgatttaggtgcaccattcgaatataaggaagaattccaagccacacaacgtgtcactgttactcctgttcctttattggcaagtcccaaaatgcctcctacttgattttgagcagcaatttcacattcagagtaacaatgtgagatgagcgctgttgggctcggctctacaagtcctgcaataccagctccgggattcggaggtgtaacattaggataggacttagccactcctgatgaataacaatgagtaacagtaccctgaaacatcctgcttacaataccaccaacacatgactttgtgacaatatctcctacaaaataacattgagtaatagtagcgcctccttttgcttctccacaaataccaccagcagaccatgtagcattaatactcatttctgaagaacattgatagattttactttccgctccttgaattcttccgcatataccaccagcttgtccattctcccaagcagtcggtcctgttcctgaagtcagatttatcgtaccagatacccgtacattttcaacaactcctgccgctgaagcatttccaacatgtccggcaagaactcctgtcaacttttgattggctgtaatctgcgcattttcaaagtttatattggaacacttaccaaccaacaatccaaagaatccctgattaacagaagaggaagtatttactttcagattacgaatcgtatgtccgcctccatccaatacaagttgtttggaaaccgaggtctctatcggttgccagtctacaccttgcaaatcaatatcattctctatcttggcatagatcgtcttaccatctttgagtttctctccgagagttatcaagtcgctcgttgtcgccacggtataagggttgtcgatttctccctgtttctgttgcaggaagaaagtcattgtacttttctcttgattgactgcaagatcgtcggaaaccagtttcaaaccgagaacgtatttctttgatccgtcaagcgtacctaaatcatggaagcgcaaatttaccatacgcaggacatcgtcccccttaaaattaaaattatttccatccagatcataatattccacaggtaagaggtgatattcttcaccaaactctttggcatcgacaacagccaattccgcctttgcttctttttcgcaatggcttttctccaccataatgttatattggtattccggctcatccagatataaatcatatttgcctgtctgataaagcgacaaggtaatattggaataggtaacttcagccttttccggctgtgtcagatccatgacttcaccacatgctatcaacgaaaacaccattaatgacgctacaataggaatgtatcttttcataatatctttcttttaattattaaaaacagggattactataccgacgttatctcctgacaaccaaactttatctccgtctatacgaactacctccatctccatcccttctttgaggaaagaaactccttggaatgagaattcagtctttatcttttgaccgacagccgtgggcttcccgtcaaacttcacatgaatgtatttgctttgatccgaattttgcaggcgataagtcaaccgtttaggattaattgcagcctgaagttgttcctgctctgtaaaagtacaaattccatccaaactataaaacccaacttcggtatatcctgttatattcttcttatcaaccccgttttcggcatattccgtctccgcacaagaggtgaaagccaacaaacataccaacactacatatattactttcataagcgaataaatttaagataattactttctaacagttgtcgacaatatttctaccgatccatccttataagtcacttcggcggtaagtatttgtccgttcaggttcttattcactatattgatttcctgtccatccagctttactttataagatgagacatcagccggcaaatttaatagttgtactaacatatattcatccacttgttgatatttcaacaaaggaaactttcctgttacagacttggtcttaacatcatccttccacaacacggcatcatccgatttcagcaatgctacatggtaggcagttccgggaacaagattttcaaccaatgtatagtcattctccgaatcaagcgaccgacgtactacctctgttccattttcatctgttactgacaatatacctgttttatcggctccattcccccaacgaatgaacaattcccgttgccctccgacaaggctggaaactgccaatccatcccgggcagcgatgaaatcgggatacagcaatggattgggattgtagaatccgtctgcatccagtcctaaataacgggaaaaataaattcctccaagttcccacatttcagtcttcgcatcgtaaacagctctcgctccaccgggaaccacactaaaacgtccggtaatggcatacgtatcatatttcttgaacacctcataaaaagttttataccaattcttcggataccaggaataactctcaaaaaggctcttgaactcggttgcactgaccggtgtaccggcattagctttttcagctatcagattaaggtattcgtaaattttcatcccggccgtataaccatgcttggttccccattctcccagtgcgtcggctacatgaggatttaaagcacgtaccatagagaattccgtgcaaatcagtttctttgttacaccatatttatcgcggataatacggaaatcatcttccgcctggttgattttcaatgcgtgaacgtgtaagtcgagccctgcaacattaggattgttattaaccacagagactaccgcaggtaccgtttcgctcttcggcaattcggatacacggttcaatgctccggcataaatatcaaatgtccatccattagcctgtttccaggcagtcagccgattggcaaactcattcagaaatgcccgataatcctcaccgtccgcatgacagagatcggtatccaatgcattctcccattccggttcgttacccatgacaagtatttcaatattcttcgccatatcataggttttcagtaatacttcagttgcctgaaatatgtactccatctccttagttcctactttgggaaccgtgtcggtatataattcaaaaggtattttcaggctcaatataaatttcacacggtcgcccaaggctttcttggcctgaataaatttcagtgtaggaatatgtgtcctgatggcattttctttcacaccaacaatcttcccgttttcattctgaagaaacagattggggatattgacaaatcctctcacccaagtcactttcgactgcttcaacatctctatttccgtaatcgggtaatctatattttcattatagttcgcccccaaatcctgcgcctttgttcccatcgaacataagaacagcaatacaaacattaaaaaagctttcattttcatatacatacttcaaggttaattgtccgacatcgaacagaacaaaagtagagaaataaactccggtagaatagaacgattgttttatcaacgggatttatgttcagaataaacatttgaccttattttaatggttcttcttctacttcactgcgataataaccgtctacttcagcaaaaaaattctgcttcagggagtccagaagttcgggctgttgtgccgccatattctgttgttgagtccggtcggcttttacattaaataatccgtattcacccagattacccaattcatttccggtcagatttcgttcggaacctttataaggaggcatcataatccagtcgcccgaacgataagccatacgtccttgcgcttccagcactacatccttgcgagcagtctgctcttttccgaagaaagcatccagatagttccgactatccaaaccttccggtaaatcggcatgtatcatcgaacccagagaagcgagaatatctacctggcaaaccagtgcatcggacacgaccggctgaatctttcctttccaataaacaaacagaggaatatgcgtaccaccgtcgaacaaactatatttacctccgcgcagacctcctgcaggaaggtgatcgcctgccagttcgggagcgccgtctttgtaaccgtcattcagaaccggcccgttatcgctggagaagataatcagtgtcttttccaacaatccttctttcttcaagtgggcaagcagttcgccgacacaccagtctgcctcaacgatggcatcgccacgaggccccatcgttgttttgcccacaaatcgttggtggggagcacgaggtacgtgaggttcgtgcaagccataatacagaaagaaaggagcatctttgtgttcagtaacaaagttctttaccttatctacaaaatagtcggccatatcctcgtctttccaacgggctttctgtccgcctttcatatatccgatacggggaattccgtttactatagagttattgtgtccgtgtgcccactgcattttcagcatctccggatgagaaatggcagtcggttcgccttcaaaattatgctcgtaactcacttcgatgggatcggccggatcgagtcctactacatcgccgttttccacgtaaaccgtcgggacacggtcgttggttgccgcaatcaggcaagagtagtcgaaaccgatttctttggcacccggtttgacggtttcgttccagttgacattgccgtctcccatccccaaatgccactttccgatagctccggtcacatacccgcactgctgcatcatcttcggcaaggtaaactgattttcattaatgataagaggagcatctcccggcaggatttttgcatccttatttttccacggatacattccggtcatcaaagcgtagcggctgggagtggaagttgccgaagtggcatatccgttcgtgaaacaaactccgccatgagccagactgtcgatattcggagtatgaatcgtagtagagccgtaagcgctgacatcaccaaatcccagatcatcggcaagaatcacaatcacattcggcttttcttctacgtgctgtgaggtacaacctactaaagacaacgtaggaactagatagattatctttttcataatattatgtagttaataacgatgcaaatttagccaccacttatttatttatgtagaacaaatgtttaataatggggagaaatgtccatcctgcaactattcttatgaatcggatgtagcatatat

SEQ ID NO: 8052 - DNA, 8347 bp, Unknown
  gut microbiota DNA sequence
gatggtctaccggcatcgttgcttccacacggtcttcgtcggcgtatgtatattgaattcccaagtttcccattaatgcgtggcgtgcctgcgcattcagttggtcaaggggaatttcggctgcacgcacttcggctataatagccttctccactgcaacggccactccgtcttcctcattcgaagcagtcacatagtcggcacaggctttcaccgagtcttgtgaatgtcccatagctacgcccagcccggccaattgaatcattgttacgtcacacacaccgtcgcccacagcaatcacttcctcacgcttcacatccagtacctccagcaaagcacccaaagagttggctttgtcgatagcgcagggaactacttccaaaaaatatggttccgaacggaatacgtccaacgctccgttcagtcgtctcttccagtgatcttccagaccaaccagtgcttcttcgtcatcgctcaccagcatacacttacaaggagcaaaatcaacggcagcagaaaattcttcttctttaattatttgcaggttattcaaccgggcttcattttggatatgttcattttcaggagagtccgttatgatcgtatcatcatgataagtgaataaggcaaaaccgtttttacgggctttcttttccagatacggcaacatttcgggattaatccgacgttcaaacagaatttccccgttttgtgcattgataatctgacagccattataggaaaggataaaacctccatagtttccaagttcaagcatcttggccagcggcatcaggccataagtaggtctgccggatgccagcacaatacgtactcccatttgctgaaccttcaacagggcagccaatgtacgcttactaatttctttcgcatcattgaggagtgttccgtctacatcaagaaccaataatttatacttcatgattacacgattttgatttagattacaaaggtaggaaattgagtgaacgacagaaagcgtaaacagacaaaaattactttaatttcactctttcaaacgcatttccagataatcgcggaggatacgggcatgattatacaccggttctttggaagcgtaaagcaatgttatcaccggatgcggcttgataagagtcagaaaatcagccattgaggaagaagcgtcaagttctttctgatactgtatgacgaagtcttcccagtgtccgggaatatcttcgtgaaaccatctacgcaatgtggaagacggtgtgatgtcttttgcccaataatcgtacttaagccattctttcttcattccacgtggccataatttatctaccagtacccggtagccatctgtttctgaaaaatcgtcgtaaacccgctttatccttacctgtatcatttctattaatagttaattataaatagataaaccggaaaatgcgaaaattgtttagcagaatccactcaattctgtaacgaatcctgtgcttttttaaattcgtaaggagtcattcccgtctttttcttaaaaagattgtataaaatcggggtgctattaaatccggcctcatccgcaatggcacgtatcgtataattaggatgctttttcatcagttcaatggcataattaatgcgcaattcattgatatatccattgaaattggttccggtacattctcttatcatcctcgcaaaacgtgcgttattcagatgtacgatttgtgccagatcttctctcgacaattctgaagaaagatataactgtttctgaataacgatatcattcagttcctgaaatatcttcttattctcttcttcttccccactttctttatctgtatcgttagcaagttcttccagttcttcgggtgaaatacgttccggttcaacctccgacacaacagccagttgttcgtatacttccgataactggttcccatcttttctattagcaaatttctcgtttataagcctggcaagcatcctgttcttatattcgactatatgattgaaatgccacaaacgccaaacgataaacagagtcaacacaacaatacatgcaagaaaacagagggtaatatttcttatttttaattgaaaagcctgttcggcaatatattcttctttttcagaaacgccgtacattgcattcaattccaatgcagcattgtttctatcccgggtattgatactatctgttatagttaaaatcgtttcacgtatctcggcagcttctttgtatttatgcatacccaaatatgccttcacttcctgtcgaaggacagtcagatactgttcattcaaagtatcctgctgggttctcatcaattccttgaaccccctgcaattatcaataaccttttcatattgtccggaaagcgccaaataaggaaccgagtacatttttccgtcgggagtatgagactctttctttgataagtatttctgataatattgctccgccttctcatatttcttctccatgcaatagatgtaagctaatttggcatataaataactatattggccatctacataatcttcagagatttgaggtacttccttaagccgttcaatctgcttttcacgctcaaaacccactttcaatgcctcatcaattcgagaatcattcattaaaaagctcatttctgctccatagtaataagagagcagcatcatttcccgcatctcctttgagccccgcaaaagctcaatagtccggttaaaataatcgtatgctttatctttaaaagataatctccaattattctcccccatacagaaaaataacctggctttggcttccctgttccctaattcttgcgcctgcctgattccatctaatgcataacgcatactttcattatatttgctcatcattgccgaaaattcagccaaatgtactgtcattttcagcatgtgtttcggatctttttgatatagagaatcaagcaaataagctttccttgcatacataaatgctagtttattcatatacatattactatatgataaactacgcaattcatttacaacccgcaaaggaatcgttttcctgttctccacttcgtccagtaattgcagagcacgcctaggttcgggaatataaatattcctgatatatttctccgtatacagagaatcatcagttaaagttttatcagccctcgaaaattgattgtgtacaaataaaagcaccaaaatacatacaaaaaaacgcataagatcttaccgtgttttaatcattcagcatccaaagatatgtattttccacaaaaagtgcaaggtgcatcttaattttgcaaaattaaaataagaaacattagctatcttcttatcccaatcctagtttctgataaatcttcatctcacagaatcacaagcctaaagccttccccaaccgggcttcaatacacgcgctcaaatcggttgtaacaaacttcccattataaaaaagagtaaagatagtggctggtgtaggcgcatattgtgcttgttccatggtttctaattctattatttttaatgggagatccttgctcttggctgcattgaccaaagaaccgcgaacatggaattctgtaaacggacagcgatgagtataatacactactattccatcccggtcgggacactcacctgtcaatacactgtcgttgaatgaaggatcgggagcagccggatttattttcaaagccaacaaactgaatccgtaaggaagtttttctatagtttggaaaccttgtcgcagcagccattttgtatcactcataaaatgaaatttagaagtgcccactacggtaactaaaccatcttttccctgcaatttcgcatcatcaatagcagactgcagcaaagccttgccatgcccgcatcctttatatttacccgatacccagaaacaatttatcatcagataattaggagcactgacaggaacccacgccttttcagcaggaccatattcgatgaacacttttgcccgttcatcaatacgtctgaaaacataaccattatcaaactcttttttcagccatgctttttttaattcataactatctttgcatttcttgtccgaaaaagcacagcatatatgttcgtccgcaatattctccttcgtcaaagtgatgtaatttgtttccataatattttatttaataggtttaaaaataacagatcaataagcactcattattatgagttattagaaaatcgccaggctaatattctgctgcttttagttccctgctgcattctgataatcttatattccgatacattcacagacttcaatttagcacatagcttttcgagattcttttcttttgaaaccaagctggtgaaccatccacagttcttctgatatttctgactctcggagatcatattcagtataaaacggatttctccaccctcacaccaaagttcattcgcactcccgccaaaatttaattgtacttttttcaccttcgtccctttcaggctactcaatttgcgcaaagttccgtcttccgcttcttccttcgagctatgaaacggagggttacagatcgtaacatcaaagtattcgtcaggcatgataattccatcaaaaatctttcgactatctttctgaagtcgcaagtcaatcttatgtgccaataccgggttgcaagtcactatcttccgtgcattttctatcgagaccggatcaatatcactgcccacaaatgtccatccatactctgtgtgccctataatcggataaatacaatttgcacctaccccaacatccagacatctgcgtttcgttttctgttcgttcgcatcctcatcctctacccgcaaatctttcgctaccctatccggctgaataagatcggcaatataatgaatataatccgctcttccgggaatgggtggacacaagtattgtttcggtatatcccaataacgaatgccataataactgattaataatgctttatttaaagcttttactgcttgcggattaaaaaagtttatagtttgtacacccagaggattaagtgatacgaatctcttaagtggaggataattttctatcaacaacggaaaatcgtattgaccattgtgtttatttcttatatgtaactcacctttttgcgccatgtcggcaaagatacagagaattttcctgtctgcaaattttccctgttaatacactaaattggaatcaaatcactccaaaatatcataaaataagaaagcatcccataaggtcattttctgataccttaattaggatgcttattctataatacattgatattcaatgcttaaaagcggagagacaggctctcgaacttatactttcacagaatctcataaaaccgcaaacaactgataatcaagtgcaaattacaacatagagtaaaactaaatgtttctaaatgtcttttgctatctcaataattgggtgtatatttgggtgtagaatttcaaacgcacccaattatgaatatcaagcgcaacatcatttttgcattggagagccggaaaaagaacggtgtgccaatcgtagagaacgtacccatccgtatgcgtgtcatctttgccagccaacgcatcgagtttacaacgggctaccggattgacgtagccaaatgggatgcagacaagcagcgggtaaagaacggatgtaccaacaagctaaagcagagtgcagccgaaatcaatacggacttgctgaaatactatgccgaaatccagaatattttcaaggaatttgaggtgcaggaggtcatgccaacgacccaacagttgaaggaagctttcaacatgagaatgaaagacaccagcgaagaacagccggaagaagcccctgtcagcttttgggaggtattcgatgagtttgtaaaagagtgcggtaaccagaataactggacggcatccacctatgaaaaatttgcagcagtgaggaaccacctcaaagagttcaaggaggatgcaacgttcaactatttcgacgagtttggattgaacgaatacgtcaacttcctgcgtgataccaaggatatgagaaacagcaccatcggcaagcaaatgggattcctcaaatggttcctgcgctggagcttcaagaaaggacatcatcagaacattgcatacgatacattcaaaccgaaactgaaaaccacctcgaaaaaagtaatcttcctgacttgggatgaactgaacaagctgaaagactaccagatacccaaggataagcaatacctggaacgtgtgcgtgatgttttcctgttctgctgctttacgagtttgcggtattcggatgttcgcaatctgaaaagaagcgatgtgaagtccgaccacatcgaaataaccacagtcaagactgccgacagcctgacgattgaactgaacaaatacagcaaagccatactggacaaatacaaggacatccatttcgagaattacatggctctgcccgtcatcagcaaccagaagatgaacgattacctgaaagagctgggcgaactggcagaaatcaacgagcctgtacgggaaacctactacaagggaaatgaacgtattgatgaagtcacacccaaatacgctttgctcagtacccatgcaggaagaaggacattcatctgcaatgcgctggctctcggaatcccggcacaggtggtcatgaaatggacgggacacagcgactacaaagctatgaaaccctacattgacatagcggatgatattaaggcaaatgccatgaacaagtttaatcaactataaaagtatcaaacagtttcatagatagttatcaatgactatatttgtagaaattatcatcacaatatgagcaacaaggaatccaacatagagaaaacgaattttgatgcattcatacaagcggtcggttcggaaatagaacaggcacaagtaaggctgattgttgcagccaatgcacaaatgctgttccattactggaagataggcaattacatcctttatcaccagcagctgcacggatggggaagcaaaatcatcaagcagttggcaaaggctatccgactgcattaccctgaaaagaaaggctattcggaacgtaaccttacctatatgtgccagtttgcaaaagcatatcctttaagagcgttgcaaagtttcatagaaacagatgcaagcctgtctgtcccaaccatacagagtgtgaccaatgaagtattaaaactgaatgacaagcaatttacgcaggaacttactgcgcaaatacaatcgattgattgtcaatcattagcaattacgcaggaagttcctgcgcaatttgaagatgtgggaaaaaccgtgtctgccatttacaggatgggaatcagggaaatagaagaagttttcttgacctctcctatagccaaaataaactggacaagccaaatgactatacttgacagttcgctacctttaggtctaagctactggtacatgaagcagtctgtggaaatgggatggagcagcaatgtattgaaaatgcaaattgacagtgatttgtatagccgacaaatcagcaacaacaaggtaaacaatttcacgaccacacttccggctccacaaagcgaccttgccaattacctactcaaagacccgtacatctttgatttggcaggagccaaagaaaaagcagacgaaagggatattgaagaacagctggtgaaacacgttacccgctacctgttggaaatgggcaacggttttgccttcgttgcccggcagaagcacttccaagtcggaaacagcgatttctttgccgacctgattctatattccattccgttgcacgcatatattgtcatagaattgaaagccactcctttcaagccggaatatgccggacaactcaacttttacatcaacgtggtggatgataagttgagaggagaacacgacaacaagaccatcggtcttttgttgtgcagaggaaaggacgaagtggttgcccagtatgccctttccggctatgaccagcccatcggcatcagcgattaccaattgagcaaggcgattcccgagaaattgaaatcagcgttgcccagcgtagaagaagtggaagaagaactggcttctttccttgacaaggatccccaataataagagtatgccatgcagaaaacgataacaaccctcattcctcaatacggggagctgaacagaatctgcaaagattggattgtaagccatactttctcttttgaaaagcagaaattcatcgttgatttctactcgaaatggagcgatataaaggcttttgagcaagctatccttgaactggtgctgcatacaccgccagaaccatgtaccctgctgctgaaaagtctgaaaaaggaagtcaaagaat
